United States Patent Application Publication US 2014/0057251 A1 - sequence listing, part 160

SEQ ID NO: 306728 - DNA, 1842 bp, Cannabis indica
gccaaaaaggggaatgggggtcccctaaccgctggaaagagaccccctctggatgaatgtcaagaggaatcaaacgattcgcaacgacaggcatcaggtgcaaaatatctaagccttgcgggaagattaagagaaaagaatagaagacatgcaagggcaatttgaaactgccagaaagggcacatggggacgagagccaaaacattctccgactctgttccctaaatatattaataaataaaaaatttaatgatagaagaagaagaaatgcatcgtcggacacccactgaaggggacattacccagacagcaaccatggccgtcatttaaggaaaaataagcaaggcaaacaaacatgcacattatttttcctagaaaaagctactattgccacttgccctagcaaacaaagaagaaatatttgcacaaaaagaaagacttacacaatgagggcaaagtagggagaagaggcgtcgtacgacggtaatgcttcgcctggcaacggcggaggaagagtaggaggaaatttgaaaagtctggaatttcgttaaatgggtttgagaatttgaaaatcaaagggcagtaaaagtaacccagtcgagagaagtgttgatttatataggtcatctcggctatgaaacagaatcaaataagtaccatcgcacggtgggggtttacaactgttcaaattccctaatccaacggacaagatgaaagagcatgatgaggagaaaaggcggtcgaaatgtttgagtatatttctgacatcaagattgatgaaggggtatgtcaataggcgtgaaacgaatcgttgcctgctaaagagataaggaagaatgatgacgattctaaatctggcctacacgctcgaggcacgtgtcacgacatttattgaggtcagagacggagtacaagtcttatttatctacgactaaataagacttgggggtaagtattgctccaagtttttcccaatatacgtggaagtctcggcataggacacgtggcggactaagacccattacccggagatgagcaaagtacttaatcaaatttcctctaaagaaactaacaactagttcaagagcaagctcccggatgtggaaaagacaaccctgcatccccttcaggaggggaaggacgtatgaatccctccagactagtgaggctagagatgaactgtcacctcgcatttaatgcagcatgacggaagcatctgggaacgcccataagggaacgtgtcagacatcataaacccatcttttagcgattacacaataatcaagggtgccatgacagctccattatgaagaatcacatcaatcaaaaacagatgaaggctaatcgtgaacctaggcaagctactacgtaggttatgcatgccctattatatacatttgggaacttgcgcgcgcccgagggtagcacttagagacaattaagaccttttttcttccaaccaatcgctataaatacccctcaacaaaactaatgagggaataaaaaaaaacaaagaacattgtctgtaagaaacgcccacctattaataacgaagactcgtggactacggctcattaaggccagaaccacgtaaaaacatatgcattaattatccttaagttatctttattacataaaatatctagttcccaaaaatctcagtcaacatatagaacaacatgaaaatatttgaaataaaaaaaaaatacaaatttacaaggataaaaattaaaatgtacaatggcaaaaattttaaaaaaaaattgtgggagtaattgtgaaaatttatataaataaattatgcaaaaaaattaatttattaaaagttgagtggggtcatgt

SEQ ID NO: 306729 - DNA, 1026 bp, Cannabis indica
tttttaaaattaattttttttattaaaatgggagcaaaattttatattggtaaaaatttagagggtaaaatgttaatttttaacggtaaaaggaataaaacctaatagaatgggcataattatgtaattgttatattttaggggaaatttttaataagtcgtatactttaagggcaagattaagaagtataaaaagtccggggagtaaaaatactaattattctttaattaattaaaaacaatttttaaatgtgcttagttaattggtgagacgttttctccttagatttttttgccacgatctgactcactctcctacgataaaaatgattttttccctgttattcttttatgtgtgttctccatataatgcatatgataccactcgagaaagacatgtgtttcacacataaaaaaattatatacaattttatattacaatatgtattccaagtagtagtattcaagtgtggtatttcgacggttgtttatagtgcaataaaggtctgatacagtagttcgattgagttgttatcttgaagacgatagggttgatagtctgatagtttgcttgcacaataataggtagtgctacaaacattttagagagagcgatttaatctacgactcctctgattttcattcggtaatttgttcattttttattattttgagcaacttacagcatatattaataaaatcacaaaaaaaaaaaaatactcttgtgaaaatatagtgctcaaataaaaaaatcttattattttggattcttttttaagtcttgttttgctagatattttttttaattgtaatagtttccaaaatatttattttttacattgctctagacaaaataatattgtggcccataccttagctaaatatgtttaatttaatattattagtattgtggggtggtgatgcatatcgtttaccacaaaaaatttattaaattttatttctatattactagttactttagtataatggtaattacaggtcgatctcacgaggactattatcaat

SEQ ID NO: 306730 - DNA, 2000 bp, Cannabis indica
aaaatgacttacaaacaggagaagctcgagtggttgcaagtgctggtacacaaaaatgataaaatccaacttggcaccgttggagaaaaagcaaaagaaaatctggagtgcatgaaatttttgctggtttgagttctaagaaatgtgaaagtgaaattttgaaaaagaaagatatgaaagacatttatagagttgcgggggtgactcgagtcgttgctcatccaacggtctcacttcgaacttacgtaaacccccacgattcgatggctagggctagtttgttagaggcatgagtataatagacggttacactactcaagcaacaatctgataccctggaattaatggagcatcaaaatcaattaaaaggaaaatcaaatcagcttcaccaaaattgaggaaagatattaaataacattaaatacggtcacgtgtgctgcctacatgagcgtgatgtctgtgctctagaaggcaggttgcatgccccatttcacaaaattgcaaattaagacttgggggtaaatgttgcctggaatttttttcaaaatatgtggcacttcaggagtaagccatgtggcagtggaacccttgctacgggatgtgccataataaataacctccggagcatggtaattggtaggactttcaagagattagtcatctctaaaaggagccaccaggaggataatagttttgtcttttcttctccgtaagtgaactcgacttaaagaagagatagaaagacatacgaagcatggcatactgcttgaggtcaaattactacacacacatttaatgcggcatgaggaagatcatactacacattactttaaaaagacatgctcgagggtttaaacctataattctctaatttcatgatgccccatacatgatttgacggctacattatgagccatcaaattattggcaagagacaagtttagtctcatcaaactcctatatcaagcctaagcacataaaaaagaataggaaatcatgctctataattaaatctaaaaaattatgcaaagtatggttcatataagtactgcaatataggtttttttaccattattatgagcctataaaatactccaataatgtatgaaatagggatcccttttttggattctctgtaagaaaataattataaatacaagtgactcgtggactaaggttcattaatgccccaaccacgtaaaattccttccttcgactttcattaactactacaaatatctctaattaatagttactgaaaatctcggtcaataggtagaaaacaacattttccaggcattgattgaggaattatccaaaaataatgtagaaacacttgtgatatatagaggacaatattttccaaaaaaccatcaagaatgtatagaaaaagaatcgagaaataatcgtgaaagatagagaataaaatttttcaaggaataatcatgaaagtatcgaaaagacatcgaaatcttgtcgataatttaaagataatcaaaaaagttaaaacattcaaacaaccatagaaattattaaaaaactgtcacaaaataattgacaaactgtcaaaaaaggtcctctctaaccttggtacactatacatcgaaaacacattgagataatatcaaaacccgtcacaattttaaaacaaaaacacagctttcagcaaaaaaccagatctcacaatttcaaagaaaaaatagcaaaataacacaaatgcaaacaatgaccacacaatttacaagaaatgaactacactcttctgaatgtttaaggaattgttggaaaaacacttacccattattgtaggggatgtgcattatgtttgggttttccacgatgaatgtgcatgattcgtggccctagtggtctctccggcgtcttcaatcatctgtcacataaaaaatagttacttttagtcataacataaattttttgtgactaaatgtgacttttagtcacaacaaaatgtaacttgtgattaaaacatagaatttaga

SEQ ID NO: 306731 - DNA, 1175 bp, Cannabis indica
aagtattggaattaaaaaaattagtaaatttgttgtggcttacgacacgcatcaagaagtgaacatacttcactcttctgcagaaaatcctgaaataatgcacgccaaacagccattgcttcaggttatacagaaatcttgaagcatctggttgaccactcaagtgggtcattggctcgaccaataagaggttacttatcaattaagcatggctataaaaggctaagctctcgccgactttgtggttgaatgtacagcatatcccctgaaatattctttcaaaatttgaaagaaaagcaagagtcaaaaaagaagcaaaagcaagagtagaagtaaaggcataaaaattcagcccggttcattttttaaaaagggccgaatttgtctttattttagctaaaaataaagagcttttgagatagtttaaaaattgccaagaaactaaaatttgagaccaatttgtgaagaaaaatgataaaatggattttgggaacacggaagctcagtcaacgcgacgaatggttgaaaataaaggatagatttttctttttttctgagtctcctaaaggtggaggtccaagagagcaatactaattttgatgcaaagctaatgagaaaatcaaaatggagaatggttgattgccacacaaaagttaatattacaattccactatttttatcactattaaggtctcgtaatttgtaatttgtttgatagctaactagctaagagaccagtacaataagaataaaaaggattgattttgattttgagagaaaagtttgtgtgattctaattcataatcatatatgccatactagatacgctaacacgcataaaaagtccactatatatgtgtatataattttgaaagtccaaagagatctagaagacatcgaattggtatattttgactgtaattcgttcaccacgagctcaggtcctacttaatgcattagtcagaaattcggtatatgcattaaagacatctattgctatagtctatattaccattattaaatatgtattatactataagaagcattgttattaggcattaatgatgcttaatacctataaatatagggtaaaatctaatttttggaccctgtgttttgctaaaagttacagattagaccttgtgttttgtttaaaatgtacaaaaatggaccct

SEQ ID NO: 306732 - DNA, 1042 bp, Cannabis indica
tctaagatcctggtaaaaattaattccaacacctactgccctacaaaccaatgcagctggtattggaaatgtttagttaggctcaaagaccaattcaagaaggcactgcagggaagaacatatttacagcaacagtacagtgtgtcacaaggctacaacatcctgtgtccaactcgaacaaaaattcaatggagtaggcaggtatggagcagattaaatacacctaaacacaactttatgttgtggcttgcaatacactagaaacttaaaaccatggacatgttgtttaaaatgaagattgcaactgaacaatgatacattttatgttgtgatcacaatgaatcgactgatcatttattctttaaatgctcgatgactagaaacagattgcaagagctaaaggattggctaaactggaggaccactcacacaactctccctaatctcctcaaatggattgggagagccaagataagtaaattcaggaaaatggttataattgctgcagtagccagccttgtctacaacatatggctgatgagaaacaagtatttttggacctaagaagaacaagatcctgtcaaattgatcaaggagctgaaattgggggtcaaacatagaattgagctcttttggcctaaaaaagtttcggatgaggatagttattggtttacaaatttgtaaatattgtaactaaatagacactacaagaataatttgtatcactaacgacactattactaacgcaataaagtcctcactaaaagtaacattattaccatcgacatttaagtgtcctcagtaatgaaaatgttttttttttttttggtaaattagtcatcaatggagacaagatatgtcgacaggaatttttttattttttttttggaaagattcgttggaacaggcgggaattttccctctaaaaaaaacactgcgacaaagtcgtcaatgatggactgccacatcgtcagtgaacagcccataactgatgactttagtcgccattaaaatattaaaaaaacgattaaatgctcaaacc

SEQ ID NO: 306733 - DNA, 660 bp, Cannabis indica
ctcatgggagggcggcggagaacaagattggacgagtgttgtatgggcagcctgtggttgcatggcccgcaatgatttctaccacgttcacaattaggatttctgcctttccgaactcgagtagtagtgtttctggtgatggaatagcttttgttatggctcaagatgacaaaccttctcctcctcgtagttttggctcctatcttggactccttgatagatcaactcaaggtatcttctttttttttttttttgcctcatttttttaattaaatgtaatatctaaaattagaatgataataaaaatcaaatgtaacatctaataaatttattggaaaatataaatttaaaagtatatatttttatgtctgtgggttgaaaactcgagtaatatataaaataatcaaaactaaaataaatatacataaataatttagttaactcaataattgtagagaatatgaaaaattaaaacctgaatttgaaatcacgtatatgtagaccgaataaaacacgacacaaatatattaaacttacataccatgtcggcctacccttataaaaagttagcacaactcacatgttaataatttgagtaatttacagcaaaaccctttcaattatcaatttacttgcaaaaaaccatccaaccttatattt

SEQ ID NO: 306734 - DNA, 4190 bp, Cannabis indica
aagatgactctcattctcataactctaataacctagtttgagagcctccttctattgattttgaaatacatctccctctctctcttcatcaaaatcgaaccccatagtgaaagagtacatgcccactcatatcaagtcagttcttaatcatagtgtagaaaattgtgaagaattccaacacctaaaggagatccaggtttagatcttgttattactctgcgaagaacaagagttagagatctgaacggaaggagccataacatttcactgccaccaatgttaggttttctagaactttatatgtgtttattttattgttttaggaaattcatgtttagagtgttagattatagaatataattcaacatacttgttagtaaatctaaatcctagtaaaataagttccaacactttcaaccttatttggccaaaagagcttgattaaatttggccgtcccaaaagcccaaacccacaactgccttgggtacgcataatcggtgcctacgatcccaataaattgtgtgtttggtattcgatgagtcgcgccagatttggcctatcatagaatggatatcttgaataagctctttaggtaatcagaatcaagtcatgacatagaaagatatagcctagataatcaccttaagtaatatttctcagccgatttggcaaaacaaactcgccttccaacctcaaagtttatttcaaatcttaatatgggtggactcaaagacttccttttttccaatgtaggcaggcatcctcagatatttagtatgacactccacccgtttaacatccagataagaggcaagaacttggccctcgacttgagtaatatttctacccacacaaaggtctaagttttcatagttaatttgatggccagataacatagtatattggttcaatgtatgtttaaaacaacacccttcctcattgttttcattaaggaaaataaagcaatggccgacaaaaaagagatgggagagtttaagaccactcctaccaaactggataacatgaagaaggtttgattgttctgcttcttgaatcaaacaagagagaccttccgaacataataggaagaggtagggggagataggatttctttgtcataagctacattgaggtataatactcccacaaatctttccatcaataaggattggaaaagagattgtgcaaacacaattcataactttgtgcacccatctttcatagtaatcgagacaaggcatcatagcttccaagaaaggccactccactcggccataggctttcggcatatccattttgagagctattttcctaccatttccaaactactttttcttcatgcaatggagactttcaaaactgagaataacattatcctatattagacaccccttgatgaaagaactatgattcttagagataacctcatgtgaactttctttcatacggtcgactagacatttagctatggttttatagcttacattagataggctaataggtctaaatttagacactgtagttggcttgttcaccttgggaataagacatagtaaggttttcttcagggaactacaattcatattgtagttgaccacatgcaaacaaatacgagtaacatcctttccaataatggtctgatggtgatcataaaagagacggggcaaccaatcaagcacgaggctttaagggagttgatttgagaaagagaaatattaatacccacttctgtaaaaacctaaagatgcttttcattttgagaacgactgagatgagaaggcacaaattgttggaccgtctctaaaatgtgggaatggtcctaggtagaggaaataaactttcaaagtagccacatataataccttccaaatctacgttcgagctatgccaaatcagattcggatcaaagatgcccttgatttaattttttttccactgagatgaagttgttggtgaaagtagcgagtatttttgtattcatgggtaagccaaagtgctctgctgtgttgtttccaaaaaatcttatctttgaggagctattgattaaggtctctttaagatcctttgttttctcttggcaagccttctttttgcaatctattccaacttcctaagcgactaccataaacctgaaactgcatgcccaatttagatagggtgctactcaaacccccataatcccacacttcagttataatatgccaatagttctcattgtctaaccacgcttgttcgtaatggaagcgatgaccctagctagacttacgcctcgagctagaagggatgacattgaatttaagaagtaaaggatagtggttggaacaccaacactgaaagtgaaccacctcaaaaacttcaaaaagattaaaccaatcattatttccaaaaactatgtctaggcactcaaagataaaatttgaggattgcccattgaaccaagtaaaattaccaccatcaaactcaatctctcgaaaagaacagtagtcaatagcttggaaatttttttcatcaaatagggagctttggtagtacccctatttctcattgggatccataatttaattggggtctcccacacacacccaaggccttgaaaaacgttcagcaagatgccagaggagagtccaagaatttttccattgacatgggtttgggtcaccataaaatgctggacccatctgtgcttccccttttggtgcctttggacggggtggctttcgcctaagactttgaaggcttcttggctggagggttcacctccgacagtgtttcctcagaaacctcagttggaggcatagtcgaactcttctccttaagagtgctcgggactatgtccttgggtggaacttcatccaccattgaaagtttggctagagatgtctagccagaagcatcacccgacctcttctttaaagcacgcacgaccttctaagacatagatgcacaaaaataaaataagaaggtcaaaacaagtataatctaagtaaatgcaaataattttgaatgcaaaagtaccctacacgtaggcaagagcgttttctcgaacaagcaaagatggagcatcatcatctgaagaatccacctgttcctgctccaccataatggcttttccctttctagccactgaggcagacgatcaagcaacccttttagggctatcctatcctgatggaccgctcaataggtacttggctttttggaggaacctttcttttcttcttctacttcttgctcagagcctcctgtccgtgcatagcttctcttgctgcctcctcagcctttggtaaaaaattagccgaataaagcttgtacttaacgaagttggctttagtggccaggagagagatgttccgttcattagaagagagttggagaatttttcgagccctcttcatgagttctagtgtgaacaggagcgaaagtaggacaaaatgtgctggaagctggtgtaattggtgtccatcccattgacaaaataatagtcctccacgaagcctcctaccttcgtcacctcagtatccgtagtgcccgtcaaccacgacttctcgatctgagaaaagtagaagtaccccgacatgttctgattggggcttaacttcagattgaatagccagttggtgtcgtggggggacggctcaccccatccctatgaggtgtatagtacgaacaggacaggcatatacttgaggcccttaggagtgaactgggtcagattgatgtagtaataattggctatctttttgaagtgtgggagcacgggcagcattcaccctgattggtgtgagccctcgaccaagcgcaataaccctctccatggtctgtcgctagttggttcggggagggaaggaagcattcgacattccccaagagaccgtcctcgagaagattagtcaatttcttcatagtcaggacagatggtaaagaaatccatcgatttcccttcagacctttccttctcaaaggatgagccttaatatactcctcaaagatgtagtcctaacgagtctccaggacgtcacctgcttcacacactggctctccttcattattgtaaccgccaaatggcaacacctgggctaccccttcttcctcatcgccagcatcagaagaagtatcaggacggacctcgccttggtcctccacttcttggacttcaatgcccccaacagtttctgttgggttttatgcc

SEQ ID NO: 306735 - DNA, 1732 bp, Cannabis indica
acttctgtttctttattgatgttgaataaaatggattacattgaaatggagttttatttagggcataaaacccaacagggaggaccttatttaccactaagaatctttgaaaagtatttctggtaatatcttgtcagcaagtgtatgttgatactcacttttttgatgattcttggatgatgccaatcgaacaagatgaagacaatgctcagagtgcaactgtcatcttgtttaggatagtgtcggaggatgagagcttagttcgaaatgacaaagaatattcagggagaatatttatgttcttagaccaagaacctggagaagttatctccactcgatccgctccagaaaaggttggggaattagcaggtcgctgacgcttcatgcttcgtagtggtacttcgttgttttgcttttattttgttgtactaacaacttgtattttttctttctagacaacatgagcttcttggttgctatagcatcttgttcgaaatcaaagaggaagattctggtgccaaaggagaccgaacctccagtcagggaggttattgaaggtatccctgctgcttcttcttcttcgaagaagaaacttagaaagaggagaagacttgttgaagtgctcttcttccccaagactttggcaaggaaaagttcgaagctatttgtaatgccttaatctatagggactccacgtgtgtgattttataaactagtttagtaataatagattaattaattgttaaaatttgtgatgatattaaaaacttcactgaaataaaatcctagtaatgaacaacataacaatactaaaaccttgttctggggatctctattataaaagttttacaaaagtacttataaacagtaataagtcaaacaactgatacaaccagaaacaacttcgggtaccttggcacataggccaaaagggtcaatatgtacattttctgaagaagatcgtcgcctactggatcctctaacttttccttgcccttacgtgcaccacagaccactcgtgagtcataaggactcaacaagaaaagtaataaaggaaatacatttaataattaattatttattttaccatcataaaataattaaacaataacattccaaagattatataatataatcaaccatatgtatggaaatgagaagtaaccatcttcattatatcatattgcctgatcaggcaagtcaatgttttaattcggtaaccatatgcattgcctaatcaggaaaaccctaaccataacttggcacccatatattttatcacctaattaggtgagcccttgccataacctgacattcatatatcacattacctaatcaagcaagcctgtgctaaaatctggcacctatatatcacatcgcataatcaggcaagcccgtatatcacattgccattacctaattaaaaaattaacaatcaagaaacttgccatgccatgtggtacattatacttttcttacctcaagttttggttcaagtatgttggccgacctacttggagaatgatcaatgatcttgagccctaagtcataacaataaaagaataattaaccaagtaatctaacctattccaggtccaaaaatgaattcccaaggatccccaaaggtcactaggctatccctacctcaaacttctagaaaatatgaaaaatagggttcaaaatcaccatcaaaagcagtctgctgtttgggaaatggttaaccttttttccc

SEQ ID NO: 306736 - DNA, 1917 bp, Cannabis indica
ttatctcttggaattgccatgggcttgggaacccatgggctcatcaattcataaaggatcttgtgatccaaaagaaatccaatttcttgttcttatgtgaaactttagcccgaaaagagattattgagaaagtgcgtgtttctattggctttgatggggctatctctgtcgatcctttgggaaaaagtggtggcgttgctttattctagagatttgaggaggaggttcaggtgcttgaatttggtagagactatattgatgctattattactgatggtgtttatggtcattggagattaacaggattatatggagagccaaaaagacatttaaggagaaagacttgggagttattgactgtgctgaataataaacaaaacttgccttggtgtatcattggtgaccttaacgatatcacttcaagtgaggataaacgtggtggcaatccttatccgaactggttgattgagggatttaatgatgttttgactgaatgtgggcgtcataagttggaacttttcggacatccatacacctgggagtgtcgccgtggcacttcggactgggtggaggtgcgcattgatcgagctttggcgagtcaatcatggttagatctttcccttcggctaagcttttgaatttagaagcttcaacatctgaccattgccgtatacaattacgccctgttaatcaagttgttgttgcaagaaatcagaatttttgttttgaaaactcatggttaaaagaggatatttgtttgaaaattattgctgatagctggtctttgcatcataatgaaggtattcttgagaaattaaaggcttgtcgggagaatcttaagacatgggggaaggattattctaatgatttttctaggcgtataaaggagtgtaagaaagagatttttcaatggaaaaaagggagtgatatgggtttggttgagaagtatcagcaggctgttaataacttgaataatattctgctgcaaaaggaacttttttggaagcaaaagagtaaacaactttggcttcgagaaggagatagaaattccaagtattttcatgctactgctacagctaggagacgtcaaaatgcaatccaaagattgagaattgctactggtgagtgggtcgattggcaaggaggactcttgcaagttgtggttgattattttaatgatttgttcactccttcagctgttaattttgctgaagtggttgattgtgctcccagtacagtcacgattgatcaaaataaaaagcttcttgaaccggtgttggatgaggaaataaaaagagcactatttcagatgcatccggataaatccccaggccctgatgggcatgacaccgggattctaccagaaatattggagtacggtgagccatgacattgtgactttcgtttagaagtttttcacgaatggtatctttccgaaagaattaaatcacacgaacattgtactaattccaaagaagagacaacctgaggtaatgactgatcttcgccctaggtccttatgcaatgtgctttataagatcatatctaaggttttggccaatcggttaaaaggagtattgcctactgttatttcggataatcaaagtgcttttattccgggacgtttgatatgagataatgtaatggtgttttttgaaataatgcattacttgaaatgaaagaagattgggaaggagggctttatggctgtcaaaactcaatatgagtaaagcctatgatcgtgtggaataggcttttattgagtctctcttgcttcggatggggtttgatagaagggtagtggagttgattatgttctgtgtttctactgtaacttataatgtcactcatgggggtcgactctatgggtcctatttgtcctggtagaggcttgcggcaaggagatccattatcacc

SEQ ID NO: 306737 - DNA, 1615 bp, Cannabis indica
attaaaaaaaataatttttttgagccagccataggtagagagagaaaataaagagatttttagagagagaaagagaggaaaaagaaaggaagagatttggtgttaatttattttattttatttttatttttggctttctcacttttgatgtgctttgtaattgttttggggtgggctttgagattgtctcctttttctattcctcaacctcaagctcgaagcgcttccgagaggaaaacctagagattttatcgggagagttttatccgcctaaattttcttttttggatcatattaatacaactctggaggatccgggcctagggtttcgattgtgtggatatattggttttgttttttttttgggttggattcttggaatcgatcgaaatgttgattaggaatgctaattcggttaaattctagctccgatctttaaagtaggacttgaatcaaagggttggaataatggatgtggatgcgtcgatggtgccggagaacgatcacgatccggcggtggagaatcatagcacgacaacaacacctgcttcgcctcctgccatggatagggaacaacaacaacagcagcagcaacagcagttagatgagcagtcgcaagccggaggtggatctcctccgcagtcgtctgcgcaacagccggtttcgcagcaaactcagcctcagcagcagggcgtggctgctggtgctcaggtgcagcagactccggtggttggtccgcgccatgccccgacctacacggtcgtgaatgcaattatagagaagaaagaggatggaccggggccgaggtgcggtcatacgttgacggcggttgcagctgtgggagacgagggtacgccgggttacattggccccaggttgattttatttggcggtgccaccgcccttgagggaaattctgcggcttctgggactccatcttccgctggaagtgccggcatccgtacgttctttaatttgatatcttctaatatgattttatttgaatgtttggaaatatcaaattatggaactctaaacataagctgcatgttctgttttctgtgccttataagttgtttcaagttatatgtgtttccatttttcacatccagtcggactgaataatttgttaaacctaactttattggtttttatgcaatgattgttttaagaatttggttattttcttcttgctttgggtgttttaaaacaagttaccctgctaattgaattcctagttctttagcttgattatgattaatacgtgtaagcggattgaatacttgttgagtttgttttatatcttcctaattgtgtaatctaaaacaacttattctcgccaaatttatcttatagtatacagcggagcaccattgattagtggctgtaagcagaaaattattaatttgtaatttgagagatggagggatcttttattgatcgtaaagttaaaactttagttgattaatgcacatgctgcttgtccttgtggtttttattttccaagcaaattaattttgatccttggttttgtggagtccattattatttataaggggaattaccccatatgctgttttttaacttttttttcaaatttacggtttgggtttct

SEQ ID NO: 306738 - DNA, 1854 bp, Cannabis indica
caaattttaaattatacatattgatatgtcattcacacacagccacatcaacattttgttagttacatgggataaatttttagcagaatttcatattatagactgaacaatagttcagtttaaaacaaccaaaaatttagaagacgcaatttgatagtggtaaataactcgaaagataattcgtatatgtttaggcatgaaatgcttaaaattattgttttgttagttgctgccttacggattcctgttgaatactgacatgttcccacttattgctgagtcaacttcttgaaaaatttctactaattttttgtttggatatttcttgtgttaatatttgtaatactaattgaacagataccaacaaatattttgaaagactgtaaagcactgcagaacctctcccttcatggcaaccctatttcaatggatcagtttcagcaggtatgccacacaatttccattccctgatgtcagcttcatattgtcaaaaaaaaaaaaagaggggaaagaatttttttttcctttttccattcaattgtggtatgcctgtgctgtatcaatcatttactccaaattattccagatggaaggattcgaagagtttgaagctaggaggaggaagaagtttgacaagcaaattgattcaaatgtgatgataagctccaaagggcttgatgagggtgttgatctttgagagttagttactccttcaaattactgtaagtgcccgctaaccgttccaatgactttgctttttaatttcaagcaaaggtagcaattttacaatcttacaggtttgttctgttcaatagcttggtttgtatgctctgctaattaacttaaattctctgaacagatcgaacaacagagattgaacagtccacagctatttaaaatgctagaaagcagtattaattattgatatctgttgattcatatgaacttttgatgtaatttggaagagagaatactgttatatatgattccttgtcatatgtgagataaactgcattgcattgtacatgttttctttttccttttctttggttcatgtttaagttgtatattgggaaaaaaaacttattgagacttatcaatgatgctatttttttcatggatatgtacaaagaaagagcttgaccgagtcaataataagtttctcttattttgattctacttcgggttcattccatggtgcctttatggaaaagttcaatacttttttgtttgtagaagttgaagaaaaacaataggggtgttccatgattattgattattgtcaagattacaataacactggtacactacaaatattcgtgaacaccctttaggttccaaaattgtcatagcgcatttttttttttttgagaaaaagatataattcattgaaataaattcgctgccacagaaaaattcaaaaattgtggacaagtattcgtccaaacataatctcttaaattagtaatagaagttgtcagtgtgtaggcaacaccattcgtcgaacgcggaaatgcactgcaagaaccaccaccaacaacaactaataaaaaacagacatctaataaaatagactgaacaccaaaattcatgtgaaaattattaatccaatcaattgttacaatcgaatcactattaataatagagatatagaaactatattgatgcgcaagagacagacctaactgaatggcaagtaactctgccacattaacagagaaatcacctaatacaccagatgactacgccactggaacatcccttgtacccctaggttgttcttcctgggtgttggggatttccctggtatgcttcctgtctcttagttcttgaacctcgaggtcttcctcgtgg

SEQ ID NO: 306739 - DNA, 1127 bp, Cannabis indica
taatatatcttcttggtgtaacacatgcttttattatattaataaaataatgaagaatatatattttagtgttgtgattggaattaaaaaaaaaattaataatgaaattatactttttttagtgttagtttaacactatatttaacttttatgtttggagatggccttagttaaagactttgaaaccactaataatatagtttgtatatgagtagtgagtggacatgtacaaaggcttttgccttttaaaactcacgtgtggatggtggtggcatatttatttaaatcggattaaaataaaaattgtaaatctcgaagtggttcaaagaaatcaaataaaaaataagcattgtcataggtacgtacatgaatattagtttcttccaatttaagaaaaattattgaggattttgactaaaaactttgtatctaacataatttatttgatttaatcttttttttttttaaaaaaagaacaatatttgagaaacttctgtaataatattttcttaaaagagagttttaaattgaaatgcaatcatatcaaaccctataaataaaacaatgcacgaggaatacctaatatattttttagtaataatacatagtacacttcttttgagcatcttagtaatcagttacttattaatggtcaaataagttattaatggtaatcacttattaatgataattagttattaatggtaatcagttacttattaggcaggatggtcatttatttttctatatttttcttcttgttagggttaatgagcttgctaatcagtttaagggtattcttatttgtagatctgcctggttattacatatttaatttttaatgatgataatattttgtttgatactgttactcctcactcttgtattgctattaagggcattcttactctttgtcaatagtttgggtctccataaaaaaccttctatattagtaaatatttgagtgttcctcagtattttggtaggtctaagaaatctacttttaatgacttagttcaaaatgttagttataaaactaatcactacaaaaaatagatacttttagtgataattttttggtcacaacataaatttttgtaactaaatgtgacttttagtcataacaa

SEQ ID NO: 306740 - DNA, 3996 bp, Cannabis indica
tgatctaactccatagagcactcccaaattctattttttaaaatactcaagcaaaataatattttaattattttaccacaaatattttacattacaccatttatttgttggagtaggattttgggaataattctttatatttttaaattttctttattttaaagaaaaaaaatctcagtaggaaaaaaaatctcagatagggtagatcctattatgctttatgtattatagtttataaataaatgatactattatgctttatgtattatagtttataaataaatgattatttctttaggagaaagcaaacaatgatatcattgggagaagatttctacaagtcttacttcaggaggaagcaaccatcactatcttcaggagaagatttctacaagtcttgtatcgggtggaagcaagcaacgttatcttcggagaagatttgtacaagtcttgcatcgggaggaagcaagcagtcatcaagtaattaatttgaagggaattcaaaccttggtgtcttaaagagattcattcagcaaataggagtacatgaagcttgcgaaaaaattattagagggagtctatgttttgtttatgtcaattacattgtactttcaaaatttaactaatgaatcttatctctaggcgtggtcccatggactagtagcaatctgcaaggcttgctgataccacttgcaaaatatcttgtcattttaatttcaataattttactttctacagtgtactttggataatatttaatttttaatagaataaattttaattttgttcaaataattttataatagttccacaataattaaattatttattagttatactattcaattataaaaatagaatttcaattagtatcaaaacagttcactaaactcttagtgagatcttgttgttatttttcgtttaatttgttttgtgtaaaatgtttccttttccagaaagtagttcggtgtattatccttcacctctaaatgactcaaaatatctatatacttgttgctcaaatacgctaaagagactatattatattctagaagtcaatcaaagttcctcaatgttaagcgagtaaggatagagatccaggacccttattatcaatctactattggggaggatcagagttacctaaagctttaagtattcaagaaagatagtgagtaagtgtgatccgagaaggctttgactcgctgatcccagagttcattcaatagtatcatatttggaacttgaactagtggttatccaccctctaacaaaggatcgaatcttgtcccctgcgtatgacagtggtagtgcatgtacgtgcctttgaaattccttttttctttttttttttttttttttttctgacggcttgtctacgcaataacttttcaagtgaaagctttgagtaacacttgtccgtgtccacatgggatccttcactacagccatacaccacacaatggagctaccaaccaacgatcagatctacatgtgtagtgtctgaccttgtagcatgtttagtacggaaccctaggtgggtgttatcccgaattttttctacttgatgtggcatgtccacataagccaaagaaggagtacatgtggaatacaaccttgctagtagaaagatagggtctccatacaaggtatggcaaaattgtcaagcagtaactgaaaggagtgaagcgagccatcaagaagttgtaccaatatgtctggctggcaaagagaagcctataggccggctagagtgagcttgtatggctggccaatatctaggcacaagttggcccgcgaaaatgtgacttccagaccaaggaagcttttgtttgtccaaggaaaactgacctctagaaggaaatggtgtacaaaactgtcctccccttgccaaaggctggcctcatcttggtaaagctgacagtgacctgcaagcacatgacctgctaggtcctattaggggcatggccggccagactatatcttctactgtatggtaggctaggattggcctggcaggatttctgtacaacctgatacctggaatctaagctacttctgaattgggcccttaatgacccaacaaactgatagaaaatatttactttcaaggggaaatttagtcttttgtatttaattaatttaatgtgtaaatatctaagattttaattgtaaattgggatttaggttttcatatataaagtccttaactttaacctagaaaacctaagtctaattctgtcctctaagtctcaaaccctagcctctcttcatctctctattggacacgccctaggggttttcttctcacttcctttctcacacgcctttaaggtaataccactctctcaatagagatcggcctacttgatctattctttgtaaccttatagagagccatatcagatcccacatatagcgatctgaatagtatagctcttggtatccatacaacaaaaaaggtgagttggtcattacccgctaactaagggggtcaaacctctattaaaatccttgtctcatttacattactgttcttattgtgaaacaagtggaaagcatgagatccatacaaccccgttatcgattgatcacttttcaaggtaatagtttggtgctttcattaagagagagttgatatcgtatcatatcaaatggcatggttaacatgagaagaactgcggttgcaccatttgcatcttcagttcttcctcaagacccacaaagtgcggaaactgatgtccatgttgcagccaggactggaattcccattaatgctgcagaagtcgtcaatgctgtcatcttggcaggcaacacgaatctagcaactacaactggctaagatgttataaacatccctgtcggatctgaacaatcgtcccctacctctccaatggaggaccctccacaggtgcctgaaggtagaatccttggtggcacccccaaggaacaataaccaaatttcttccttgctactatgtaggagagataagacaaggaattggcgcacgtggacttcggagaagctctcaagttagccagacttagagaggtcatctactaagctggctaattgaaaaacaatgcactgctaattgcaatgcattcgctcaacagagacgcaaattccttgaagaaacacacgctgctgatttcaatgcattagcccagtagagacgcggatttgtaagatagatggatgaaaaatagtacatcctttgattacactaggtagagttagatctccttaacagagaggcgaacgatttgataatgcgattcaactagagaactaatttaagaggccaagatctcgttagagatccactacaaggaaggctaattgatagattagggagggtctatggccaagctgaccaacttggccccttagggactaggaaaaatcttccctcgctagaaggaagacaaccatgcctcaaaggtctaatggcaggaacaactagatcttagcaaccggcgacatagaaggccgtccagggacctcagtctcagcaacaacccctacctatcttatggccacacaaccaccaacaagagtccctgtggccgaccaaccacaagcaagagtccctatgtccagccagcaacctaaagaagtccctattgggctttgtgtgctaaataaaacttatttcaatataatcagatatactaattaataaagatcagaaattgtattttatgttgcgtggttcacatgatttatttcatgattatatttaatgtataaattctattaagtccagaacatatatatatatatgtatttatttgttcatgattatagtattgtcagcacagtggaatataatcattattatatgttcaaaagtatttcccatgatttgttaattcattggagttagaatgacatgataatcggcaataaggtagacttacaccttggataagtgttatgtcaattgtaaaaccctaactagcataggcgtgtttacgtgatttttaaacgta

SEQ ID NO: 306741 - DNA, 2643 bp, Cannabis indica
gtgagggattacataattggccaagttactaaatcacaaaataaaaacaaaaaacattcaagagtttaaattagaatcaagacatatccttacaagaacagagccaaccacaagacacatatcacaacttaaaagatttttaccttaatttaccactttattaaagctttaaaattttcaagaatttgcaatagtttgctatgctcaacatcattcggttgattacaaagtactactcacttaccaaaagaatgagctcaaggttgctaaggatatttagtgactaactactagttagttagttgagtggtcatttttgatatgattgttaatcttttcttagctatcattaatttaaagttgttactctttgttagttctattagattagtcatgtttataaatactttcattgtattccttgttaaaagtaatgagaattatcataattacttctcttcacatttttcattttttattactcactttatcttctagtcaagttggtatcagagtaatgtgttcataatggcctctagtattttttctctcaattatggttcctataccatgtttcttcctctactaagattagatcgaagcaactaacgttttggcagtctcaagtgctttttgtcgttcgagcttaagatcttaaagatatttaccgattaggagaaaaataaaaaaattatgaagaaggtcaccaacttggaaaaaaccatgcaacttttgaccagaaaaacttgaaaaaggagaaagaaattgatgccaacttcatattttgattaataacttttaagcaattcaataaatcttgaaacaataaatggttgtatctagttatttttagtgtaggcacacttctttttaaaagtttttttaaaatgaatttttggagactttatttatgaaaagttttgtatttttacattattttatgtcttaaagttacgagtccttacatcttctccaagaaaggaggccaccctcaaataacaacgatgccacctcctcacgattgagagccactgctccctcatcccacgacaagtgaatcatcatcatgcaccaaatcatatcatcgctgacataaatattcattactcattgcacacttagattaattatttatgtttgtgcacaaggctcacactcagacttaattaaaacaaaagactcgaatactactcttagtgatacttataaatcttagtacgataaatagaaggaattagacttgcaaccaatgttctccacccatgaggttatctacacatgaaataaccaacaagggaaaatattatctgaatattctactataaatactaggggtgttcataaaaactgataaattgaaatcccatcaaaccgaccagaccgtaaccaaatttttggttccacaacatcaccgaatttggcgatcggtttcggtttcgatttttttgaaaaccgcaataaaccgcccaatatcgctaaaagtgtccaaaatcgccaaaccgaaaaaccactaaaaactgccaaaaaccgtacggtcggttttatacggttataatttctaaaaagtcggttataaaattgtaaaaaccgaccataaccgaccgaatttcacccctaataaataccatagtacacccttatgggggagaccaggagatgagcaactggtctcaattcgcatgatccaatctaatttaatttgcaaagtgtgtattggattggaataaaaaatataaaatttgaacttttgcggattgaatattgtttcatatgtaaaagttacgatctaatctaatctatacttatttatatttattttaaattataggtatattattaatctttttcaaagcttaatatatcaaacatatatatttatatacaaaaaaacataatctaaaactataacttatctttctttttacacacaactttttatttatttttttgttaaagaatttaaatggaatattttttgttaggaatttcggagaatttttataattctaacaatttattaatacaatatattaatagagtatgaactcatgtaaagatcaacaataatagaaatgaaaacaaaggagttaaaatcataataatgaaataagaacattaacaatatttttatgaacaatgttgacgtgaactcgttaatgatggtcaaaaactcaatgtatgaatgtcaaaaaatagatgacattagagtgtaacttaagaactcatagagcaacaatggtaaaaaatgtgtcttgtattatcaacttaatagcttatgttacaaagaatttttaatcccttctcaaatcaaaaacatgggtatttataagttctaatggtctgaaatacattagttgtccacaaaggataagatgacgttctgatcctacaagtcccagtgcaggaggtggtcttgtgcattgtacgccataaaaatatattaaaaaaaaatattcgaacgtaagaatataaaaaatttacaaaaaaaattgtgttttatgtaattatctctttattttattaacatattaatttattttaaatatttatattttagtaatatataagaaataagtaaatatttttaaaaaattattagagtttttaataaaaaaataatttattattagaataatttacgac

SEQ ID NO: 306742 - DNA, 1907 bp, Cannabis indica
aatcgtagatggctgggtccgccattgttggagtataggaggagctcaagagtgtaaaactgacccagaaaattatctctctctgtatgtgtatacatatacatatatatatatatattagtagtgaggtttaaatgggtttttttttttgttgtcataaccctaaaacaaactttatctactatgtgattggttgtgaggtaaaattacggatctgcccctaacagatattttttaaaagctgtacagctatgtatgtgtatatagtaggagctgtaataatatcacactttcgtctaaatcagttttttgcttgcattacaagtataagtatggtatattattatatcattaatattaatgatatgcattttaataattactaggtttcaaacatttgaccaattggcatgtctacaaataattttattaggtcaataaaacactaaaatgttaaatttgttaagaatttacactaaattcattccaactacactttaaaatttattctatatataacattatttataatgtttcactaatattaatgtgtacaccaaatatatttttatatttataactaaattctgttagtgtatactatagactacactaaatatatttctattagtttttaatatttaaataatatatttataaataaatgttttgtatatatattatttttgtttatttataatttaataaagtaatataataataaaaactataattttagtgtaatttttaatgttttagttttaaaattttattattgttgtgttgatttaatatcaaatttgatatttattattgaagttgccctaagataggtcatattgtgattaattcttagcaattaaaataacttttagtattttcgaaacatattgacattaaaggaagaggaatttcctttttatgttttattaaatttaaatatctagtttatattgcttcaattatttatagaatcctatatatattatatagctagggaaggagattattagtactagtacaatcatggagtgatggactttctaaacttcacttttattaattttttgttcactgaaaatctttgagaagagatcacatgatgatatatgcataggcaatataatactaattttatattatatagtattttgatataaaataagacaataataataaagtttcaacaaaatatatttttattattattacaactttggtgatacaggatcagttgtttatttaggttcaatccaattaatattttgttttatatataaccatttgttacataatatataaaatgcattatttcaatatttttttaattacaatatatagaaacgagaagagacattatataatgtaaaggtgagaagggaatgggaggcatgggatggtatgagatctgattagacacgtgtacggctaacaataatgcgcatatattaattaattaaaaaatagatagaagaagaaaggggtatcgttgttgtccaaataaccaccaacaagaactggtgaaatcatcagaagaaaacacaccctcctatctcataaaataaataaataaataaaataataataagggtttgagagagtaggggtagaataggaaattaaaaaaaagggaaggtaacgttaacgtaataggtagagaaaggacagtgatgaagaagtggtaacactactacttacctcccattcttcagtactgttattcttatgtcggacacctcacccttacccttaattattttattcattcatttttctatttttcaatttttataaattcttatctttttccattcaaccaaaaacttctatccaagaatacacttgggaccaagtaaattatattctaatttgaaagttataactaaatagagttatactagaaaaaa

SEQ ID NO: 306743 - DNA, 1803 bp, Cannabis indica
tatgtaactaaattatacttatttataactaaaaaaaattgacttaataaagtaaatacttgtttcagcacatggcacaaaaaaaaaaaaaaaaaaaaaaaaaatgaggaccccgcttcctaaggatataaggcaacaagtggtttagaatgttatttatccttcaccaaacaggtcacaatgatcacaaaacaatgaatcataaaactgaaaatgtcacttggacatcctcgagctcaactgggcacaaagttgacatgtcgtgctttggcttgtatcatttttagtttccaactaattcctatgtgaatataattagccattatactgtaatacatgagagacatgccccaattaagttttaagtcttaaatacaagtttgaaagaaactgcacccggagacaccagggtgcctaggttgatattcaattgaccttggcgggatgaaggctaaggtttaggcttttagaaacttctttggatccaaattcctcaaatccaacttggaacaatgcaaaaacatgagttttgtcaacgacatcctgaagaagcatatctgaaactatgggtgcccaagctgacattgtaacatgggcaccgattttactccacttagtaactttagtgcgaattagacaaatatgaaataaagtgagcacttttcaccaaaaataagttaggacatgaacgagataactttcagagactttgcccctctacttggacgcccaatgctggctaggccactatgggcgctcaagttgacgtatctataaggagcacttcggtacacctttctatattagtcttttgggaatttttcttatttttgtcaacgatgaagatacaagtacttttggaaagaaaacaaaaccacctaaggcctagataaaaagctgggtgcccaacacatcaagagcaggtgccctaggtgcccaggtggacatataccatgccacttgtgattttgtcaattcaattgcgattccgtctcgagcattattgtttttctcccaaagcaagatatgagacttgaaatcagaggaaaatgtctaagtggtggttcaacccccaggtaccacactgggcatccaagttgacattcaacctagagctcaatgttttgtccattaaacgacaattctgtcctaggcattagtcttaatttgctgccaaaataagatttggatgcttccacaagtcaatatctcatgtatatgtgtcaagcacaaatctaccgacatttacgagcactaatcaccccatcatcaactagttgcaaccggtgatcacccagacatctcttgcgtgcatcaactataagaccaagagatatcctgctatttgtggaatagagaagagagctacgatgcatgcatgttattgatatataagaatttttttttgttgagcttattttgtctacttttccttagtaaataaggaagtgcaaccacaggttggagttgggctttccaactcacacagtttcctccaagtaggaacatgtaagatgaagtagactttctgctgtctctgtccccggcatagtcggcatcgctgtatccttctatgttggtgctgaacttctgttgcttgtagatgagtccaaccttaggtgtccctactaggtacctgaaaacccatttcattgcaagccaatgaatctttcctgggtttgccatgtatttgctcaaggtacttatggcaaaggccagatttggccttgtacaaaccattaagtacataatagtcccaactgcacttgagtaaggcactttactcattgcttccttctctgc

SEQ ID NO: 306744 - DNA, 1081 bp, Cannabis indica
tttactcttaggagtggagctgtgatttgaacaagtattaagttgtctgtaatctcatattctactcatggaagttgaatgcatagttgccattgaggctgctaaataattaatttggctaagaaagattgatatacaaatcttgggattatttctatggataaactactagtattattgtttgataacactagagcgataacaaacaataaagaatccagaagccagaagcacatagaaagtaccacatcattaggaattttgtggcaaggggagaggtgttcgttgagaaggtttccactgaaaaacacctagtagatcctttcataaagacacttctcgaatgaacttttgagagacatatcaagaacatgagattaataaaaattcaatatttatttttatattagtgtaagtttgagtttgtttggtgttatgcccttaataaaatcttttttctataattttatttagtaattcaataaacaaaatagaaaatcatttatgatgtagtcaattgtttggttcatacatttttgtttgacttgattatatgtttaatatttaaattctagtaaatttagaacacgtagtttagtgatgttattactgtagaaaatatttgtgattatataattcaaacttattagtcctttgatttatcagtggacagataaataaagctcaaactcaaagtgtgatcttaaattacattaaatgcaaaagatattgataaagtcaaaatcgtaattttgtactacgtagagaaaattagatgaaagaataaattaaattttagtgatcaaattaatttataattatttaaatgtcaaaaattatgattaacttgaaacacaaatttaaataaaaaaataaattaattaactggatcaaattataattatagtgtgatgaacaataatgaaattggaaaagtaatctagataaaactatttgagtttttgtgataatagcatttttctaaataattttagtaaataatataagagtttttttatttttacatttcaaaatagttttttttttatttttttttatttttacagaatactacatagaa

SEQ ID NO: 306745 - DNA, 2213 bp, Cannabis indica
cctacaaatacaattgtgtaagataagatattaaaatattgtatcattttttttatatgctaccatgaatccattacgttataagcaaaaaatatgataataattttttaaatctatttgcaatttctcaactacttccttgtgagaggacaaataatcctatatatgtgtatatatatttattggaacactttgtgatgtttcgttataaagtgaaaaaattccgccactaaacctgaagtgtgttgataatataccaaatttctcaccgtatgttgagacaaaaaagaaagaaaatatagcataacaaataatttatctttcaaattttaggaataattttttcttttaaaaaaaataataggagataatatttatatgcacaaattttgtaaccttattttatcctagtgataatttgggagtaaatatgaccggctaaaaatcatatttaaaacttctcaaacaaagaaaaatcatatttaaaataattctatgacaaatagcactttggcttaattttaatagaaatgagtgtcgattttagcaaaagaaaagagaaaaagaaagaaataagtatcaaatctcttcacaataagaacaaaaataattcacttacacataacacatacctatatatttgtaaatatttaaaacctttggacatttacctcatgattattgaaagagggttattaaatatactaacgagtaacgatcagtatagttatatttatgaatgagaagaactatcaatttacttatagtagtaaaataaaatgggggcatagggtggggcgttgcgcagtagattattatggcctctcaagtgtgtatgtatgggatttggatgggtaccctcctttggtagccacccacccagtaagtagccgaggaaagaaaaagagggcttttgttattaggggcttcgcctcacaaacccaaaattaaccaacgacatacatctgcttccttcttcagctctaaaactctagggctataatataccaaaacaaccctcttcaccatttcctgctgcttattcattttcagtcaacaaacccctcggctcggcctccaacccaccgttttcaacaactgaccacacccccaatggattcacaacctaacgaacaaaacgttaatggagaagctcatgactccgaaaggttagaccgcagagatgaggacgaagaagaagactacaagtctcaacctcataccggtgacggagctagtcctgggtaatctcttttctctacttttttaatttttattttcttctttcttaggaatttaattgaaaggatttatttagcgaatctatgtgtggaagactccgttttttttatttttttttttgttggtaatttgtaggaaaatctttatagggggtttagcgagagagacgagttctggtaagttgttagttcgttttaagattgatttgatttagttttggttttggtgtttgtaattaaagctctgtgaaaattttgaaatgcagcacaatttattaagcacttcggtaaatatggggagattatagattcagtgataatgaaggacaggaaaacagggcaaccccgtggatttgggtttgtgacctacgctgacccctctgttgttgataaagttattcaagacactcatgtcatcaacggaaaacaagtaaggcttcttgtgtgtttattccttcttttgagtatttatttagagattctttggtttatggggagtatttcctttgtgggtctttgatgcttttttcttttcttttaggtggaaatcaaacggacaataccgaggggagctgctgggtctaaggatttcaagactaagaagatatttgttggtgggattcccacaacagttaatgaaggtgaacctctttgtgtttatttcaaggagatttctatgtacagcatgctcttctgtcatattgatcattgagttacttgtgtgcttgttgtatatgggcagatgagtttagagaattcttttcagagtttggagaggtgaaggaacatcagattatgagagatcatgcaactagtcgttcccgtggctttggttttattacatttgaaactgagcaagcagttgatgatctcttggccaaaggaaacaaacttgagatggctggggctcaggtaagatggacctaagaccttgaccattatattcttgtgttattcaatagaaattatagt

SEQ ID NO: 306746 - DNA, 1545 bp, Cannabis indica
tcttgttgattttatgttgttttcgtgttattttttagaaaactgtaaaaatgtaaaaaaacattctttgaacgtaaaaatgtaaatattttacaaaaaatggtgtcttatgtaattattccaaaaaatttttgggccctgatattagaaaaaatgtggtattttttaaaatcagtaaaaagaaatatataattttaaaaaagaaaagaaaaattttgagcccctgaactgggtggacccaaggcacaagcctagcccctatgcacagggcggacctgtatcatacataaatgtaaagaaaaacaagaaaaggatagaagttatagatgatgaaagagaaattaagagtgagatatagagggggaccaaatcaaattgaattaaatcatatcattattatatatcaacaccatatatatagtgttgagttgagggtgatgattatatatatatatatatatatgattatatgtatatattatctcttagctagctgtctttgctgtgtggattctggtggggtccaccatatatattaacactacgtacgtacatactgatactgtcatcaaacacaggttttatattatttgagttttcgatagcttaagcttttggaatcttacaaaacaatattggaattgaaaggtacgtacgtaatacttataataattaattacttctgtacatacatatatacagaaatacacccaaatctgcagtcactagtaataatatatacaatttactgtcagttgtgtcaaataataataataatacgtactgtcagaaaataatatcagtagaaaatttccaattctactcgattatgtagttaagggctacttgagcaatgaagttgggatgtaaatggagatccgacccgattatatgttgacctcatgatctgtcccaatctgtggaagcaaatcatgaatcggagcgaataagatccggtccgttttttatttgtataccgagtctaatctgacctattttttttaaagaaaattattattattatttttacaatttattgtttattaggaaaaatgaattatgtctttttaaaaaatatgaatggcatattaagcttattcatacttagtataatagtaatcacaccaggccactgtgaaaacagagagaaagaaacgagaatgagataattattctgttgttgtattaaaaatacaattttgataagctagtttgttacaatccaactcaaacctaacatcctaacactacaaaaaaatattacttttagtgacaacattttagtcacaatataagttttttgtgattaaatgtaacttttagttacaacaaaatattagtacttgtgattataacatagtatttagaaacaagttgtcactaatttaattttagtcacaacaaattgtaatttttgtgactaatacttttagttacaaatcttttaatcacaacataagaataacaataatttataattagtaccacttttttacttttagtcacaaattttgttgtgactaaaagttaaactttttgtagtgt

SEQ ID NO: 306747 - DNA, 1725 bp, Cannabis indica
aagtatttttgttgttgttttctaaacaaaatagaaaaaaaactacaaattttaaaaatagtataaaaaaatctaagatgccacctaaactcattttgtgctttcctttatattatatatagatatagatagatattgatgaaggatattcaaaagcgttaaatatttggattaagaaatatacaactcaagctattgtaaattctcaatatctctatcaaaacatttaaacaacaggaagcaatgaactcaaccctaaattacatagaccaattttatactctagttctaaattaaaatctatgtcaaaaaactttgttaatatattaaaatctcacttcttatgttttgattcaaatttataaatatcatgtaagaggagcattgttaatcacattcataacacaaaataaaaaaaaaacttaacattaccatcttcagaggcaaataaaaaatcttcaatctcaattccttcaaacatggcgtttgcatctcatgcctaacatcatttgaccaattttgaattctagaaatcatagaggcaacatgtttggaaaaagattctaatatcttgggacaacattcatcacaccaaacaataaatacccatggataccctaatactctataccagccatcataactacgttctctattactctcacacttactcttcatcttgatcgcatgagcaatctgcccttgatcactatcaataatatctatttcaggcctctatacttcttccttaggggtgttacttataaaaacaatgaataatgtaaattgcaatcatcttcaaacccaacaaattatcattttcccacctcttgccaaagaattcatcctcaaatagacttatggtcaattaattttgtgtcaggaaagcatatataaataaactggtgtgattattgaaaaaatcccattttatttcaattataaatgcaatccaaacaaattgtcaaataaaattcctcaatgctaaacgtaatacaatgaccagaaatttttgtccaaaattccttacgattgtcctgttgtaccaccctaaacaaaaggttgtgaacaaattgggaataaaacttgtactcaagaacatccaagacatgaccaaattgagtatcacaaaatattttcatcacatctcgcgaaattcttttcataatgttggcaataacactgtaagtacatgtagagacgcacttggacctgtaacaataagaaggatgtaacttgtatttccaatccaacatagatatacatcaacacaaaaaaggaacatgaatattataacagaaataattttaaaactacattgacaatataattaagctaataaaaaaaccattcacacaatacaactaaatcatataaaaaaaccacaagatacgctacattgcaggcatccataaatatcttcactaataactcccaaaacaaataatgaaccatttacaaacctaaaaattttccaaaaaaaagaatcaaaatttattaaacatgaaatacacaaaataaataaataaataaaaattaacaacaagatccataaacattcaacaagcaataactaattactaagttagaaaatgaaagagcaaccgaaacctaaagaatgtactgttgacctcgctttttgttgggttttatgccctaaaaaaaactcatttcaatataattagatttacatattaatatagatcagaaataacatttaatgtt

SEQ ID NO: 306748 - DNA, 2918 bp, Cannabis indica
taaaaataatatttcatattgatttttaagcatgtatatcgatttaagaaattataataggaagtagacagtatcactcgtaataataattaattatattcttttattctttattttattttattatataattatatataattctaacgttttgatttcccatcccccaaacaaccaactaccccccaaccatctacttcccacgctctttcaatgctatctatatatcaaccattcttttctatatatatacaccactacttcttccaaactttcttactcacttttcttctctctctttattacaaaaatcattataaagaaagaaaaagaaaaaaccccttttaacaaactcatttatatatatacatcttctttaattttattcatatcataaccaaaaaccaaaacacctctactctcttctgttctctctgttctctaaaaatggcacaagccacagtctgtgtaatggacgcttcaggtgaattgggcttgggcctcgtcgtgggccttattcaaaggggctatacagttcatgcagtccttcaaaaccatggtaatagccattttcatttctttttttcgtatttataaaaataattatttaaggcttattttgttcttgtattttttggttttttttttttttcaggtaatcatgttaataagttgaagtttgatgagataatgaattgttgctgtgatgagggaaataataataagaatattattaataaggtgaagatttttcaatcagacccatttgattatcaaagcataatcgatgcattgaggggttgttctgccttgttttactcattcgaacctccacaagatcaacccgattatgatgtatgtataatattattattattaattattaattttcatgatttttttttttaaaatataactatataattaataatgaatactaaaaattatatatcttaaagaaaaaaagtaagttggagaacagcttgcaacataaatacatttgtagcttttaatactatacacccatgtgtagtaatgtatagctttgaatgaagtaataggtgattcttgataatacattagctgtcatatgtggctaaagtgactttttatacatgcattaataacattatttaattatgagataattttacaaatacacaaaaacaagaaaataattataaaaatatagtttcacagaattttaaatattttaacgaatttattgattttatttacataaaatacagtttttttatattttattcgtattaatttgttgttaatcttttattatctgtataatattttttgttattgtgttattttcacattacttttatgtaatttttttgttattttcgtattgtttttacaagaaaccgtaaaaataataaaaaaaaaaatcattaaatgtaaaaatataattatccctttaattattgccacactaaaaataaaattaataattatttaattatattttaaactttatgcatgcaaaatctttatatatattacataaaaaaaattatttaaaaacgtatttagatttatataacttaaaaaaataatttttaaaaaatattactaactaattataaaatatgttattaatgctaagcaagtgcttaacaatagtcattgcataactatatgtgtttttttttttttcatcagtattatatatatttttgtaaggattgcataactatatttaatgcaattttgtaatgatattaattaatgaatatatacattgcttagtcaattacctaagcatatagatataggtggttattagtctttcataaatgctacaaagactttgcaagtttattataactagttaactattagctattaatgttgcgtattgctatgtgatatgaaagtgtttaggactactataagattacgtcggttttttatattttcatttaagttaaataagtaaaacttgatattaaattgcatttgttttttttagacctacaaaatttgtttaacatttctttcttgttataggtgggttaatatattaaatattttatttaggccatctctaagtggaaaaatgtaaaatttagtgttaaatacaacactaaaagacttactattttaacatttattttttttccaattccaatcataacactgaaaattacactaaaaatatattatttattattatattattttatcaatataataaaatattttaatacatataattatttatttttcttaaaactattatttaattaattaaaaattaaaaattaaaaaaaaaaaaaatttatcgtggtctatagtgcccactattattagtgggatactgtagatccccatgaaaataagttgaataatagagttcggttggagtaaaaagtggaaaaaattacactatatataacattatagtgttgagttggagatgacctaatcatgttgtgtatgacatttttacttgggatgcgtcccaaaatttatatggatcttttgatgtaaatttatataacaacaattaaaaataaaatttaaatattattttattatatataaataaacataatattcttttaatatacattatatgtaattagattttaaaaatatcattcagtaacgaatccattttaattagaatttaactattcatatctaatcaaagttagatatcgaactactattatttataattggattaaattagatattaaattagatttgactcattaagtgtaattagattggtttatatgttgtctatctctctctaataatattacctatataattgtagtccatcaaggaggaagttaggtggaactaaaaataatagtatttttttaagaaaaaaaaatgtatacttagtctccctttaatcttttttcttcatattatgacacgatttt

SEQ ID NO: 306749 - DNA, 3292 bp, Cannabis indica
ccttgtctcagccctcgctgaggaataatatttccttggatggaaccattcagctgaaaagagtaagtcacagtcgagatacatctatgatgagagccacaagtgagggagcaaatcccaaagtcagcaacataccttatacaaaatgccattcaaccctgtcgaaggctttactcatgccgagttttatagctggatatctttgtttaccacgtttaagatgctttaatgagtgaataagttcaaaagcaaccagtatattatcggtgataaggcgagatggcaagaaagcactttgagattctgagattacactagaaaggaaaggcttcattctgagaacaatggatttggacaccaacttatagagtacattgcacaagctaatgggacgaagatgggacattgaattaggttttttgatcttaggtatgagagtgatcagagtatggttaaatgaagatgggtctccaccatcattgagaacttttagaatagcttgcgaaataactttaccaacaatgtgccaataatttgtataaaacatgacggacattccatcaagaccacgacaaccatcatcactcatggatttcagagcaacaaagacatcctcttctttgaaaggcctggtaagttccacattcatctcatctgtgactaagcatggagcaatatcaagaactgttctaatggcagcaatgttaacaccatatgatgcgaaaatgctactgaaatgttgctgaattatttttgcaatagcagcagtagaggtttgttccacaccattaatatcctgaagtttggtgattttgttcgcagcctttggaccagaagctctttcgtgaaaatatctagtgtttgagtcaccagattgtagccatgaaactcgagaacacggatgccaataatcctcttcttgagacaatagttcatcaaaaattcattcactagattgtaattcgtcaaagtgctcaggactagtgatattcaaattatggagaccagcaactttttcatgtgaaagcttgattttttaaggcaagtccccaaacttactcctgtgccacttttgaaggtgagaagcacaagcattgatgttaccaagagctgtagatattggttcaccaccacaggattggttccagtaacgggagataagactagaacattcatcttctttgagccataatttttcaaacctgaaccttgacttaaagtgttgctactgtaatctgttaggctgagcaatgacaaccttcaacgcacgatggtcagaggagaaaaaatcaaggtgattaaccgtaggaacaggtagagattctgtccatttcacattgacaaaaccatagtctaatctttcctttacattttctcccaaatggttctatcaccatcaaagtctaattcaacaagtgtacacgagtcaatggcatcatgaaaagcatcaatttgtgagtcatttcgaatggctcctccaattttgtcattatgagagataatctcgttgaaatcacccatgactagccaaggcaaaagtggtgctgaatcttctaatttttgtaagagttcccaagtgaaagttctttgagtgacattaggagcaccgtagaaaccagagaagtgccaaactgaatcatcaagagcagagacataggcatcaattaaatttattccataggttatacttgatacattaacatcagctttccaaagaagcatcaaaccaccccccaatcccacccgagcacttcaatgccattttgaaaattaaaagtattacaaaatttagatatagaccctacactaagcttagtttccataataaataatacatcaggtttattattagtaatgagcagacggggatgacgaaatgctctcgggttgcccagaccccaagcattccaactaatcggaatcatggcgattggcgaggctgagagtcagcctatgccgaagaagcaccagaaaagttttccacgagtgaactatcagaggtagaatccaatgtcaggtgatgttgaaaagtgttggttgaatcagccagtggtgtacttcgagtacgacatcgcttaagtatttgacaaacatttccatttgttgaaacaaattgtcttttagtgaacaaagatgataatctattgctggatgctgcattcacttcagagataagcgctggtgcaggagtgtgaacaactgaagatgatgatgtcattagagcagccgttgtcattggtgctgtgacagaagcagagtggtttgtcatgtggaaataagccgaaggagtgggaactgagagaaccaccgattgctgattggagaaatcagataaagatttgttaatgatctgaggagatatgtgaggagcaaggtcaatagcagaaacattgatatcattatcaggtgcgggttttataactatcgatggagatggcttcacatgagatgaaattggtgaaatgattttttccatcatattgttagacattgaggagttgttcacaccagaactttctgcttcagtgtatgatgatataccagtaacatgaaatgcagttataacaggaggtggtgagtcatgaatcataactgccttacccttctcacggtcagtgattaatggtggagttgctgatggctgtcgtgagtgaggaataataggggtgagagtgtttcgaaccaggcgtgtaacaaagagccaaggacctcacttcgaaaaatcttatttatatcgatcataagacgattttggaagggcagcaccttccaaccagggaccatagccaagatcaggttccttaccattatcaattttttccatgaattgagaacatttttcaaacacgtgacctataatcccacattcgtaacagaaatccggaagacgttcataacaaaaatccagccacagttcatctttgatccaaggcaaagccatccttctggcttccctaccttataatccgcttccgccattctccgccaccaccacgactctgacagttcaacagacggctcctcctttttctggcaccgccactatcccggcccccaccttcggccaaccgatccccgccaccaccttcggccaatcgaacctttcttttcttggtggtaacattcctaaccttggacatcaaggccatgtgccttttaatgataactctttgtttactgctaattctggcctttctcgtgtcgttcttgatcgaccttcccatgatgaacgtactttgtatcatctaggaaatggagatcacccaaacaatctcatcgcttcatttctctt

SEQ ID NO: 306750 - DNA, 1606 bp, Cannabis indica
aaagtagaggagatatttttttcttgattccaaaagtgttctatcatcttaatctatataagatggtcccattgcctctgttgtcttgatacaaccgatgaggactataccatttaggttcttagacagaaagtcacggtaccttgtcgcaaaaaattctttggattttttaaaaaaagtgttagtttttccaataagtgagccatacgattaacaatctcagaataataagagaagaagaaattattaacatggctacaaaaagaaacaatatctctacccatgctaacttaaatacgaatgatctatagtatgttaagagcattaataatattaaaacaatcaggcttgatcactacattagtataaccaagccggacacaaactaagatcagaatgtatagccaaagcttcaactatagcaggagtaagcacaacaatatgagaccaagtagtcatagccaaaactacacatttcgagtcccttaaaatcacaccaagcccagtcttaaactcgggaacactcaatcaaacatcacagtccaattttaccacataccaatataatcagcttgaaaaaccttgccattagctttaaggtaacaatcaaggtaatctaaactccaattctaacaagtttatcatggataacctaccaaactctccaacgaaaaataaaattttctcaaaaaagatagtaagaatcacatcaatgagaagcaacttgaaatcataaataacacaaactagatagttggggatgctcgcaaaattctcaattagatccacgaatctggtttaaaaaatcacaagactaatgggtatgaaaaataatttcaggacctttgaaacaaaaaggacatgaagtattactgggcacattgtgatgcaacaaatcggtcaaagaaggtaagaaattatgagcagttttctacagaaaattacttcgctttaacaggtaaattcagctgctaaactttaaatcataagataaaatacgaccccaaaagaatccgaaacatgaccaataccatgccaataaccactatgaaacgtataaagaccagagttttcatgatgccaacttaaaatatctgaaatatatagaaagatgattccgaggaatggctagaataaaatcaaaacttcagtttcttgaaaaacgaggcaaaaactaactcggagttccaactcccatactccctaatcaaggggtccaccgtagcattcaatgtgagaaactgcacacaagaagacttatattaggaatccaatgatcattgtacacagaaacaacattaccatgataagcatccaacactatcatgaaactgtttaattacacacaaatcatgtaattagaggtctatattttttttcagacaagtttataaagtactacaattttagaaatacaattttatctactgtaattgctaatttgtttgacaaacatgaaataagagttaactttagtaattacactgccttgccgctgtttttttttagtagtgcattttgtgaaatttaattcttatgttataagtcaggtgttaaatttgacaaaataaacatgtcaacataatattagtttatagaatatttt

SEQ ID NO: 306751 - DNA, 840 bp, Cannabis indica
aattttttaattaaaacatataatttgatacttaatttagttatatacaattacttaattttttatttttatgaatataaataaaaaaaaaaactataatatttttaaaaaaactaatattagtaataatatagatgaaaaaaaaaaatatcatattaaatagtaaataaaataaaagacagacgtgtcatcactatatgaacatgatgtagcacattgtgtcaaacaaatatctaaatattttggctaatcatatttaatacatatatagactaacataaaattcaaaattcatattaagcaagtacattgtattatacttataaaaaaaaagtacattgtattattaattttttttttttgagagagaaaatattgtatttattattcagcggactatatataaaaaaaaagtatattacatttatttattttgattttttttttttaacaaaaaataaagtttattaattattaaatttgtgtttttaatatttgtccaaatgtttggtagatagatgatagatgtggctgaatgcatggagtggaggcataaacgacaaacacgtgaaatatatttgcaccaactcacatactcaaatcttttcttttctatatcttttctttatttatcctccaaaccaatacaagatttgtgttcattcaattcaatccgcacttttttggtcaaacaacatccaattcgcactaagtgcggatttcatattttggatctaatttgatccgcataagagttaaaattcaatccaatccgatccgcaatagtgcggattggatcggttattttaaatcggttatttttttaataataaattattt

SEQ ID NO: 306752 - DNA, 2457 bp, Cannabis indica
tttatgaatttgtggttttttcattttgggaaaactacccaaattatagtaaatactaccaacatactttcttaattatattttgttactttttaaatagttttctaatgcaaaaactaattggtaacaattcgaaagttcatacaaaaaattatatacataagttaatttgaaccaattttagttaattaaataaacatttgtaatgcaactatattttttgaccataagctacgttaataaattacttttaagaaaatatagaaagtgcaacagaacatgcacatttataattctttttttaaattttgaataatttattatatcaaaaatattagttttatatatatatatacacgtcagtgcaactcactatataaactattaactattgtattttttgtttttgttattgtttttgttttgtttttgttttgtttttttttaagtcgaccacataattctcctatatttacatataaattctgaaaaagagtgcacccacatcttcattctgtttatataggtataattaatttatttttataatttgtattcgtatttaaaatattttataagaattttttttagaaatttgattaatttaaattttttaagaaataagatttaaatataatttatttcgcgaaagttttaataacagtaagtataagtgcaataaaattatatttctgcaatttagaatctataaaaacaacatatagtgtgcagtgtcatataagataatagaataattattatttaggtgctaaaaatatggtatgaatcgggatatatattgtacaatcatttatttgaattgcattcacagttctctatatttatatatatttttgagtagggaatatatttttcaccctgtaaataattaacggtggaatctgatatttatttataataatagaaattaatatcctgtagtaatattttctaaaattaattttttttttcaatatttatatggtcatgaatattttgtaacacgtgcgtagcgcacctgtaactttcactaggtatacatatatgctgcgatgtgtgcccaatgccctatatttataatattgtaaatttaattagttactataataattttttttatcaacaacaacaataaaagtagtaataataataataaagattaaaaaaaataataataataaaatttttgttaaagtaaatctttataatattgattcgcttaatttcaataatttgagtgtgtttggataaaaaataataatttatttctttaatttaaaagtccttttgaaagaagttgatatttgtagcttctcctaaaataatttttgagaagatacttttaaaattaaaataatatacataattcttaatttactcatgttaattccgaaaattggcacttgtaatttcctaagttagttgaccaagacatgagagacgacatgacggaagtcatccggcccaataatgactcaaggtcactctcccttgagagtgacaatgtcattcggccaagagggacaatgtcactcggccatgttgcatacgaagtcactcgaccatgagagtgacaatgtcactcgggcatgttgcatagtcactccgccatgacattgcaaatgttactgaccttgaccttgcaaaacttggtagaattttccctagcaagaggagagtggagcgacaaggatatgatcacaaggataaggtaggcacgcgaggagagtgcgaccacgccctctgcaagctctaaaagcaatacctggaatgtctgaagactcgaccaagagtacgttgaagccactacccttgcaactcgagaccacctaatgccaaacaaggatacggggtgcaagaccacttcttgcacctgcaatttacagcatgaaagcgacaccttgtctctttgagactaccttgtatctcaggccattagagcctataaataaccctttctcagatgtgagagggggttggaaaataattcttgttaccaccatattcagagtaatagaaagtcttgattttctctactttgagatagcaatttgaatttatattccatctttttcttcatcttagttcttagtttgaggtagagtttgatttttttggcaaacaagttagttaacgagttctcaccgtcaacaattgactgcgttggagcgagacccaacgccacccgtcattggagaagaagatatgaatggtcacaagccttaaataagaaaagagatgtgaactttcgtagagctcagataggagtaaaagacacgagcgggtgagggtctcgagaaagataagatcaccatgtggggatcccgtggacgagcagtgtaaatgagcgactgcctccatcatgctaaagggtgagatgggatgcaaaggctgttggaaattattttaccaggatcttagatctactcacaagtatgttgattaacagcctaaata

SEQ ID NO: 306753 - DNA, 986 bp, Cannabis indica
aaccttttggataagaggattttgttgaaccagagagtgaagggcataatcggtaatccgagagcagttgatgagagccagagtgttcaacctacctctgctcatggaagctattcgcatcaaattctgatcagacaatcgacggtttagaggcctttcaacgacgacgtttagccacggaagaacgtcgtcgtttttgacacaatcccttagcgaaacgcagacttcactcattgctaaaagctctaacaccggaagataagctaaggccaggaacagagcttcgtggggaggcccaggcccaggcccaagcccaggttctggctctccttcactagtttggaaaatctccattgaatttgtagaaagaaagagagtgagtcatgggtttatatgtgtatataatttaatttgttttcttaatttgcaagctacccaaactctacttgtcaaaacactgtccatggaaatacaaaatatttatgttatattattattcttattattatttatttttctttattgtaaactaacaaaacaacaaaagcaattagagcatgtttggtttgacagagcgaagttgtaatgaaattattattaacattatattgtttgttttaattttaaagttttgtaatcactttacatatcatatattgtaatatcctcgtgaggtgattacattgataaaagacttcttttgccatgtttactgtagtgttaaattaaatatcataataccaattttattacaattttacattacctaaatgtgtgaataataactggtttttggatctttattgagaccagactagtttagttgagtgggtaattaaaatttttagttgtactacattatgttgtttaaacttttcaaaccattaaaagtttttcttaaactacagtggaacctctatttaagaatactctattcaagaataacctctaatttgttataaaaaaatcaagtcccgatttgggcc

SEQ ID NO: 306754 - DNA, 970 bp, Cannabis indica
taaattttaaatatttatttacagttaaatttttaagtgttttttgtcaaaaaattaatctataagatgaccattttttcatttgaaacatatgagaatgatgtgtctgaatcgtggccgttgattacaattaaaactacgtgtggcaaatctgatgaataatgattaaattaattaaattaataaatgtaaggtagcagttggtggaaatatgagagagcctaacgtggtaatcgaggcaagcatctctgatgatcgcgaattcatccacgttgcaagaacgggcaggtctgcccgggaaccatgttgagaggtaattagtggctgggaaggatcgggcagcaattacggtcaggacataaatatctggcaaaagacgcacccaacagctcttagatattttcatgatctatccaccaataggagagaagctcttgatccacaacagtcaaatctagcttgactgacacgtggcccaatcacatgcctggaatatatctagatccactctcatatccccatatccacatgccccatcctctatcatgtaccatgtataccatgtatcatcatcatcatcgccattcgaaatgacgattttacccctctattattattattttaattgaagctttgctacgtttcagttttcttgggggtcgggaatttggggaataataaaaaagtaattaattattttattctttataggtagaatatttcagttagagcatctctgtataaataaatagtaaaaagttaaaatataatgcatttaataaaaaatatactttaatagtgtactaaaaagttagttaaatttagcatacagtaaattttgtaccaaatttagcataaaatttggtcttaggtaaataaaagtttgggtaaatattattttaaagggtaaatactattttggaccctatgttttgcaaaaattacagattggaccctgtattttgttaaa

SEQ ID NO: 306755 - DNA, 1430 bp, Cannabis indica
atctacatcaaatcccttcagacatgttttccttaaccacaaaagcaaccacagatttttcttcctttgactcatcactggtttcttcctcttcactatcactccaagtgacggcaagagccttctttttctacaaactgtttgcacattggacctgattgtgaccaaaaccttcacattcttatcattgaatagattgctcttcgtctcattttaatgagaatgcgtgtttgaattagagaactttttaattgaagaattttcttttctccaaaatttgttttcgtaaaattctttttgagaaagcgagcataattcttagccaaaagagtgtaattagcatctgtaaaacatttagataagtccgactctttgagattttcttccttgggaataaaagctactcccatctcagctttggccttttctgaatctttgatcttcttgaccttgtcccatctttgtagagtcaactcataattttgcaggaaaccaattagttcatccaagtcaagagcctcaatatatcgactttcctcaatagatgtcactttaggcatgaatcttttaggcaatactctaagcacttttctcacaagttttttatttgaatagacttttccaagggcgtaagtttcattcaaaatatcacaaagtttggcatgaaactcaaaaactgtctcattttcatctatagacaaattttcaaaagacttggataaagctcttaacctcgccttcgtaacagcctcagttccctcattctttattttaaacttctcccaagcatccttagcaatctcactattagaaatcactttcaactgatttgtggagatagcattaaagagagcatgcaatactttgaattaaaatttgcttgttccatgtcctcaattaaccattcattgaatttcttattcttttccccctcattatcaacaactatagatggagaccaaccttcggcaacaaccatccatacccgttcatccacaactttcaagaaggctctcatttggtcttccaataggggaaatcagctccctccaacataagaagtcaagatgtagatccttcttctcgaaacatttccatttcctattgatctacacacacacacatacaacactttttttgcactgcgagatgaatcttggagtggattagttttccaaaaaataacaaataacaacttcgttgcactgccagatgaatctcggagtagatcaaatttccaaaaataatatacaaacagatggaggatagccagattaaaaacaccaaacaagaatcaacacacatgacctaaaatcaatctagtagcaacaggatctcaatttcgttaagtcaaaaagcgagctttgataacaattgtaaaatcgatctaatcagatgctactaattgaaacaatgacattcaatcacac

SEQ ID NO: 306756 - DNA, 1743 bp, Cannabis indica
agatgaaccaaaacatacacaaatgaatgaaaaatacttctgttattttattgatattgaataatctggattacattgaaatagagttttatttagggcataaaacccaacattagacaacatagttgccagattctggtggaaggggtgtacttcggagcaaaattcaaatcgatatcttgccttaaagagttggagtaatatctgttagcctaaacaaaatgggggcttgggtctcagaagattcaaggacataaacatggcacttgtggctaagttagcttggaacatacttgttcaaacggataggccttgggtgaaggccttaatcgcaaagtattgctcaacttttgagttctgggaggttgaaaagaaaaactctgattcctacttgtggaaaagtcttctcactgtaagggacttatgcatttctggagcaggtgttctggtgggggaaggaaattttgatatttggactagtccctgggtccctggattcaacccttaagaagtgcgaagaagcttcacttacggagcagttcatgctttctcttatgtttcagaccttttcttacaaaattcccgggtgtgggatacaaatcttatttggaagtgttttgctcctaaggttgctggtgctatcctgaggattaggcctcttattgatgagggggacaaagtcttttggaaagcaagcaacagcggtaccttttctgtcaagaatgcatactggctgtcgcaatgcaatcggtttcaaccagaaaagagagtgttggaaaattctttgggatctgaagcttcatcttcgccagaagttactgatttggaagattctcagtaattgtttgcctctcaaatccaacttaagattcttgtagaatgaggataaagattgtttcctctgtaactgtgaagtggaaactgaattacacttgtttggtacctgtagctttactagaagcttgtggtttcgtgggcagtggaggctgagaactgacaccatgaatctccaaagtttcgatgattttttccaaggactttccctttgcaaggataactctttgatcttgtttgcggcctgtcttttcgaagttgtttggcattgcaggaatgaaatcagattaaggggcagcaggcctgattcgggtatggcttttaattgtatcaatatgcgttggcaagagttcagccatttggtgaattcggacagtgtagtggaacctgttcctcgggaatttagtccaacgcactctggaattatgcttattgtggatgcttcggttcttggtgctgatgcgggcctaggtgttgttcaatcaaatgtcccagtagaggaagccattactatccaggctttctgctctgttcttagtgtgttgcaggcggaatttgaagctattcttctgtgtttggagctttgtgctgaaatgcatttggaggttgctgttgttcactcggactcggcgattggtgttaaggccttgcaggcaaagtctcttccgtatgcttgggggtcctatcctagctttgctaaatgtttgtctttgttaagttgctttaatggttggtctgttgtttatgttccccgctcggataactcggttgtggatcagctcgctcatctcgctcgagtgaatcgtgtttgttttttgtctgtagttagggaagcagctccccttgtggctgctatttagcctttgcgctttgttttaaataaaaatctttctattcaaaaaaaaaaaa

SEQ ID NO: 306757 - DNA, 1152 bp, Cannabis indica
atctcctatatctgtcaatattactattagcttaactataagtattaagtcttatataatttaatataataatttttaagaaatattatatcgatagagaggctaaatacataatttttaaagaatataatcactaactaatcataaaatattacttataaaaaaatattaatcaccactaatatttaataacattgctgatattattttggtaaataattaatttttgagagttgaattgaattgaattgaattaattaggtaagagatagagagatggaagaaagaagaaggcacgtggtgggtcacatgcatctctggtttaacaaagttcatgcattgggtaatagtggaggtgttctctgttcatatctcatgcatatcaactttcttttcttttcttttcttttcttttcttttctttctgccacaaaaacactctctcatcaattctgacaatatacatagatcacattgaatttcatgcatcactcacaacatcacatatctcttctcatttatttcaccataaatatcattttaaaacttttattttgtaaaaattaagaatatctttttagtttattaaataataaatttaattaatttaatttaaatgtgttatgataatactgaatatattttctgtatttgtttagaaattatatatatccaaaaaattaaacttaatgtgttatatctaacacccacataatttaataataaatttgatcgaatgcggtaattattttttaagacgcacttaatagtaatgttatttattttttgactagtctataaatattaattatatgaacattattattaaatattatactgatgtaatgcatttactaattaacacatggagaaaatttaaattgggagggcaaattgtgaaaagaattaatttgggagaaggggaaattattagtaatagtaattatatataatctttttcttctacaaatttaataaaaatttttacatcaaaaatataaaatgataactttattacctaaataccattaaacggtaaactaaacatttatatccttcatctttattttattactattttaccacacgcacactcttctcatgtatcaaacatgtgtgtgaccactatcaatcaatcaaccatccatcatt

SEQ ID NO: 306758 - DNA, 2106 bp, Cannabis indica
ataaagtgtcaatttatatttttattagaattaagttaattattatttaattaatattatttaaaaaatttaatagccggtatataataattcaaaattgtatatttttataaattttaataaatatgttttgacaataaatttataaataaattttttattcttccatttaaattatttttgaatctaaaacacatttataaattaaaaatcgaaaaaaaaaagaaagataaaataataatactacaaacaaagattatttatacaatacaactggatggcataaatataatcctagatcatttatcttattatattggatggtataaataatcccatttaaatgagattaactagattaattatctaagtcttcaatatggtcaaatacaagattagtgacattatgtagtagttctattctgtgtaactaacaggccataaggaatacggatgcccaataatttttcatatatttgtatgtcgcatttttatgccatgtgattggaaatgttattttgtttatttgatgttatgaacagcagattattccatcaattagaaactgaatttaataaagaacaacaataaactttaccttttggttggttaatctgtcagattcatcatttcgatttattagcatttcttgggttttttttggcaggtaggtggcaaaacataaaatgtaaactatagagaaatatcctaaatcgagtccttatttggtcagttgtttttggacaaggaaagcccaccgaagtctgtggtgccagttcaactcagctaataattttttagtataaccacattaatcaattggtcatttatttatttgacaatttatgactattcccaatttttatccttttttaaaaaaattaattaattaattatcttaacagatattgccaactgaaacagaaagaccaccaccgccaccaataatagcagtcactataatagttcaataatatacattttctatgtatttacacatattatatatgcattatataaagctactctttcatcatgtgccactggaacttcaaattagttttttctttaaaataataatagctttactttttaacgatttaataatttttataacttatacgaatgaactcacctatgaaatagaaaaggagaagaagacaaaactcaatggttcttatatctatctatgaaggtggaggaataaatagaaacaaaatatagtaagttaaagaagagttgtgtttatatctatcttctatcatcgatattcgatacgataagaattaaaaagatatctttttaatttatctaattagtttggtgaaatcaagggaagaggataattatatgctatgtgctccttattttgaaagtggggaccattgttgcagctgcaacagaaagaagggaaatctaaactttaaaaagttgctcaaagttttgttggtggttaaatgatcttaataatacaaattacaagctcatgtatgaataaaatatttttttgatatttatatataaattatttaatattaaatattactaatttaataatcatatatatatatataaaaatgttcaactcttatttataataaatgtctttataaacttttaagggcataaaccctaccaatatatacatatagttattctgaagatgtggtacgatgataatcaaaaacatttattccattgcgtacctgatttagtaacgcaaaaccaacaactacatgcatgcatgtgcacgacgacatgaggaccaagaaagtcctctttcgatgtcggctgaggaccgagaggtccctgtggtggtcttgtcgtgaaagcaagcagcttagttgccatacagacatgagacgggaacaagggccaatggccctttggtgtggctgatgggagggaataattctcgtgacccatcgcttgggtcgtcgtggacgagacaatgagaggccacaaggctgtacgattcgttgatggggagcacgactaagattcaaggaattcaggttctcatgcatgggaaacatcttgtacgtgtgtcgctgggtttcaagattcaaaactgagctcacatgcaatgtgttggaaattatttta

SEQ ID NO: 306759 - DNA, 1921 bp, Cannabis indica
gtaaaatatttccaacagaatatgccgccaatattgatacaaggaagtctctaacatggctggtattttgtgtatgtggtagtacaattagttgggtgtcatatacacaaaaggtggttgttctttcaaacatagagacagagtacatggctgttgcagaagctttcaaagaagttgtatggcttaagggcctaactcatgagttggaatttaactctagcaacataaacatatattgtgataatcaaagttacctcaaaagtcccatgcttcatgaaagatcgaagcatattgacataaaataccacttcattcaagacattgcaacacatggtcaatttcaagctaagaaaattagcacagaagataatgcagttgatatgctcactaagagtggaacttttcaaaagattaggcattgccttaatctgttacacaaagataagtgttgctgagctcttagctcataagtcaatattgttttcacattcagctcaagtaaatgaatcaatgtagatttattgtgtgattgatagacttgtgctaatgtgttaaaaggcattgatcatacttcaaattctattatttcagttacaggatcaagaactgtgtaaccaattctattaactctcacactcttatttaactacctaaaaattggtcagtatatagtaatctaacaagtctcagtagcctgttggaaatcaattcaacttagagtgaatttaattagaattatagataataagtgattggagggctgtacaggaaactaggtgtgtttgatcctagtccttcatgtgagattaattgtaattttgatttttaatctcaaatcctttccattgtaatactcttgatcaaataaaggtcatttccttggtctattcaatctctaattttctgtttaattctttttcttttatgtttaattttcattctttattcatctcttactttcctagttttagtttttgaagagtgtagtaagcttgcactacaagtaaaacgagacatctattttaaaaggaactaagtattatggagagatactttaaataagtgccttaattgagtaatgtgtctattgtcatttattttagctctctttaggaaaattacaagctcatccctacgttattaactttttcaaaatcacctcaaatgtcaatatacttatttgaactaattgctattttatttgctagctatcatgacatatagtgacacataaataagagatgtaattctttctattctgctaacgaataatcgataataattcctaaattcaaattgtttttttttatttaagagaaaattggctccatatgtacatatagatattttttaaagtcttagaggctaatttacttttggacatgctttgtttgttttgttctttttctttgggcatatttagaatggtgctaaactttgttcgtggatgtttttgctcgtattaacctagatttggatgcttactataaatcacttctatctaagatgtaaggctaggctattcttatataagattcgatattgattattagactaataactgatgaatgcgcaaagtctctaaccttattcattccacgtgtgatcctaataatatataaaaaaaaatgtttgaatccttatcattccacgtgttatcttaatattattaaaaaaacgttggataaaagtgtaaaagattattattattattattttaactagggaactaagccgcgcttcgcgcggtgttgtccaacttttataatttttatgtatatatattatattaaatgatataatttaaaatataacattttcacgtgtatattataaacaaattaatagtgttgaaagtaaaaatataatttgctattttaaaatatataaaaaaaaagtgaagattttgtgacaaatatta

SEQ ID NO: 306760 - DNA, 832 bp, Cannabis indica
aaagaaaagaaaaaaaagtaaagaaaagaatgattagcaaatggcggatctaggggttttctttatttgtctttgtaatttttatttttctttccctgaccctttcgttcaccctcttactagttatcatgaatgtgaaaaatggtctaatgttgctcaggcagtaatgacaatgacttgtactaatctttgtatgtttattatatgagactcttgatttcagcttctcctactattgttgggtgatgtcagaatcagattgttttgtttatacttattgaagggtgaagcagatacagaggtaagtatggctgaggaaaactatggtggcattataataatcaaaaacacaaacagaagacggtggcaaacaccattgaaatttgaatatcttcgaccataactactgagtactgaatacgcataagttcacactaagcttgactaggtattgtttttatcaactcccagttttcctatgcctaccagccatccaaacatttttcacttttgatggagcgtaacttttccataaatctttagcccaatttttcacatgttgcacttgtattgcatctcaatgtagagtaagattacattttcatttgacctctttaatcatctcttatttccttgaatgctattaactttactcgtaaaggttaattcataaatagttttaagaatttgagctcaataattgtggtatagttcctccaaataaaaaagtctccaaaagttgttcctggaaagttaggtgtctctcggatattgttcctggacagctaacttgtccattttgaaaggagtattgtggaatgatagttgagtc

SEQ ID NO: 306761 - DNA, 1544 bp, Cannabis indica
gttcctctaatcaagctacaatgatatagcaacaaaaacattgaaagaataagaagaaatattatgatatgtcctaagttactatgatttgtcctaagaaatattatgattgtttggaatttttgggaaacttaaaagggctaatcgcaaaatacttgattagtttgttgttttcgaaaaccaaatccaaataagaattcgagttttaagctgaaaaataaaaacacaaatgttatgttttcttagttttcgaatcattatttccaaaaattctccaaatattctcgttaacttttcatgttaagattaccaaccaatcacaaattcaattttgaaaaacaataaataacataaccaatcaaatcctccaatttccccttctatttacttcgaatgaatttcaatgaagaagtctcaaaataaagaaattgaataaagctttattcactttcaaaatatgatgcaaaaatcttcattcattctaagactaaagacaattacaaataacactaacataactaaaaaccccaaaaatatctacaaattcttcaccaaaaactaataaggaaatcttaatcataatccacaaaatccaaaacatcaataaataatttcaggcaaaatcaaaacaaaaaccaaaacttcaattgaattgaattgaattttctgagcaaccaaacaaaatctgaaatccaaaaagaaagaaaaaggtgatataccagcattgccacaaccaaccatgagaactcgagaagaggttggaaaatagtttcgaacaaatggtcgaagagcagagtaacgttggtaccaatcaaaagacccaccttcttggatataacgagcatcccaatacaaagcatcgccatagttgtaagtattacagctcgatgtgtctctgaacattataaagattggatttttattataagtttgggaaaaagattgaatttttttggtgggtcaccgtagatggtgggtctgattttccggcgtcggaggaatttggggtttgaaagagagaaagtgaaagtgaagatgtggaagtttgaggtttgaggaggtgaacagaggaagtaaagtacttaagtttttttagtgtattttggctaacttaactgttctgtttgtttttttgttggttcggttacatcttgaaatagtaaaagtaaatttcacatcttcgcacgtgccaaaattatatttttgttatttatttatttttttattagaaaaaaagaaagtgttaagtataaatagactaaagtgagtttagatgggaattatttattaatgtgtttttaatgtaaaatagtaatttatatgatatgaatttttaccatgtattgaagcggcggcttgctctttggcggtgactgttgctttggatatcgactctaagtatgttatagtggagagtgactcgagagtggttatcgacgccatcaatgggaagggtcccgttgggcaatagagaactacatctcattttgtactaagtcatcccactcctttagtagttgttgtttttcttttatcagtagatc

SEQ ID NO: 306762 - DNA, 1367 bp, Cannabis indica
tccagcctcaaccgtgaccagagatccaggttccttctctgcttggcgattatcatagattcccttggtgcaagcggaatgctatttggcacaatgatactgatcaggaggttaactcaaaagctttgatggatcttgtactcaaaagattttgggagtttagtcaggccacggaggaagttgactcagcctctgtcgatataggttgagttctcaacctatccgaagccggtcccgatggaaaactgtgtgatttttgttgatggttccttcaaggagaatcgaatcggtgctggttttttggcttagaaccgagagacttcggattggttttttgaagccaaggcctacggctgggacggatgaagtggctactaaagttttcgcttggctttgtgcgcttcagtgggctaagcgaaatggttgggataattttgttttggtctccgattcaatagtggttattaaggctttctcttctgggatttcccctaattggaagtgtgtttcgtggtttgctgctgccactaaacttttaaacagtttttctaatgtttctacttttactttaatcgcacgtatttagcttttgtggactccttggctaaaagtgcttgttgttctgagtgcgacactccttgctgtaaaggggagggatttccccctgtggatcccattttctcagtttctaatctaagatgaacactttgtcttttcacaaaaaaaaaaaaaaaaaaaaaaagaagtgcgttaacgattatggtctcaccaaattaagtatactcatatacctctatcgtgttttgatatttggattgtaatttttttaaaattttagaaacttacaatataaaatatatgattcagttaacaatttactactaatgcatacaggagaaacatgtgtgttcgatagactatattaatatttctcgaaataaaaatatatgtgcaataaaattgttataaatttctcaaaatattataaaatgttttaaaaaatactcccgttaatttattatgggatatgggcggctaaccacctgaattttacggtttgtaacagttaaccacaaaaatcaaaattttggcggcataactacctaaacactagttctgttttgctctgtgtacctacgtccaaaaatcacaattaagtgtcacggtggactgtccacgtgtacacacttgtacacgtgtcaaatttttagtggtccacgtaatattagttttaaaaaataattataaatatttaaaaaaattaaaataattttttttcctattttctctttcttttttttttaaaaaaaattaaatttaaaattaataaaattaattttttatttttcttttttctttttttcctt

SEQ ID NO: 306763 - DNA, 890 bp, Cannabis indica
catgcaacataaaatattatttctgatctttattaataaatctgattatattgaaattgattttatttagggcacaaaacccaacataaaatacatataaaatactgactattgggtctctaagaaaattctttctcgtgtagtgaggcagctgtacaatggggaccattgttggaattggacacacattgcctaaaggttgcaccttgaaaataagatgcctagacaagtcgttaggccaagaggtgtattcagaggcgaggtgtgtgcactaccatgtttaatgatattgtggataacatgcgcctgtaggaagcgtgttttttatgggaaaatccaactgacggtaaagttatgatgtggcaactctttaatccacattgggcctgagacatgtaataatgaaaattaaatattttgatttagccaagggacattaaatgccatcttttcaactccctagctatcagatccccttgtgcttttgaggagatgatttgaaccatcaatttcaattcacgtggattaaccttagctataaatagacacaaagccacttgtcttaattttttgaccattttttaatctttaaacctctttaatttcaaaactcaaaccagagcttttttcttaaaatccagaatgaaaaatcctaaacgtttattccatattttcaccggtgaatgaatgagagcttcaattctctcatagaatgcctcctacaagtttgaatgtaatgtcctactagattaggcatgttatcgtgattttaatttactatgcactcctttgctaataaaaggatttattggaaacgtggatataaatttcttaaatactaaacttataaataaacataatttacataagtctgtgatcccgttaaaagt

SEQ ID NO: 306764 - DNA, 1307 bp, Cannabis indica
aatgtttaaaatttgaatatattgtatttgaataatagttttataggaaagaattaaataatgatttaatctaaatacaaactttcaatatttgtaataatggttgatttttaaaattatttaaaattatataaaaatataaaataattattaatatatcatcattcaataactataataatgagtgataataaatcaaataatcaaatacttaccatttatatattgtataataaattgaaaataattttcttcataatagataaaatctatgattatatgaaaataaattattatgcacatatattgtaataaaattatataatgtatacattagtgtaaattgtccttatttgtttaacaatgtaattagaatgtaattacaccctccaagtcttatgggccacgtgaaaattaagtgtctttaatttaaaatagaatataattataattaacttaactgaataattacacaattcagttaactgaataattaacttaactgaataattacaccctccaaatatacgttaacttttaaaacactctatcaatacaattaagtatttttatatatgttgaccccaccttttaaattttcaaaagcataaaattgttttgaaatgcaaaatcaagtcctataaaactatatggttgtattgtgttgtgtgcacttaatttaaaaaataaaataaaaagaatggagcactactcctcctcctcctcgtttggccgaatcattacatttgtagttgtgttggtggttttacaaggcggcagggcgaaaggtgggacaaagctaaggaagaacgagagcatcttagcaattcaggcgtttggagactcatttcttgatacaggcaataacaaccatcttatctccataaccaaatgtgattttcctccttacggaagagatttccttggtggaaaacccactggaagattcaccgatggaaaagttttctccgacctctttggtatattaatctcaacatgcatttgtttttaattctaatccttctttttttttttttttattatttttgtcttataatctaatatatatatatatatatattatatacataagaaaagctagaaagtaaagtaattaaggtcgtccaatcaaatgtactaatggtcagactcagagtgaaattgaagtaatttaaactttcctaagagtcaatgtgaacatatatttatatctagcctaattagtatttttctccctgaagtttaacatgtaccaaatcatgtccctgaacttttaaggtcgttaaaattaccccctgaactattga

SEQ ID NO: 306765 - DNA, 3130 bp, Cannabis indica
aaataaaattaaaaaggaaagttggcaaattccttgaaaagcgtgatcagctcaatttgggtctaaattgagtctactttcatgaaaagcacaaatctttgttctccttcagtgttgactgcaatctcttcttattttaaaactctgttgactaagtttttaagttcttctttgaatctcttggctcacgccctcatcaccgggccaattagaacttgacttgattctttggcctttgtgttctcatcacaagccttctaaaagattctcaagttgacctactactacgggagaggtctagcagcccatgaagataggaatattccctcaagacattagtctatattctagggatttagttatccttttttatatttcaagtaaaagataaaaaatgttaatgtctctattttgaaggaatatctttatctatttgaattagaatattttgtaagtcctacaatatataaagggaatcaactacacgtgaaaaggggtccagacttccttccacacacatatagcctctctctctctcaaacctcacacgccacttatgcctcctagacattaagtcaagtttctgcataaattctttgtaagatctcaccagttctttatctataacacattattctcacaattgtaatactgaagagagccatagcaagaaatcataaagttctaacctgtgatatgcatggtattacctcaagagtaaatacaactaaaaggagagtaggtcattatccgttcatcaagagagacgaacatctataaatttgtgtgttatttttactatttattattcctatttacacgtggtgataatcagcaattaataaggcttcgttgtcagttggctagatctcaagtcaataacttggttcttctaatttttttatgggaactaagttgaggtcgttttatttagactgcgttgccagtttagccaaagaatctgcgttagatttctgttctcttggaattcgttcaattttaaaataattgaatttctgcaagttttttcaaactttttctaaatacttggccatttttattcctttcgcctgatattctcgaagaacttgagttacaatcaattgcaaatcaccaagccaacgtattgccttgacatttactacctctgccgttcttagacctgcaagaagtgtcttatatttagcctcgttgttcgaagcaagaaacttaaaccttagggcatcatagaacctgagttctctagtgaaactagtaacactggaagaggtagataaaccaagtaattagaaaccagtctttagtttttgcacctgaaatgtcaaaatgagctaagagtgaggcctcgataactttcattgatggcgatgcgatacatgtaagatttcctcatacagatccactcgtgataaccattcagctcgcaaataagagagtaaagcgagttttggctgataatggaagttcagtgaatatttgtataaagaaaccctaaataaaatgggattggaaggaataactctaaaaccatgcatggataatctatgtggtatcacaagagatagcattgcaagtttgggagcaattgaactcccctcacaatgggagacttgcctttaatagtaactcaaatggaagaattcttggtagttgatctcccctctgtctataacatgattatgggttgcccagcacggactagactgggggaaatcaataaaacattgtcactaaaattcctaactaagaacggggtaggaacggtaaaaggtgaccagttgttagcaagagaatgatacaacattgagttgagggaaagaaccaatgcttgtcaaatgatggttgtagtaactaaagaaattggaaaggaggaagatttagactcaagaattgttgaagagaaaacccaactcgggccaatagaggagttggaagaggtgttactcaacccaaatggccctaccgaaactataaaaattggtaaagggttatgggaagagttgaagtagcaattaatacactttttagtggcaaactaggatcaattttcttggaatcattcagacatggttaggattgacccaaatatcataagtcatcaccttaatatcgaccctcaccattctctgaagcaacaaaaaagatggcttctcaattccgagagatagaacgcactaaaagaagaggttgacaagttgtcaaccaatgacttcatacaagaagcattttatccacaataggtttcaaacccagtgttggtgccagagccaaacgggacctagagaacttgcattgacttcttcgaccttaacaaagcatgtttgaaggattgcttcccattaccgagaattgatcagctcgttgatgccactgttgggcatgagctcatgtcttttatggatgcttattttggatataactagattaagatgagcgtcgctgatcaggagcatacaagctttatcacaaatacgggactatattgttacaagattatgccctttggtttaaaaaatacagcaaccgcgtattagcatcccgtaaacgacatatttgagcaccagatagatcgaaacatggaggtgtatgtggacgataagctagtcaagtaggtcaagatcgttgatcgtgtgattgacctcgcataatgtttttcaatcttaagaaagtacaaaatgaagttaaattcgaaaaaaaaatgctcttttggggtttcttctgagaagtttcttggtttcataataaacgcgagaggaatcgaagccaatctagaaaaaataaaatctttacttgatatgccctcacctaagaagtgaaaagaagttccttccttaactagaaaaatgacagctttaaataaatttatcttgaaatcaataaataaatatctgttattttttaatgtattgcgagacattaaaagattcaagtagacaaaggaatttaagaaagcatttcaggagataaaaaaacatatatatttattagattataaatagttaattttttacttacaatactttattattattaacgaaaatataaattaacagccactatgttaaaagggctattttaaaatatatgggaaaaattattaaagttatgataaatatggtataaaaagtaa

SEQ ID NO: 306766 - DNA, 1067 bp, Cannabis indica
ggccagctctatgctttatcagtgcttgtgaatgggtttacagttctttcaacgaagagaatatggatgataaagttgtcattatcactggagcttcttctggaattggggaggtatccttctttcattactttatttatttttttgtaaaatagtgaagtttctcgtaggaaagtaggaatcaaagatatgggtaccaagattttgagtcatttttttttaacaaagatagcatatatcttatctatagggtttgtttagcatagtcttaagttactaccaactggtttctattaacaaaagctgagattctttaataggggttattttttaatgtgcagcaaattgcatacgagtatgcaaaaagaggggcaaatcttgtattagttgcaagaagagagaatagactgagaggtataagtgagaatgcacggcttattggggcaaagcatgtgatgattatagctgcagatgttgtcaaagaagatgattgcagaagatttgtcaatgcaaccatcaacttacatggccatggtacttatttaattattaattactatttatagatactctatacatatatttatgtaaactttgcaatttagttcactaatcacttccccttgtttttttttttttttgttagtggatcatctagtgaacacagtaagtttaggtcataccttttacttggaagaagttactgatacatctgtctttccccacttgctggtaagaattaataactattcatatatagtcaactcaaaaatcaaaatatataatgtatctacttagattttaatattttttgttagggatgttcatataatccgcaattcgtgattttaaactccaaccaatccaaatcaaattatttgagatcggactaaatgaattcaatgtgaatgatttgatcaatctggaccgttttaaattctctagttcggtcatgattttaaaaatctcagtagcagttcaaattaaaccaatccgtataattattatatatatacttaatataattttttttttgacaaaatcttaatatttaagaacaactttaa

SEQ ID NO: 306767 - DNA, 1827 bp, Cannabis indica
ataattcaccactcatgttttgtgcttatgacctccacgtgaccacaatcttagtggagcattatttattattatttcccattatacaatttcttgttagctcaaatctcctattaatggattatattctgacatcgactaggatggactttattgcatgtgttgtttatttcaatttcttcagttttgtatgttatattatttgataataaataatatgttggttgaaatttgatattactgagtaatatatattaagtgtattataaataaattacataatatatgtatttaatttataattttgtaattttataatgtacatatattataacttagagagaaattataatttgttatctattgtaactcttctttggttgatcatacaaatgagtaataaaaattcaaatgtttgtttatatggttgttaggaataatggttattacacaaagtgtaataagggagttattacacaaatgagttgtaggaatttaaatctgtatttatatggttgttaagaagttgattaatactcatttatatgagagaaataagttaggaaatattttgttttgatttggtcgaagtgggaattacaaaacacaaaaaaattgtgctgctaaagttacctctggagacatgtcgcctcaaaccagacatcatgcattacagatatgacattgtgcgcttcaggtttgacgttggcaaagttacataacttaggcaattaatttgtggtcgaatttttacatcgagtataactgatgcaagatttgtgttaattttgaagatatttctattagttttcagtttaccaccgacacaatcttactcgttttagaaaaaccacagatttaaaggcccttttacacaataaaaaccctactatataaactcattacatgcttcaaccctaaacctaaatgatcagcccccctttctcttgtctcttttatttccagtttgcaccacacccgtcggcccccaaccattgcatgcccacataatgcgaagaccacgcccaacccatgccgacattctcacgcccaaccctgatggttccatgtgacgatggttctccctcatctctttcaaatgtataaggtctccttcattaattttcatagtacccgtcgacatgtgctttttcaacatatctcaaactcactctctttatttttgtatatatttgttgttgttttttttgactgcatctgttgttttcatatatttttttagagtttgatctgtattttccatcaaaatattgatgagatctagatcttgtttcaaatttgaaatatatttttttatatactatttatagtttgcgttgctgtggaaatgagataaatattgtaactacttttatgtattttatgtcagtcctaaaatgatgcacattttttttaccaacaattggaaactgataaaaatacactatttgcgtctactgctaattctttaaatgtgacttataaactgacaaaaatatcacagtttatagtagtgatgtcgcttgaagtagtagtggacgaaaaatgtcttgaatgttttatttttggtcctggcttttgtttaaccccctaaccacctaatttaatctattttactcctaattaagaacttataacaaccatggatgcatggtatttgacttcaaagtatgatcaccctataaatagtggtgtaatatgctcatttgtgttaacttaattttctatcaaaaagagcactttggttgaaaactttaaagtttgataattcacaaagttatttttttgagagttcccttagtgcttagagataggagaaataagctt

SEQ ID NO: 306768 - DNA, 1689 bp, Cannabis indica
gatatatgcgtgatcaaatcctttcttatttaatttgtttgttaaaaaaaatatatttatattgttttggtaccttatatgagtaaaagagaacaaaaaaaaaaaaaaaaaaaaaacaaaaggagaacatggatggagaaacattttggtatatttacatatccaagaaaaaaattaattttgtttatatttttatgtctggttattgatttatttttttttcttattgtctttattatattattccgatttctctaaaataaggtatatatgattgtcttgatactattactataatctatccaacttatttctcttaaatttcatattaaaattcggataccctcgagaagaaaagaaaaaaaaccgtcattgagtttgcgacgatcaattgtgatgtgagactgataattaattacatgacgactaccattattttcttgatgcatccatcatgtttctaaagattcaatcgtgattggaatttataatcagtctatgttgctcaagctcaatatgtattgtgaatagtattaagtgataatggttagttagatttggtttttacactttgagttcttgtttttaattaacagttagaaatgtagttaaattccgttatcaggtctcataggtagttagctctcattaaagtgattacaataaatataactttgttgtattcattttaattcattgaataataaacacagtgttctcttctttcttctattatgcttcaccaataatcaacttggtatcaaaactcacggtcaacatcaatggcgtcctcctctgacactacaacacatccatgcattgtactaacaataatgtttgttccacctcttcaattaaatcaaataactacttcttttggagatctcaagtactccttgcgatcacagctcatgatcttgaaggaattcttctcaatcaaaattagcctcaaccaagaattcgacaagctctagaatccacaacaatggtaagcaatcctggattcaatagatggatgcacctagatcaattccttctttcttggctaatgtcaaccatttctgaatatatgattggacatgtggtgaattgtgctactgcctttgaaatctggaacacatttgagcaactctttggaactgcatctcaagctcaaaaaattcacttgatgaatcaacttcagttcaccaagaatggttcattgcctattgatgaatatctactcaagatgaaaagtcttgtagacggtcttcgtgcagttagaagcccaattacagaagaataacttattctatacattcttgctggccttgaaacagagtatgaaactgttgtggtaaacttgacttcaagagaaagagttactcttgtagatgatcaattcatgcttcaaaagcatgaaattcgtattgaagaaaaccaggctcacacaaccattgatatgttggaaattattttaccaggatcttagatcactcatcctttctgttgcagagtattatcaagatctaagcctgaatgtccttcttgttgagtggccagccatggcttagtggatttgggctaatattgtcatttattatatttattcattagaccaaccaaagtatctttaattaacaaatataccctaaaaactactttctttacagtttcgcacttacttagtgaaaaatttacaaatagaca

SEQ ID NO: 306769 - DNA, 2026 bp, Cannabis indica
ggcatcaaggcatccccattaaatccttacaacagaatatgacaaggtgacaagtatgcctcggtcagcccatcacttgaaaggaaaatttgaacaatatattcatagaacttccattatccactagaatcctggaaactctcttattttctatctgggcttcaacgaccaaggggtcattatggggaaaatgcacatgtgtggcgtccttatttgtgaaagtgataggtagactcattcttcaaggacgttgggcaggtgactgtactaacgcacatgtttctccttctatatctagctctcttaagtacatcttccaatagttcctggtacttctcgcgaggtgcgatccacctgagattgttgctacatgtccgtcaactggtggtggagctagccttagggatatgggttccttggttttggagccatcaaagccactacagctggagctggaaaagtgaggagtgctggaggatacatttcaggagcttaaacgttacctactccatatggaggatttacagtaccctattgtctaggaacaatcatctatccatgaatggtcccatgtctaggatatatgatgggaatctggacccattatcccaaatgtcctactcttattaacgtttcaatctcacccatttggaagtcacattcattcactgtatgtcccatgtctatgtggtattcacaattcttctttgagtctttcaaattttcccccttgaggcattatgggaggcttcctataataaaccatgttgcatatttccttgtacacattctctcgactatccattagattggagtacttggtgtattttggttaataatctttcttggatttcttcaaagcttctcctcatcccggaccttttccccctctcttattttgggagttactcaagtcttgctttggtaattccactttcgattgttggggagccacactgcattcagtttgtgtcgctctgtacccagaaaaataggtttgtgtaagtgtgggcatagacataaaaggtttgtagaccgtaagaatgtattgtgttccaagaactaaggttactagagctagtgtcggaggaactccaaatgcttgctagtaagcatattctaaactaatgaatccttgtgccttggccatgaattaagagagggttttggccctccttctttgcatttctccccataatagggggccagctgcaagtccgaactgtaaggctacgagcttcatatcatctgttactttagtttgggccactgcttccattatttgttgaatagaactttttagggtttctcctgcttatcatttgagattggtgatggaccatatctccaaattgtaatcacacatagctacgaaatgctttaggaatattgactaaaatccttctaggaatgaattgatctaggagctagccatttccaccaatcctccacaaactttgtgagggtcaagaaaaagcacaaacacttggcgtcatcacataccctggcaacttgcatcatcttgctatatttggctaggtgagtcttgggatctgggcgcccattgtacaactcgatttagggcattttaaagttctccagtagtgtagctttcgtgcctcgtgacgcaagcttcaggtcttcgtcttccgaatcagtgagggtcccactttgctttttaaccaactttatcaagacatctatctattcttctaacctttttatgtcgctgtctgatagaacccttccacgaacattgttgatcaagtggtttttgaggtcgttaccacgaggcctctattgggctttatgccctaaataaaactctatttcaatgtaatcttttctattcaataatcaataaagaaatagatttattttcattacttgtttagtgtgttatttggttcatgtgattatttatatgtttatttgatatataaattcatccaaatcctaatcacattgatattcttgtttattgtgtcgtcagtacagtggaaagtaatcaagattatgtgattaa

SEQ ID NO: 306770 - DNA, 1678 bp, Cannabis indica
taaaaggtcataaaatcacttaggggtatttttgtcaattctagaatctcgactattctcgacattctcaatgtctaactttattgcctcgctatactaaaaatactaaggtatgattctaatagccaaacaccgcgatccaatgttgctgggcacaaaacatgcaaaaatatgaaattccatatataacatatgaaatacattctgaattcaaataaatctccgtaaaataataattcataactaacatgcaagtttcataattaaaccctaattatctgctaatttccaaattgaagttaagcggtctttacacaaaataaccaatgcattcaagtatttgtttatattgtataataataatctattattaatttctaaggcaccaatcatacatatctcgaagaagtatgtctccacattttagagatgtacatattacgcttataattgcttagttagggtcaataagacagtttctaaaaatagaccaacaaacaataagaacaatgctatcggcatataaaattaataaaagatacaaatctagttgcataaactaacttccacgtataataaaatctacaaatagtataagatccaaaatacttacaaaattttggtgactcgctgattggcaagtgtgctacaataagctgagagtataacttgaaacatagaaaatttttgaagtataaaagatcatacaaaattaagttatcttcattaattataacttttttcaagtcaaagtagacataaaaaataataaaaaataaaaataaaagaaaaccaaaaaaaaaaaattattgctaaattgcacctattaaccaattgtactcacctcaattacttgtatatagtgctatctgtagaaattataccattctttcccccggtttccacaaccatgttgcacaatgtcatcctttcttccatctaattaaagagaaaattaggacaactaaatacattttccatcaagagaaactgaaattgaagacatccatgagtattcatgtgtgcttgagtgaatataattttttactcacacttacactttcaactattgagctgacaaattccataactttgtatgtggtgccagcaacagatatttcaccaataatctgcaagaatcaatagagctactaatacagctcaatgatttgaaaagctttaatatttaagaaatgcactaacaaactttaactaaaattagtatcagttcattaaacattattacttgaaatacaaagaagatacatgattcgataattttacttgcataataaaatcttaggcaagaatatactctgacatttcaccattcataacaaacttcatagtaggtgcctaaaaaaaagagaaaaagaacagagaaattatataattatgatattgatataatttaagcttttttgcaattgtaaacattaaaaataaaaagaaatctaaattatgactatacataattagggatacgattttgtcccgtgatgtactttcgcggaatgtattccgtggtacattagatgggtctcggggtacattaaatgagtgttagagtacgtttctactttttaaccctaattacctctagatcaatctcagccatcagatcaaataactccctcatctgacggctgttgtacatcacggattacaatccgtgaaa

SEQ ID NO: 306771 - DNA, 922 bp, Cannabis indica
aaagcataaaaaagtattaatggatttgttgcttataaaaaaaaatgtaatttaatatttaataaaggttaattatgtaatttaatagtgaaaatctaaaattattctcgatatatgtaataaaattaatgagaaaaagttgaaatttgtatatgctttagaaggtacaaatagaattccattcatacaaatgtaggtgggcaaaaagactcttcattatcaactctatggaaaagattctcaatgcacaattaataaacaactaagtttgcgccaatcgctcgtcaagttgcataatatttatcaccacaaagtttttatacaaatttttatgggtgaatgaatattggccactactttacataagttgatatgtctcgtcaaagtgtagtacagaaaatgtaaacgttgtcaattaatttatcccatgcatattgatctttattatatatgctttctgccgaatcaataaacataaaataatgcatgtacaataaaaactagagattatttcataaatacacaaaattagcaaaataattagaaaaatatagttatacgggatgttaaatattattttaagatttctaaaattatatttataaaaaatataatctcttgatgtttcatgttactttatgttgaactctttgttgttggtctgatgttgatttttaattatttatatattatttttatgctgttttaattttatttggatattacttctatatagtttttttaatattgttgaaaatacatgattatttttatattatcaccaatgtattttttttttgctgcacatcatcaatgtatctgtgatcaataaaagcacaatttctatttaaatactaattttcagttacaaataaatattgatattgtaacttaaaaattttcactaaatatatatatatat

SEQ ID NO: 306772 - DNA, 3155 bp, Cannabis indica
agtcattgttttaactgagattaactctggcatttctttctttatttgttgtttcattttcttctagtagttgttttttggttggtgtgtatgagaattaaaaaaaaaagagtagaaataattgtaatgtgctgttgacaaaatcataagaaaatattctaaattaatcagattcagaataaacaatcaggctgggcaccagcaatggctgctgctcactagtgaatgctatatctaggtgatgtgaaaatttattcaatgtggttgtgaatcacagagtggattgcaagaaaagtatatatctgaatatataggtggatcaaggttacgaactaaaaaaaaaaaattcaccagttcaatacaaaaactttgtgctttgacagcaaacatccaaaaacaatcacttataatttaaatcaaactagtccagcacagaaaattgtcctctgtgagaaatatcctgtaatctaaaagactagctcatggggcttcatgcctgacttgagagaaaacctagctgacaagtaggttttcagttctggtactgcttcaattgatttgatcaatgcggtatccacagacttctggtcatctttcttctgttgtggaagctggttcttttcctgtaaagacatgaattgaaagggttattaaaaattatatgagtagagcaggtttcatggaaaatacgcaagagaatatatgatagaaatcaaagaaaaaaaaatcatgacaaaaaatgttgcagtgcattcaagtctatgcaaaatactaataaaggctgatggaaactacaattgacctctttgtctgcctcaaaaaactctccttctcctttcttcttcttcttttcagcttccttggcaaagtacttatcatcaaacttatcgaagttgaccccagaaatgtcaacctttgtggaagttccaatcacataggattgattcacacgtctcaatggaactccatttaatttgaatggccctgcgttcataaaacacaaaatatgaattggggtcgggctatctcaaacagggaatgtgaaagtgaaacttacttacaagcaatgtacaagtacaaccaatatatcattagaagaaagaaacaacactatcccatttttttaagagttggctgtaagattagtaaaaacattaaacttagccaattttaatctacgaattcaaggtaaagatgatctactaaaagataccattacttaattgatactacctactattaccacaaacaatcaaattgtcaaaatatatcacaaagagctctatgtttgaacaacattgtttctaaaactttcccacctcagatgaacttctcgttaactaaaataacttttaaaatctatatgtatgcatgtataaaatctcacattgtcttctagaaaccagtacttgattcatctaacattataaaaaacacaaagaaaatacagaacatggtataaccatctatgcctcattatcaattacatattccagtactcggaaatggaagtacaaaaaccacaacgacaaaatttcagattaaaaaaaataaaaatataatgtcaaaatctcaccagtaacaaggaggagcccagatgagagttgcttaaggaatacaactcgctttcccttaaagcgaccagcaagaattatcaatactgttccaggagtaatacttgccctgaaaactcacattaaacccaattcaagaaacgagcaaacaaaccagataaaccacatgaaatgaaccaaaagaataaacacaaaaaaagacagctttttgaagagaacctgagcttggtgggcttggcttttcgcttgttgataagcggtttcttgacatcttcagcggggtagaacttgggagccttctggttcggggtctcaacggccggtttggggtcgtggtgagggaaaacgccaccgtttttggccttaatggcccagagaccacgcttgtggtacatcttcgagcgagaatacttacccacgccccgaatcagatcagggtttcgggtcttctgagggtttctcgccttagccgccattggaccttccctgcgttcttcttcgtcttgcacttgtttgattcaaagtgtagagataaaaccctacgactccaatccaatgatattatttgcctggttcagtggcattttcgtacttttgttaagttattttcaaaaaaatatatatttattttagaggtttttttcatttttacactttaaagtatttttttttttttttttgtatttttgcaaaattttacataaaacctcatagaaactaatagagcaaactaaatctcaaccaaaatacacataggaactcacatagaaactaccaggatgaaagttcagggagcatgattttacacatgtaaaagtttgaatggcataatttagtagatgtcaaaggtcgaggagcatgattcagttcatggacaatcaccaattagttaaattgaatgaaactggataaaagtccttaaatctaacaatctcaatagtttagggggaatttttgttggaattattttaccaagatctagatttactaacaagtatgttattaacatcctaaatatgaacttctaaaacggtatgaaataaacacatataaagtatcaggaaccttacagtggttgcagcagaatattaatgtctcattccactcagatttctaactcttgtatcctttctgtagcagagtatcaccaagatctgagtctgaatctccttctcttgaaactagattcttcacagccttacacaccatgattgagtaccacttgatgtgtgtgggtactcactctattcactatgaggcttcaattttaaagaaaggaagagagagatagggtttcggctagggtataggagaggaggctcaaatttttactgaaggaatgagatgcatcatcttttccctttagccatcactacttatttataggaaaccacttagggttaggttagatttatttggcattaaaataatgaaaaaaaaataaatggtaaattgctatagagtggccggccatggatagtgggccccactttgcaattttgtcatttttctcatttttcatcttattttctcagaaatgctatttttctaatttaaccaattaaatgccaattctaatta

SEQ ID NO: 306773 - DNA, 2262 bp, Cannabis indica
tttttttttttttaaaaaaagcctgtattacatcttagttgaaagtgaaatttagtcactttgttgtctaaatattacaccttaaaataaagtgaaagataattatctatcatatcaatatatatgttgtcatgtaacgactatttatgaaaaaccaaattgggagattgggacttttcagtttcaccggatctgtcaattgtacaatacattttcttttcgtatgatcattacattttcactttataatttcacaattaattgctataacatatttattatttatgttccaatcaaaatatatgcatatcaaaaaactcaacccacttttatcagttatacacaaggccacccacactgcattatatgcgcatgcacactaaatttcacactcactttcattacaaatccactatatatcaattttatcaatttcccatcaaggaaatcattaattcagccattaaatatatacatatttatatataaacatttctcttcattatgaaattcaataaattattcatgacataggataacaaatctacttaacagatatggatgctatatatttataaggtacaaattgctttcaggggcttcactttggaagccttatataacacttttgtcaaaatatttgacctgtactaggtgtacgtactactaataatgatatagacctacatgcaatctacatttgtgaaatcatgtatgtttgctaatcaaagttatttatggtgagagaatgtagggagatatgatcattttactatgaaaattgctataaaacactactagtgtaactttttaggttggtgcaattaagtatcgggtcccatataattttaaaaaataacgtttaagcaatatcactaaccaaagcagtgctcttttactatgcatcatgtttgtgtagagctcatcagctttcatttgtttcctctacctcttcaatttcttctctgctattagctgaacaagttgggtaagcaatccatttgtagctctcctatatgagcttaaataatacatgttcaactggcctgataatctcaagcattataataacaacttgaagttaaagaataaaacaatattgattgaacattttctttacaactaaacttgaaactaagaaaaacttggacattttgatttaggatcacttgaaaatgcctaattagtaagagaattgttattggacactttaaggcgctcaacaccacactgatttagcgtgttattacgtctgattagcgattttttattatttattaaattaaaatgtgtgagagtcaatatttaattgcactaaccttgtggtgcttggtatattaaggtgccttttaacattttttaatcagtaaaccatgagagagattcctttgttctaatcactctttctagaaacacatctaaatctaaatacatttttgactctaattcaacttggaatcgattttggacgtataaaaagcctagaatgacaaaaataagagttgggagagagaaaaatacaatttggaagtaaggaaacaatattgagtgatcaatgaagcagattgaagcgacattgaagatttttcactagttctatctttttttttttatatcccttttatgtttcaattttaaataaactgaaataataaatcattatatttttgactagtttttttttagttgttaggattagacagatttctaattatgattttaattttatgatttaatgcaaagtttagttttattaattaatccaatatcattgtgattctaccttgtttaattgttgttgtgattataatttatctattgttgttctttatgtgattataattagggtaaataccattttggaccctctgttttacaaaagttaccaattggaccctgtgttttgttaaatgacaaaatggaccctgtattttctaaaatagtacaaataggaccctgaattgattttttgtcaaaataaagtttaattataatccgatctaaaagtgctatgacaaaactgtttacattttttgtatctgttcgtattaagcattgtcttcaagttggttgtattaaaaaaaaagttgtcaaaaattaagctcagggtcctatttttactattttagaaaatacagggtccattttgtcatttaacaaaacacagggtccaatctgtaacttttgcaaaacacagggtccaaaatggtatttacccttataattataactattatttagattgtgaaatttataactcga

SEQ ID NO: 306774 - DNA, 1775 bp, Cannabis indica
catagtatgtttttcatatttatactcgaatactaccacctgagattgttttcccttttggcgggaattttatgtgacaggggcatcccatcttaaggatatcttttaccgaatgggcctgtcggataaggatattgttgccctgtcaggcggccatacactggtattgtttttcacttcacctatgtaggtctcatttggcatagttcataatcccttcaatctttattttttcaacagggaagagcacatccggagagatctggttttgatggtccatggacaaatgagcctctgaagtttgataactcatattttgcgtaagattcaagttaaacctacaagttactgttttaatgaaaacccaagttggggtacaaagccctaaatagtgttaatgtttttttttctcaaaaaaaaaaaacttattttgttggtaccagtgagctgttgaaaggagattcagagtggttgttgaaacttccaacggataaagctcttctggatgatcccaagttccgtccttttgttgagctgtatgctaaggtaagccgcttttattgggtcaacttcatagttgatacgaagcccacctaaaaagtcttagcagctctcttttttaatttatgtacagtaagatttaaatcaagtgtgatgttcactcactcctgaggtgaaccatgtgatcatttataataaagcagctacagcctacacctacacctacacgattatgattattactttttgaataaactacatcctcaaaatttgacttttattattaggatgaggatgcatttttcagagattatgctgaatcacacaagaagctttctgagcttggattttctacaagttcctctagctccaaagttaatgcaactgatagcataatactggcacagagtgcagtaggggttgctgttgctgcggctgtggtggtcctaagctacttctacgaagttcacaaaagaatgaaatagacttgtcattcctgtaattaatcaggttgtgaaaaaccaagagctattatatactttttcacaatttgcttgagtctcataatggagcaaaaataatcatttgttccttgagtacttaatcactttcatataaaaaagaagacaattatgtatttatgttaatggttttccttgggtgtacagaaaaatatcttatgactcatagtcatggtaggtagggtacatctactaaaaaagtttccctacctaaaaagtaatttgattctttctttcttccctaacccactaaaaaaaaattgattctccaagtgtgtgctaagaatgttatttacaattaatcaagtttttaaccaagtcatgttctaattgaagtcataacaaagtaaaaatttctaaataaggcagcttgaagaagatagtagtagtaagatggtgtaaatgccaatcgatgacaccaaacaataaagactgagatgaagggtgagaagtgttatctgccaaaaagcaaagggcaaaggggttcagccaaaaatcagagtagttttgggtaaagccaaaagttttgggaggaccacacatggaagacaggcaaagaggtaggtaggagtagtcttttgtagtaccaaacactgtccccacgactcttcctcgatacctaagcacatgatccacacgtgttgctgggctggacttagctatttcttttatataattgccaattagagccatgctctcgtgtcccttaaacctatttacgtaacgaattttattcattttctttcttttttt

SEQ ID NO: 306775 - DNA, 1692 bp, Cannabis indica
cctacatataattagcaaactaataaaaatttagcgtgacattttattaaatattttgtgtataggggcagctagcgggcacagtggcgttaatttagtacgttgtgaataaaaatttgatgtcggcttctatgattggacattattagaatctgtttaaattgttagttgcatctaccccataataataataataatatgctctcatcttcatttattaattttcctaaatacatcccaatcccatctaaatacactaaaatacaaactaaattaatttcactataattatatatatttatataaaaacttgagagtagtagctagtatcaaattttgaggcaaaacatacatacaaacaaacaaaaaatgaaagaagtagaggaattctcagctttagaactcattcgccaacatctattgggtgactttacctctactgattccttcatcaacactttgaattctcaaattgtttctgaaaatcattacaagactcataaacctatcattaccaccactacatcttcttatcactttcaatccgttaaacaagagtattctcaatccgaatccgagtccaattcccctgttccagacaacaacccacatcaattcctccacttaattatggaacccaaatccgaaactgaccctcttctcgatataccatcgccgaataattcgaacaagaagaagaagacgacgacgacgaaggaggaggaccactccggcgagatgaagcactacaggggagttcgacggaggccgtgggggaagttcgcggcggagatccgtgacccgaaccgtaaggggagtcgggtttggctggggacgttcgataccgacgtggacgctgccaaggcttatgactgtgctgcattcaagatgaggggtcgtaaggccattctgaattttcccttggaggccggactatccgacccgcctaagaatacgggtcggacccggaagagaaggaggcagagctccgaccaagaagaagaagagtctcctcattctcaacctgaaataagctttaactctggtggtggtgataatcagagttggacttggacgttactgaatttggagtgacgtggcgatcaatgattggacacaggctgtgtgtttgtatgtatgtaagccggtttttacaatgttaagcgacgacgtcgtttttagtctttcacccttacgggacagaaggaaaaaaaatgacagttgaagatgtggcgttgccactcccaaatattaatttgggattgtttgtaaagataagtgtgttggactaacatgggttatatgttgtaattattaatgtttataaaatgtatgtataatgtatagatagagatgatattaaatattaattagtagaactgagctcaaattagtaaactagatatctacatcatttacactatatagtatattctcatatatatatcacagacacaccccctgtgttgcaacttgcaagccaccattttgtatgtgaatactgctatgaagcaagcaacacaatggccgttggttttattaaaaaaaatgaaaagttaaaagtacaaaattatattttgaaaaaagaaaagtacataatcaaataataaatagaagataatctttcaaatattatttgcaccgttatagatgtacattaatattaaaaaataattaatttaaattaatttt

SEQ ID NO: 306776 - DNA, 1338 bp, Cannabis indica
gagagagagagggcaatgagagtagtccctacattccttttggaatattggtggatgggacagaaagctgaggaacagaaggttgcaacagtgaaaagaagtacatccatcacagacatgactagaaagctcagagtgagattgatcgatatataaaattttcaattatttttatatgaagagatgggacttcctttctaattttctttttttttctttttgatgaagaagtgggaaaaattattcgagttagaaaggaaggacaccaataatctttttctctggtttgttttggttggtgtttctaattaaagcaccaaaaaaaaaaaaaaaactgtaaagaaagatgacaaaagaatatagtaaaagattactaaaaatagcttgacttttctaatcagtcttgtctagggatgtgtattgtagagatagagatgatcacataatacatgctttgggttcctcagctttctgttttttattattattttaacttttaatttcttaataaaatttttaataatatccatgcgactccaagctctccttactatgtatacatattttttcctaattaaatatggttaatattgtttatgagaagctccccccttgtattttaatttaatttatttttatagtgtactttaatttttcttttgataaaatactgtactttacttaattgtactatatatatgtatatatgtatttatataatataatgttccagccaatcaaggttgtcattttaatcattttgcacgaaggatatgtggtttgtacatagatttgtttaagagaaagaaaaaaaagacattacactactcaacttgagagttttgtcatattatgaattctaaataattatctagatgattatatcataagaaagttagggttaaataacaacttttccctttaaaataatagtaaataatttgtccaatttcaacaatttaatattagtttgctttctttatcgttttcagcttatggatggatttgcattatataatgcatgcactctgatacaactgttctaaaagttgtcttttaattttaattgaataaaaaacttcattaaccgtaccctttgatcttgttctacaatatttgaccacgtagtaattaaatgtgactgaaaattctgcatgtcatgattgaaatatattttgattttttaacaatggaattttgtttgtgaatagagaaaaaaaaattacagaataaattggacaatttagtgcatattcattatccgaaaaattcgttcaaacactatacccacatatcatgtgacgcatgtcataaaaaaatagatttatacaatcgcaa

SEQ ID NO: 306777 - DNA, 2244 bp, Cannabis indica
aatttttattaaaaataatcaatacattgtaaaaaggagataaacaaacctccatccaaattgtatacgttaaaatacataattattatgttttttatttttgaaagtataatataatgtgtggtgaaagagctgttaataaatttaatcaggattaattagcacttgaacattgggttaatattgcgttaaatatcttgtttagagtgatcgagtagagtcttattacgtcgttgttttcattaagtaaaagtattagtttttaattattattcacgggatacaagggtgttcacgttttacttgtctctttcgataaactaaagtaagttcaacttggcttggcttggcttttattgttttttccccttttctacaatcatcaattaataccaacttattgtacaaagctttaagtttgcagtttgttttcatactaaatcaatattttgaagtaattaatgaaagtccattatttcaagggcaaaacaaattaaagaatgggggtctcttttgttttaaataacattataagtctttaaaatatgctaattaatggtatactactaatactaaaaaataatattgaactccatgcatgcataatcttgttctgcttaacatttggagataagaaatattaattaattatgatattatataattgatcagctcgatccatgtcaaatttgatagatgaatcaaatttaagacttttttttgaaagaaattactatatcattacgatagatgaaaagatcatttttattttttatttttttaaaataataagagaaaagttaaacctcacctcctagctagaagaatataaaaaaaaatgaaaaagaaaattcccctaggtaaaagttaattacgataataatgttttggtaggaataattatgataataattgagcatggccatgtcactcctccactattattctctgttaccaaaaaaaacttttttcactgtttttcatgtgtgtgtgaacagagaatgtaagacaagacaagattgtggattcgaaatccaaggggtatacttaccgtttagagcaaaagggttaagtagcagttgaaatgagtgatacactagacttggtatcagaaactagttcattgaacctcaacaatctgcctatcccatatgcacatgcttcagcccatgcttcctttcttcttttttttttttcttaaattgattcaaataaaatgggccttaagcccttattggtccagcccaccaataaaggggcggacccaacaaatctccccctccgcctcagttggtgggctctactaagcccgctcttcgcctacaagctttgagcttctctttaggcaaagcctttgtcaacatatcggaaccattctcactggtatgcaccttttctaagtgcaattctttcatctcaagcacatcacgaatccaatgatatctaacatcaatatgcttggatcttgaatggaatgttgaattcttggagaggtgaatggcactctgactgtcacagtagacaatgtatctttcttgctgcaagcccaactcttgtaggaactttttcatccataaagcttctttacaagcttcagttacagctatgtattcagcttctgtagtagacaaagcaacacacttctgtaacctcgattgccatgaaacagctccccctgcaaatgtcatcaagaatcctgaagtggatttcctagaatcacaatcaccagccatgtctgcatctgtgtacccatcaagcataggttcaccactaccaaagcataagcacaacctggaagtacctcgtagatatctcaatatccatttcactgcttcccaatgatccttaccaggattagaaaggaatcggctaacaactccaactgcatgagcaatatctggcctcgtacaaaccatagcatacatcaaactgccaactgcagatgagtaaggtattgaagccatttcttgtttatccttctcacttgtaggacattgtttggagcttagcttgaaatgggctgcaagtggagaactaactgctttagctttgctcatgttaaatctttcaagaactttttcaacataagcttcttgagataaccaaagtttcccattcttcctgtcacgagaaatcctcattccaagtatctgtttcgccgatcctaagtctttcatagcaaaagacttgctcaactcttcctttagcttctcaatctttttgacatcatggccaacaatcaac

SEQ ID NO: 306778 - DNA, 1359 bp, Cannabis indica
ttgaatagaagatatatataaatattataaataattatatgagaacgaaaaatcagagagaataagagaagaaattaatgggggtggtattaattaatattattatacaaaatttttgatgattaaaaatacacaaattaaaatgatatcatcatcatatctggctacattgtttctattattaagaaagttttagtgatatcattcttgataattatcatcatcaagactaattaataattaataataaccattttagttaatataccaataattctccttctaatttcttctttttcttcctacctaatttttgcttccatggataacaaatatcaaaatccttggttaattcatcatacatacaaggcgcgatgtggtttattttccaatcataatgcttgcacttgtcacaattttgttcatctctttcgctttcatatatgttgaaaaaatgatccttactaccgcgccatctcataccacaaaaataaagagtattaccaaaaaaactcggataaaatactatctcgtatgtcatattaaaagggatcatatggattcccagatcatcgttctttgacctacaatgaacagccaaatcagttagatctggtcttaaattgttagttatcgatacatgtgtttttggacgaaatgaccaatcccctctcacttctatgaagaataaaaaaaacacaaacagtgttaaatggagttttctcatattttttttttaatttctttgtcttattattaattagggtttatatatatatatatatgtttgtgtatttatagagttgttatggatattaagttattaattaggtgcaaactaattgccataatacatactatatttatctttgaaatattcaatttatgtatagtattaattatgttaattaattttgttaacttgttataattatgtggagtagggtttaaatattttgtttattaacgatatgtattgatcagtacattatatagttaaatgtcttcttattaataaaatctctttgttattagtaataagtaacaaattaaatcattaattgaacggaatgcaccctaattatagtactttatttaaaactatatgttttgcattgtttattttattattttttaagggcttgtatatatgatctaatttaatatataaagggaaatttgattttctatacttacatatacctaatattttatccctaaactaatacatattaccattgaaaatatatgacaactttatctaaaacccaaaaatacccctctcaaatttcccatactttttttagtgcaaaaacataaaaaaaaaaaaaaaaaaaaattggtagtccaatggggtcc

SEQ ID NO: 306779 - DNA, 1815 bp, Cannabis indica
actttcaacaccctttttatttgatactccatcaactagactttctaaaattgttgttgggaaactggctcatctagatcatcattcattcgagtacactctacaataaaatttattaaagcctacccctcaatgaaaattatgggcttgtaatgaatatcaaactgactgaactctatagcattttaatagtcttccttatttttgtaatacatggataagagggtggttagttagcagcttgatggcatgcacctacaaaaaaaattactaatttacattacactctctgaagtatttgttttttttttttttgggaaacggtttgaagtattaagttaaaagcaacttatttttcctctggtcacacctattttacaataataatattaataagaaaagggaaaaaaaaaagcaacatgatcttttgctttgctgctcctcagtgtgctgctgtccttatctgtcgtttcctttatttctctagtataaacttttagttcattttttttaattattagtttttcttttttgataattatttttaatactattattttagtttagttttttttttcctattacacattatgtacatctttagggtttgtttgtcacatgagtgcactgcacgtggttctattcatgattattttttcttgagtaatcaacctatttgctaattatgttgtgttttttcttttcttttcgttttctttttcatgtaatataattataaactctgttgtttatattatatgtattaaaaattgttactatgaagacatagtcagtgctcaccacaactctatgtccactctacttaaaaagattcctctacgtactcgtatcatctcataatgtgacttcgaactttgttttctccctaaattttgtaattagttttgttcggtttattattgtattaacaacaaaatcacatataaatatgagattagattagatacattttatcgagtaaagactaacagttaggattggaaattcaactcaatacaaattattataaattatagtcataaaaaataaatctaaataaaaattagatctaactcgaatgacacaataattatttgaattggatcaaaattaacggatgtgatacgaaatcaatacgaaatgacccgactgtttattattaaattttttaatttatggttaaattattatttatattttcataaaaaatatataaattaaaaaaaaaattgcttacaagaatataagatagaaaatttataattgatattaagaattttgctcattatattataatttgtgataaattacttaattaattaatattatttatttgtaatttgatatattttttatttagtatattatttaaatgagtcaaaaattgataattaaaataatatatatatgtataaattaaatatgtgatgccaatcatattgatcaacatatataacataagtatatagttgacatctcaatataagattacgatgggttggattaaaattgatctttttttacatgaacgatatattaatcgaattatagttatcttatacatgttaatttgcataaaatacaatacaataatacgaattgctatccacagtgataattatatatcacacgctaagagcactcccaatagttttttatattctattttttaaaatacctcactaaaacttcactttttctatttcacctcacacatttatattttttttgagcgtagtgtaatggtattttataatcatttaatagcttaatagcttcaaggtcctaggttcgaacccatgacctctccttttt

SEQ ID NO: 306780 - DNA, 1709 bp, Cannabis indica
gggcacaaaacccaacaaatgttaagagtaagtaacctatttttaataaagacacccaggttgctatggaccaaggaagggagaacttcggctaatcttgagcaaagcatctttgagatacacttgtacaaagtgttgcaacaagctataggtctgtagtcaccaactacctttgggttctcaagttttggaattaaagagattattgtttcattcatagaactcgaaagatggccattttggaaaaagtcaagtacaacaacggagatgtcttcacccaactgctcccataagcctttgaagaaactagaaccgaacccatcaagactagggctcttagaagaatggatgctaaacaaagcctctcgcacatatttcttatgaaatcgcctttattagtttaacttgttgttccacattcagaatgttcagaatgttcccctggccaatacaacttttgtatcaatctccttttttgtcgagctcttacttagcttggtttttatttgaggaacaaagggataaagttataagtggaggggacatttgaactagttctggaatgtcgtcaggtattgatgccgagtttgcatgctcttgtacctcttgtacctcttgatgtcgtcaggtagaacttgggtttcgaagtatttaaaattttttttgaagccattattatttgggttcatatattaacagaggtgattttaggttaaggtgggttagactcacgtctagggcctactcatcttgagagcacaaataattctgttttaataaatgtacctaattttttttaaaataatttacaatataaatacttaagtttaattttcgattgtaaataaatacttaatattaatttttggcagtaataatacataagttattattctggaacttctgtaggtactgttaatttttaagtaaattgtcacgtgattaattttttattagtctaagttatttaatttttttatttttttttaaaaaataatttaattatgccaataaaaaaattgatatgtacagttaattatttactcttacaaaatggtcccaaaaaagtccggccctagtatattaatgtaaaagaattaaaaagtgatgaaaaagggatataaagtggaaatcataattcatatataaaaaatagagaaatgctaaaaggcactagtggtgcctagcaccctcctatatgtcaatattgctattggtccaactaagtatcgggtcccatataatttaatataatagcttttagagagtattgctagctattcgcaacgcgacatatcgcaaaagtgctaggcaccattggtgcctaataagagtgctctaaaaaatagtaggtacattttataattgtataattttatttcctttttattattaaacaaaccacaccacagttgtacaatattattaattaggcaaaagcatgcataaataaatacttactcattagctactaagcattatgtttaagtagctaataagtataattaaactaataataattaataagactatatgtaatcttattttctcactacaaaattttttacttttagtcacaataaaatttgtgattaaaagtgaaaaagttgtgactaattacaaattatcattcctatgttgtaactaaaaggtctgtggctaaagatatttgtcacaaaaattgtaatttgttgtggctaaatgtattt

SEQ ID NO: 306781 - DNA, 560 bp, Cannabis indica
aaagattaataaatgaggtggaaaaaatagaaataggtggcaattattgattggagggatagggttggcatagagaaatttgggacaaggagatttttttccatatattaagtactagttatatagaaaagaaagccttcattaatattaagataattatgagacggtgaaaccaaacaagtacttagaaacaaataaaacaatacatacacacaaacacaagaaatgccctaagggaataatgatgtcaaactagacaaaaccagcaacaacaaatgtcccaagggcagttctgattattgcttaattaactaaccacacacaccaccagtacacctacgtacccacatgcagagcatgcatagaacaatataagaaacgtacgtacaagactactaatgtagtagtagtcttgtgaaacatatatagtttcttactattattttgacagtaataataagagtccgtaggtaggtaggtagtttactcataattaagttgaagtttgtgatgatgatgatgaggcgttttgttgaacatctaaggccaatccagggtta

SEQ ID NO: 306782 - DNA, 2514 bp, Cannabis indica
tttttttaattataatttatttagtccaaaaattcaaaaataataatataaggaagaaggagaagaagaagaagtcataatagttcaggtgaaattttccatttaaaaagtctcaatctcataatagaaaacatcccaaagtcgaatcccatcaacctacgccacctgaccaacaaaacatactcaaatccataaaactctttttctttacttcaaatccataaagaatggaactttctcaacttactcatcaaactcctcttacccttttcttcttcctctgtttcatcttcaccaccaccaccattgccaacgatgaatcagccgccatggcagaccttctggcctcaatctcacccaccccattaagctggtcaaactcggtcaactactgtgataattggaaaggaatcgagtgcagttcctctggaaaagtcaccaccattaacttagctaatcactctctaatgggaactctcccttcaaatcttaattctctcaaaaaactcacttttcttaatttacaaggcaattccttaaatgggtctttgcctttgttatctaatctctctttactcaaacaaatctatcttgatagtaacaattttacttcagtaccttctggatgtttccaaggacttaaaagtttgttaactttaagtatgagccagaattcaaatctcaatccttggcaatttccaactgaacttgttgattcatccaacttggttactctatcaatctctagctgtaacatgtttggttcaataccagatgtttttgattcatttcccaatttggaaatcttaaagctttcgaaaaatcgtttgacaggatctttaccacaaagttttgctgtaacaaagattcgaatcctctggctcaatggtcagcagagaggtttgtctggtaccattgatgtgttatcgaaaatgacaaagttgtaccaagtttggctacaagagaatcaaatgacaggtccgatcccggacctttcgaaattggacaccctttttgatcttcaacttcgcgataatgtcttcacaggtaatggtggcaattcgtgttcacgagtcgtgtttgtattgtgtaaaaacttaagtaattacaagcaaatatgaaactcaaactcgactcatttattgtcctattcaaaactaaaacactcatttataaacgggttgacctgactaggcctgtttaacttatttacataaccaactaaatatgttaatgtcttatttaactaaataagagtgtcgtcatttttgagttgtgttatcatgtctgatccattttgccgtccctatttgcaggtgtagttccaagcactctgatgtctatttcgagcttgcgaaatgtcacactatctaacaacatgttgcagggtcctctcccttcatttcaatcgacattaaccaatgttgatctcaccggcactaatagcttttgtaaagacacttggggaccttgtgatgatcaagtcatgactttgcttgaagttgctaaagatttggggtaccctttggaattagcaaactcatggaaaggaaatgatgcttgtgataattggaagtatgttgattgtgattattcagttgggaataataataataataatagtaataatgttgtaagtgttgattttcaaaggtggcaattgtctggattgatatcccctgcttttggtaatctcacaactttgaggagtttgtttttgaatggtaataatctcactggttccataccatttagcttgacccttttgactcaacttgaaattcttgatgtttctaataacaatctttctggggtgattcctatttttccacccaaagtgaagttaattacttttggtaatcctttattgaagaaatcaaggaacttgagaaaaggtaatgacattgctgccattatgttattttctggtcttttgtgttaagatgttttttatgttatgatcaatgattggtatgttttcttaaagagctgttatttcaaagtaaagtgcttacattctttctttcttttttgcagttaaagaaagaaagattgtgcttaaagcagctttaggtaaagttattccttaatctcctctttctgtaatttgggcctacttaactttttatcttctaacaactaaatgagaacacattattattaggtagttataactaaattactactcataaacccatgatagaattttcttaattgaataaatattatgtatgtgattaaaatctatctaaaaaaaattactactcataataattagggagtgtttagtatgaggcgttcaaaataatctgatattgaaatattaaagtggagaatatgattgtatgaaagtttatgtttgtgtttgattgtgcatgagaatatttagttagattaatattaattaaagagtcatttgcagtataaatatctaagtttaacttccgattgtaaataagtatctaagtttaatttttatccacgtgtcatttttttattgatatatttaaacta

SEQ ID NO: 306783 - DNA, 1299 bp, Cannabis indica
attcaattaaactaaggatataacttaaaaaaaaaagtaaaggaaatatttatgaagaatcttttaactttttatgggtataatagataaaatgataaaatgtttgtattttacacttttttattttttttgaatcgacatataattatataattgtattgtctattttttagttgataacttcttcatactactttgcatgtatgtataagttaaaaatataccgtacagagtatttcattagttgtattgcagtacaaaataatgttttttctgctacgtcttcgaacattaatgtttctagatattttgagttgtcttcaagttgtacgtatgtcgtagcactaaaaatttatgtataatatattagaagcggtgtgaatgttcaccagagatgaaaattcatataaaagttatgtaacaaaatgcattgtaaaagaggttaatttatatcatactattttagacatgaacatatatagaatatgcatgttattccttttaaaggaagagattaaaataataaacctattagacactcagattagtctctccataaacgaaaaatcctaaatctaataataataaagggaaaagaaagaaaagttattagttcctttttagaatccttgtctcaaagactctaatatcccggtctaaaatttgagttaggatttttcagtccaaatgataagtttagaaatcaatatgtgggcatttgaaataagtgaatttctgaatgaatcaaatttacaatctcttatttcataaatttatcaagtgtcaaattccttaaaagaagaaggaaaacctaaatccaagagagaattcctatgcaatgatgttctttcacaaggttatttagtcgaaaacatggtccacaagagagaaaaaaaagatctcaaatagagaaattactgccacatagaaaagtatctaatgtccaaacctattcaacatcaagtgcaacataacaaaccaataacacaatatgtgtataaagccacaactgcatagcatatatatcacatcgcatgaaaaaattaaaaatgtacaaaagaaattcaaagtggcatgaaataatataaaaaatattacatataatgatgcatcaacatatatataataaataaaaatatatagatagttggtaaatcaaagaagctagtgttaggatttataaaacactcaagaaatatatataaatcacagatctaaatatattcctaaaagtgctttaatatagaaaaccctaaatcataaatcttaaagcctttgctaaattaaagaagaagaaga

SEQ ID NO: 306784 - DNA, 1186 bp, Cannabis indica
attgacatgggttttatttagggcacaaaacccaacagtttcaacttttattcccactttatctttgcatcatttccttttccctagaagtttaattcttctttcctaacagcaaacaaacaacatttaattaaataaagacaattaaaaataataatttctacaagacttagaagctagcttactaaatagaaaatgaagataaaactaattaaagttgaataaacaaacacacttttattactcttttcatgataattttaaaaggcactaaaaatagctctataccatagagttatcacctatttttttgtattagtataaggttatttcattttagacacacaaattagttatattttaattttatttaatgatatattaaaagttataaagttaattttttgtacatatagaaaaaaatataacatactttttggaattatttaaatttttctaagaaccttgttataactatataaaattgatcaaattaggccagttaagggatggtggagagaaaaccaagcgggaagatgctgaatgggtcagattggtttaggggtgctttaaaatcaatgttgatgtagggttgagtcgacaggctaattgtgtggcggtgagtcatgtggttcgaggtgatgatggggggtggtatatgctgttgctacggtttcgcaacaagacatgctgcctctcttggcggaattagtagcgatcaaggaagggctgaaggctggtatccaatggggtttgcctgagtttgttgtggaaacggattgtcgataagttatgcaattgcttcatgagaaagaagctagctatcgtgatattgatagggtgctccgccaaattaaaagtttattttaacattttttttttgtatttttagagaagccaatcaattggttcacattttagccaatcaaattttgttatccaaaactaatactataggattgggatttcaccctcttgtgttcgtaaaactcttcgatttgataagtgattttctttgtaattgttagacttgaatgaatggattctattaaaaaaaaaatttggggttataaacacaagtctgtttttaccataaaagcattagaaaaaaaatttagaagccaccttaatataatgttgttttgttttaggctaattagaatttttgtctcctaaactttaacat

SEQ ID NO: 306785 - DNA, 1752 bp, Cannabis indica
ttggaaaaaaaaatctaaaaataagttttagaaaatattagctaaatactattaaatttttattatgataaaaaaatattttctattttcatttttaaaaacaaaattttaaaaacttaaaacatagacaaacaacctcttatagtattgacaaatgaatttttaatatattttactactcgtaattcaaaaaaaaattaaatacttttttgacactagaatgatggtaaattattatggatttttcaaaaatttactaatatgatgttgtaataactatgatgaaaattaccataaaaattagaaaaaaagaatatttaaacaaaatattttcagacaccaaagttgagaaaaatattatgatggatgattgatccgtaattaacactcctcattctttaacaattttccatgccagaactataagtgcttgctgaagtttattaatttagaactgaaatttaatttatgattctaatattaaaagtatcaaatattattaaatttaaaaaatatggatatatatatatatatatttggaatttgttaccaccagaatactatgcatgaaaaaattctattttaaaaccaatatgtgatagctaaagtagccatattcttatagttcaatattttatcatttattaatttaagatagtgtccaataatattttcttttaaatggtaattattttttgcttatcaatcttaaattatatcagtaaataaaattactatttacataagtgagaataggataaattatatacctataatggtagagagattaaaataattcgaaagcaaaatagcaaaatgatcttaacttagtggtacatttttttttagtttattcttacctttgtgtagatattaaagaaaagcaataacattcattcattcttttttttttttggtctggggataatattattcttttaatccaaagctaattgcttagtaatatgctctctgggttgcgttgcataaggtatactaatgattagaatgatgatgtatatacaatatattaatgtgtgtatatataatatattaatgtataaaagcaattctttgaagggccctttgcctatcatttcagggaatatcaactttgaacaaagctctctttcacagagtatgaatagggacattctagaaattgccgtcatctctgcaaactctttaattaaactataaattcttttagaagtatactcatcaatatgaatttaatgaatgcatctgcaatgttattgaaatagtaaacagtaacacccatttttttctttataagaaaaaaaattaaagagaaataaataaaatatataaagaggaaaaaacaaaggtttttagaagatattaatcaattaaattgttgatggatgtaactgggtcctggggataaggataatggcccttaatcttaccttcccacttgaagtgtattagactacatacggccccacctctcacttttttgtctggaagcaggtgttgactatgaaccaaaattaaagaaaaatacttagcaaaaccttagtgcatgtttgacatcataactaaaaattattttttagtttttaaaaacaaaaattattttttgaaaacaatttagcttgtttggctttattttttgaaaacagttttcagaaaataaagttacaaaaaacaagaattttgaaaacaacaaattgttgttttctgtttttaaaaaccaattcacttctggtcaatattgtttttaaaaaa

SEQ ID NO: 306786 - DNA, 1573 bp, Cannabis indica
ttactattcctcatagttcttgtcttctgcctgtttaggacaatgttctatttcctgaaaacttaataaatatagcttactgcccattttccactgtgcaggtggtgtgcaggttgacaattctgtaaagtggaatgtgaaattgttttttttttcttttttttttttcttctgggggcattttacttgcatgattgcattcctgtcttgcataaatttgattttcctacttagttcagccattatttttccctgcacttgtaaaatatctttgcattagggggtctaaaacaagcggactagtttcctaaaacactctcattaggatttgtctatttgcatcttctcttaaggttttggctgacattaaactgatttatttcattgtcactgttcatttgaattgcatatttcctatgaattatcaattgaacttttcttggaaacgttgcccccttctatgatttttttttgtttacagtaattcgttaacaccatttcccaaatgtcttttcttctcttttcttatcatatcttcaaagttaatttttttgttcgattcgtgtctgcatagtttacagtagtagggattgtgattaccgcacaccaaggctagtgaaagatcgaatcctatctttggatttagtttttgtgagatttttccttcttcaattttaaggttttagaaataatcatgatcttacattttgttttacaagttttgcaggttcaggtatccctgcttctcaggttcaagccatgttttcaattgcagcttaccatcgaatttgtttacaggttgttggtgcagcgtgtcaggaaattggaatgcgcagttcagcaggttatcgaaaaaaaatctggttttggaaaggcaccttcaacggttgatggtcaccgagcagcatgagctattcttgtacaccattaccattagctttaatcacttgtgacgttgcaggttaagatcatcagttgagtaggtgtttgatgtttatggacccaatttagtcttaaatttttaggtctttgccagcattggccactgacactgtttgctatttttatctgttattattgttgtttctgcataagagttatgatatttggaacttatcatcattgtgttgtaggataggactcattctatttagagtggaattttgtttttaatgcttttttcatcaaaatcggaagaaaggaattgctttaggtaggatctgattgtccactttcaaaattactgaaaaaacaaaatgaatcacatctgaacaagatatccttagggtaatgcaatatttgatctttgtcgttgtcgtgatatgataatattaattagtggttagaattagtgttgtacatacgggtttggctttttcggcacaaagtgtcaggcacggtatgtcggggtgttttttgattcacatctaatatttttaggctaactacttgaggttagttcaactggtcattgaaggatgtgtgtgtattgtaggttttaagtttgaatctcggattatgcattctaatatattaacgcttaaatttaaaaaaaaaaaaaaatagtttttaa

SEQ ID NO: 306787 - DNA, 2761 bp, Cannabis indica
agccttctctctccctatctttggccgacccttctctttctccttccctcttcaatttcgaaattcttagtgtaagagtagtgcccacacacaactagtgatacctcaaccatagaaaataatttccaacagctgataagtggaagatacatcctaattgtaaatagtttgacatagtaccctcccatgatttccacataacaggcatctaggaatacgaataacatttactcccaagctcctggacttacgagtcatgggagcttgcagcttccttttgaatgctttatttattatcctgacatgctaaccatgtgttgaaatgtggaagaagtcttttgcattactttgggtaactgaaaggtcaatatatcctgcagtacagctattgtcttgctaaaatatggtgtctgtttggtggagtcgtggggtttacgctctaggcttaagtgcgttccttgtgggaagtgaatgacagctagacttgaaaagtcgatagatttatggcatgttggtgatgctgccatgaaattttgagtaatgaatgcctcattctctttccttgggcgcattaaatgtgatctcttcgagtccccagctgttggatggggcaacttctgatcgatgaaatctggactgtatattttaaaaattctttgaaccgttgccatccatataaataaaagtctttgtgaatgaattcacttttctcttcctcacccgaagcaacaaatccttagcccaaaaaaatttctcagaaaaaacctttgcccttactcatctttctgaaccaaaaacctcttctccttttctcgaccttattgttgtatttcccaacgttcgacacctacccacatggcgagttctctattggagcaggacgtgactagaacatcgagtaacttgtgggattttgtacgacaactaacaaccatctattttcccttcaatctgtctacaagtaagtatttcttctactcaaattgttatttcccatttttattgcaaaatgtagtccgaagcttgtcgaaatttattattttcatgcgtaggatttaggtttgaaaattagggttgctatatgtgaaattggttcgcataaactttcgggtaatacctctagagctaattagtgatttgtgactcagtacatttttcttcaagtagatccaaggacaattttaagagttcttggttttcttcttgataatagaaatctcgtctgtgggtcgcaatattgacttctactggcagcatcacctgtgagccaaatgctagcgagaatggagtatgccctgttgctgtcttctcatttgttctaggagcccaaagtacttgaggtagttcatcaacccatctacctttagcaacgtctaacttctttttgataatatccttcaaggttttattaacaacttctacttgcccattcacctgaggccttgacaccgaagagaagctcttaataattttgttcctctcgcagaactcagtgaataactcatcatcgaactaagttccgttatcagatactatcttaatgggtatcccaaacctacaaattatgttcttgacgacaaagtcaagaacttttttgcaggttatgaaaaccagaggtttaacctctggccactttataaagaagtcggcagccaccactgcgtactttgctcctcctcaccctgtggagagttccccaatcaattcaatcctctatatcgcaaatgggtaaggcgaggtcatcattctcagtttcgttggtggtacgtgaggtatatgtaaaaatctctgacacttatcacatttcttgacaaattcatgggtgtccttatttatagttggccactaatatccttgtcgaatagtcttctttgacaagctttgccaacctgcatggtccccacaaaagccttcatggatttctctgatgatctcgtttgcttctgcaggaagaacacaccataggagaggcattgaatagcccgttctgtacaatttgccttttgttgttggaggaatttagacaacaccaaataaaataatatatttaaaatacaaatagaattatgcgagtgctcaacctagaatggcgagtattcaaactatggatacacagacgtattggaaatataaaaaggaagtatagtggttcagtcagatcaaggtcttcttagtccactgttgcaagggttttctatcttgttcatttcatgttggatcactcctttatatacaaagaaagtgttctttgattacacatggattgatttcattatcaatccgtttgtacattgaatataacatttaaatctataaaaaacgtaagtacaataaatgaagaacagtttcgacccaatttactaaatacaacaacgtatgcaacttctatagtgcaagttgtctgttcatattctcgcataagctcgcaggcttaagatgcgcacaagactagtcaagtctgagatgtctgcgttttgttcgagtctcttatacggacatcctaaaataagtcgacaacctaagacatgcgagtccttatcgtgttatcgaggttgttaggtcatctggaccagctcgcagagtaaagaatcgatctttacaaccttaagatgcgcacactactacaatcttaccatatagtgacactctttagtgacccacacttttgtgcgcgtcactgaaagattaggagtgagttttagtgacccacacaaaaagactttaaaaatcaatgttagtttggctccgtttaaaggtaaaa

SEQ ID NO: 306788 - DNA, 2690 bp, Cannabis indica
acttttattatagtgtgtcattttatgtcggctggggaaaattattaaaaatgcaaaaatatgtgtaagttgatgcatatctatgtcattttcccatagttcacatctgttaattacttttgttattatttttcttttaatgaagtagatgttgatttccatgtaatgcaatgtgtaaatctttaaaatttaaatggtatttttgctttctttttgggccaaattatgtgtcaattgtcatatcttgtttattttattttatgtgttttgtccttttcctttttgtccattttcattattattctgtatattttattgcatttgtattattaaccaaaaatgttataacatacacccttttgtagtttactattttagattgatgtggtcaaaaaattgtaataaaatgttatataaaataatacataattatcttaaaactatttttatggtaatataacattatagtcttgagcttattatttaaatttcgaattctcccaatgatttaaatttcattactaatatacgaaattaccacattaattaaaattaggtgacataaagatattttttttatgagtatccaaaattattatttagactatgaagtttgaaataaattaaaattgttcttgatatttgggggaaacctgcactgatgtatggttgtaaatggtgtatatagtttgaataaactattaatacccttttgtattaattagtaattaattaataatcacaacagataattggtattttcatatcattaattaataaaaaattatagtttagacaatatgcatgaacgaagctacctagagccttcacacccctaaattatttgaaaactttataaattaatgttattaatttacttagcatataatatacatacacaaattgaatatacatcatattatagccttatattctatttgtgtgtatatgtactggcagatctacgttggagctggttcgagcaaggagggtcagttgacccctcatcatgactttttttttttttttatatatatatataaattaatatatatgatgtataattgtatatcttaattagtgtgtcgtgtagtggttagttaatgtgtcactcttcaatagagcaagggttcggatgagtcgaaccttcgacctcccacatacgtacctagagatatttcctacgattaaaggtagttacacaaaaagagtactaatttgaggcttaataatattttaagtgaaatttaagtaattatttttaccaaaatgcaatgcccatgctaacaaaattttgtggatccattaatatgaaaatgtactctctatatatacaccactggaccattccataacgaaacaaaatccattcctaaattatttatttatatatattatccatgagaaaattggttctctaatatacatctcaattatatattgataatttttttaataaattaaagctagctagctatgtatcattactttttaagtaagacgtgtaaagatatattacaattgctttaaattaaccatgagtattgctataagattctaattaaattaaatgataccatagtagtactatatatatatattattgtaggtacgcacgcttgcaaagtgttgacacaaaaagaatcatatatacctcaaaagctgatacttcatcaccctacacagttgaaagaacaactatatattttatacagtaatatataggtgctacctaagcgaacttgaaagctttttcatagttttttttagtgggttttggtcattattattgttacaatatttgatattgcttgaaccaaaagtgagaataagattgatttatgatcatgatcaatggacattggccaggccacaataatttgatagctttagatgaatattattatataaatatacatatatagatagatatagaagaatatctaatcgattaaaaacctgatctcgtaataggtatagggcaggaggtcccatgacaccccattcattctctttgttagggcaacatattacatatttatattctttttatgtgtgggaactcacaaattacttctttttataattatcttttccctttttcaatgccaatgttagcaggcactatataacatacataattaaatgagtttattatatatatataatttccacctaaaacacttggaattttgtaattgcataaactggttagatgggtttggtttaagtgtgctttatccgacaacttgatatagttaataagtgtttatttaatttaagtcttttcaataattatacatatattatatacataaacttcccttagaagaagagatcatgactaattaaatgaacaaacttttccatttggtctggtttggtctagtctggttagtaggcaatgatgaattaaagatcataataatcattttaattagtgtcatttattatactacaattaactgtattaatattaatgacgtatttcatcattaataatgagtgtacgtaattatactaaatagtatatttacgagaaatgctaaaggacaccagtggtgcctagcaccttcctatgtgtcaatatcgctattagtacaactaagtatcgggtcccatatactttaatataatagtttttagggagtatcgctagccaatcggaacgcgacatgtcgcaaaggtgc

SEQ ID NO: 306789 - DNA, 916 bp, Cannabis indica
gtaactttgttttctgaaaactgtttttaaaaaacaaggccaaacaagccaaattgtttttaaaaacaattttctgtttttttttaaaaaaaatagttttttagttatgatgccaaacatgcacttatatttttatgaacttttttttgtccccaagaagggtgacaaatttaaagacaaattttacaagttacaggctcatttggccaatgaaacaccggtacccttcaatgttcaaaagaatgttaaggaataatgtcataggttcttcttttcttttgattttaaggcctttgagcgcaaacttattaatgtactgggttcgggttcccccaatgcatcgcacaacccccactcaactcttctttaaccacaccaaggtatttgtcggctacaagagggaatacatgaacgtgggggagtttgtgatgaccgccaattgccagagggtgaagctgattttggagagccaattagtcgaggacttcaacttgtcctagatgatatgccccaacacccacaatctggggaaggaaaggccgctcaaggcaaacattattgcaactgctgaagacaagtataataagtagatatttaagaaggaacaagaactccactatgctcgcctctaaagtgcctccaggatgtccagccaagaaaaggcagggaaggagaggacgccagccaggcctaagttcccttttcttgttccaaactctgggaccctcggagccagtaccttgggtgcctgtaagtcccctctgaaccttcattttgttcctttagctcaaaattactcttacttaccgccaattggttttgacatgaggttatataggtttcagatgccccatactcagtggggaaacaatgcaaaaggtttttatttttcaaatttgagccatttcttgggtcg

SEQ ID NO: 306790 - DNA, 4614 bp, Cannabis indica
ggaaaacgcagacacgcataatatatattttcctttaatacaaaattccgcaacaaaaaagcaattttgtgaagaaaaccatattaattaatagccaatattatacatacgttatgtatgcgatgaagaccaagcagaccgcaagttatcacgtgaaaacgatctctgctcacatgctttgagaaaacatgtaaatttattaaagagaatgttattttggagctggttcatgattaatgattggataattaaattggattaatctttaattaaaaaaatgtaatgtggttcctgacatcctttatgcagggttccatttctcctgataaatacaatgttaaattttatattttgtgacgagataatcccttttgttagatgataatatttagacatggatttaagtttatttttttaaataattaagttgaagcttgtttccaacagagcaaatgcaaatatatatatagctattcttgtcataacacatttaaatttggttgttactaaagttcaatttgataaaatttattaagtttcgtgtttattttatactattttaataaaaacacatgatttgaattattatttaacaaaataaagaactccaattaataaaatggtattactctctctcacttataagataattaaagtgtaataccaataacgaaatatgattccaattatattagacactttaacattatttatttttttaattattatttagcattgttattaaacaccttaaaatacttaacattgtttagtataataatgtaaaataagcattgttatcaaggtcggtcctatattaatttgggccttaagcaaaaataaaaattggagcccaatgaaaaagtgaggttattggaatttaaactttcaacctcttaattgttaaactaatcaaattaccactaggttacaatacatatttaacatacaaagtattattatctattttattattaactatattttaattttctttttcaaaatagggcctgagcggtgggtgacctaaggcggccgcctccttcgtctcacctcagggccggccctgattgttatttaaatatactctggattgtttagtataatgtaatgatagtatagaaattgaatcttttaattttctatgattgttattatgagatttttgtacttctaaatgccaaaaattattattatagaaataagattattagggtatcttaaatccttttcaaaaataattctaaacatactcatcattcataatacaatagataacacatattactaaattttacattaatttttaaaataatatatgcaacttgtgcgtttaccaaacttgtgatgctttgtctcataattttttctctattaaaaatatttcctttgaactataaaaatcattgcaaatatttcatgtagttacattatgtttatttctttaaacaatttactgatataacactaatgtgacgttaatttaaccaaatttaagagtctagattaaaaataaatacataaattgcaatctctcataaactataaaaatgtatatgtgcattcttagaattagttgaaaaacaaaaatatatactatttttattattatcaaaaaaataattcaatttacaatgacaatgaactaattcttatatagagaatgattacattacaactaactagcaaacttgtaacagaaaataacagacataatgatctttaatagctcccttcaagatgtaatgtagaaatttttgacactcatcttggaaatgagttcatgaaaatgagcacggaagagaggctttgtgagaatgtccgcgcggtgttggatttagatggaacgtggtttgtttcgatggtatcattatttattttctcttgaatgaggtgataattgatttcgatgtattttgtgtgttcatggaaaactgaattttttgatatgtcgagtgcaacactattgtcgtaaaatagagtagatggaagtctaatattgatgttgaaattgggaaggatggagggaagccaagttagttcacatgttgcatttgccatggccctgtattaggcttcagctgaggatcgtgacatcatttgttgtttctttaatttttaggagatgagtgactgtccaaggaagatgcaataacctgatattgaacgtcttgtgtctaagcaagctccccaattcgcatctgtaaaggcttggaggtgtagtggttcagaagttgtggcataaaagaaaaacccttgtcctggagtgcctttcaaatagtgaaggatgcagttggttgctttaagatgagattcctgcgattcttggagatattggcttagtttgttgataacaaacgagatgtcgggtcgtgtgattgtgagatagattagcttcccaattgggttgcgacattgagtaggattagttagcagtagtccaactttattatttaactttaggctccattggtgtggaaactgatttcgtgccaaggtggccggtgggcagcaggagctgtaaagtaaagggtctttgagttactaatattcctttattccaacaagctatttcaagaccttgaaagaagaggagaggaccaaggtctttgagtttaaaatgagcatcaagatgtgatgtaaatgttgaagagccaagttaatattggtgcaactatgatatcatcaacaaacattaataagataaggaaagtatatgttgtttgttttatgaaaagggaatcatcgctctttgattgaataaatccctgttgcaatatggtgttgcttagtttcacataccactgcctggaggattgtttgaggccatataggattttcttcaatttatagactgcatttttggggaacaatgcctttaggggtgtaactttgtgaaacttttatgtagatatcttcatgtaaatcatcatggataaatgcattatttatatccatgtggtgtaggtgccattacttgatgacaataagagcaagtaagagtttaagtttgttaaatttggccacatgggcatagatttcaaaataataaacaccttgttgttgtgtgtagtcttttgctagtaatcgagctttaaatcactttacagagccatctgggttgtattaaattctataaactcatatgttgctaatggtatcttgtcttggaggaagtggaacaactatccaagtctcattttcttctgatgaatcgatttttgtgtccattacttgatttcacattttatctttgcaggcttgtgcataggaagtaggttcaagtaagtgagtgatggcaagagcaactgctctgaatcgtggtacgtaagagctttttataagaaaggtaatctgttattggatatgttgtggtggtggattgagttttgatggcacaactgtagtcctacaaatatgtaggcttggttattgtcctgcctggcttagtggctggccctggtactgctggttgttgctcaataggtggagggggttttggtatagtgttaggattgtgatcatgttgagggtgatctgcatgaacactatctagagagaaagtatcaatgttaggattaggagtactagtttgtaaaggataaactaattcatagaaaactacatcccttgattggaagatgtggttgtttgtatatcaaggagtgtgtaagctttcatatgatcaggatatcctataaaaatgcaagctctagttcgaggagcgaatttgtgtggattgttaacatgggaagcatatgctaaacaccaaaaaaattttaggtgagcatactggagtaatttgttatgcattaattcataagaggttttatcttgtaaaagattagagggtgttctataaagtaaatagacattagttttgaccatgtaactctaataggataatagtaaattggattaaaatgttaaagctcgagccacatttagtatgtgttggtattttctctcgactacatcattttgttggagtcttcctacacatgagttgtagttaattacactattaattcttttgcatatctgttccgacagatttaatgttgcttttgtagtgaacatttacaaaagtaaagaaattttgaatgatggttggagcatttgattttgcccaaagtaagtataaccatgtgcacctagagtggtcatctacaatggttagaaaaatatttgtatcctttaatggaagataagtgatatggtccccaattgtctacatgaactagatcaaaaattgatttggagaaattataatgagacacaaaaggtaatttcttttgctttgaaagatggcaagtgggataattgtgaatactatgattatcggtaacaaaatttagttatttattgattttatttgtaataagtatagaaagatgaccatggcgtgtatgccatttgtgtttagtcgattgtacattacaaaaaactaaattagatgcttgaacatgtgaagagtcctgctaaatgtagtagaatttgccaaacctttcagctgtcccaatcttcaatgtctgagaagggtcctgaatgtagcaagtgttgttagataaaataacaattaacccaagatctatttgtatataacatagaaca

SEQ ID NO: 306791 - DNA, 4723 bp, Cannabis indica
agatttctgatactcttatgtgtttaattttctatcgttttagaagttcatatttaggttgttaaatcaacatacttgtgagtagatctaagttcctggtaaaataacttccaacacatttttaatgtggggatagagaatttgatgaatggaacccactgaaactcgtaatgtccaatcctccaaatgccataagcaataaaatacttcttggtgtacccactaacttttgacatggctgcagtataagtgtcacccaaccattggtgaccgatctggctgaagtaaaagtacccagtcctattctactttggagcagactttaggtcaaaatagtatccaatctcgtaaggagtaggctaaggctagcctagctccctatataaaacaaacatcaccgaaaggtacttaataatttttgcggtgatttgtgtcaaacacatcccaaaagtaagcagcattgtctcaaaagtatggacaaaccagcaacactaccctctgctcaatatggcactctaatcaagccaaccaacctaagggaagtcagcgtgcccagtaatctctacggggtatctcacaatggacacccctcactaagccactagcaagtatcttgctaagagcatcatcagagagggtagaagcgggagagacccaacttcctccctgtgatctcgcatcaagtattcaggctcaaaagactaatccaagacgtgatccaagccaagcactgaaggctcaccaagcctatttagcgggataccatcggcatcgtaacgacccaagggatagttggagaggaaaataccaagttctgtatctctttctcctaactggtgcaacctcctcaagatcaaactcagcatcgagactctcagccccttggttaacctttagatcagcatcaacatgaggttgagtagcgtcctctacaatcctgactcgaccccttgtagccaccttagctacatgggggtcacacggaagcactctacgacaagtcaattttgttctaaccatgacaacaagataaccaaaggacctagacggctgtcacctcccctatccaggacctagaaccacttagatagaagagaaaaggggaggtgagcaacctgacaaggctacaaacacattctagtcaacagtacccaagggtactttctaggttaatcacaatgtataaggtcaattatcgactgagtaccgtcttaagtacacttacaaagacatatagtaagtactatgttatacaactgaatataatggactcactaccgagccttatatagagttcctaaggggaaccatgcataagactacagttgtatatgcctccaaggctgtcacaagaccctagccgaggtcaacagagggtaaaaaactagctgcccccttggagctttggccttggccagccaaggttccaagccttagtggctggccagaccccatgacccagcctagggccggccaggaatcccttttctaggaataggctggccagcctatggggtacacccccttggctagccagaccccctctttggtacaatctcctctgccgggtctagtctatcccgtacggttggttgttttcaaaaagtagtgcaataaaaaagcattctatgaacgagcagccttccttggatggccaggtcttaaacaagacatccttggccggccaggacttgtacggatccaaacatgtattatttcaagagctcaaacacgtttttcatgttcttcgtgactcaaagagccaataatcacaacgaaggtcagctttagatctttttcatctagaaatcacatattacatatcctaagactatcatgcggctcaaaataccaaaaggacaacaatctaatgtaggaaaatggatgttcaaagcaaggaataatgttcatgcattcatggaaaaattaaccaaatcaagtgaaatagcgagaatagaaagcttatccactataagaaattgctgaggaagaatgtaggaagcttggatcgtcaaaacaacacaaaaatcctaaaggaatggcccttgatggattctgtcctctagagagaaggaagagcttctttaaatgacagtttctagtgagagaagtgaaatatgaaaagtgagaagtgaaaagggttttccccccaaaaagcacttatatagtacatgtgggaccttttcttcacttacttcaccaacacaataaaaagacaattaaagtagctagtttactacaacaaataagatcaaataaccaaggaaaagtatttcaaaaggctaaaattgcagcaacttctatccagcaaaggctacaacaattccaaccacaccaatctaattagtaagtccctatccgtacagacgtccgaacaagggacttgggggcaaatgttatcccagtttttgcccacttgacgtggcagtgcttacgtgtacaaaatcagtgctacgtggcaatacaactcaccaacaagaaggctaagtcagtaccttagcaaatggggaccccgacactcaaacggggcagtaaatgacaaaccagcttcctcacagaagttgcccagccacccctggctggctctatggtcaaccagcctctgaacaacaccatggctagctagcctgctccctgcaggtgtctggctagctaagtgaagacctgacaggataacctatacaattctacatgtagactgctaattgggttgcgaattaggtcctaaaagcccaataaaacaacttaaaaaaatctatgtttaagggcattttggtcttttttaattaactaatttaatatacaaatatcctagggttttagttgtaaattagaatttagacttcctatataaaggtcttatctctaacttagaaaagctaggtcataactaagccaaaaaccctctaagtttgataactctcttcatcactctctctcacatgcccatacaagctatttcaacacttgagtcgctaatcttgatttctacgttgtatccttaaggatgctatatcagatcccccacctatagtaatttggatagtatcaacccttggtattaatgcaactaaaaggggagtaggtcattacccgctatcaaagggggttgaacctctataacattaacaattctgtgtgttcactttctcattctaattgtgtaacacattgaaaacatcaaatttatatgatcccacagtcggtttattaatttttgaggtcagtagtaccctagcaccctatctcgatggttcacccatgaaccgccagattggtcctcataaaactatttttttaatgtcaccaatctcgacggccagcctctcgacgattacacatggaaccactgagattggggtgtcaagatagcctacatttttagtagtgtaactaaaaggagattaggtcattacccgccaaacaagggggccgaacctctataaatcttcatgttaattttattattttattttacattttacatgtggtggttatcagtaataaataaggctccactgtcagttgaccaaatctaagatcaacaaatataattctagaaaaaagacggactctacatgatttgtgttcttaactcatgactaatgactgctcaagcttgatttttaaatttttgcacgtcaatcgaatcatcatatttgctaatatttagagatatgaatgcatgtttgactattggtaattaatctcaatcattttagaacatatttgataatcatttgaggtgaaattgataaattacacatgattttgagatatgatataggtaatttctttaaatcgatcgagcttttcaaactgttgacggaaagaactcatcaactaaatgacaaggacttaaaatggtgtctaaagatcttgatagaaaaatacttgaaataaaaatatcacaacctttgatctctagaaatcttattgatttttccataaaaaagtccctttaaaatgagttcaaagaccctatttatagtgagcccttggcgttttacaacttcaccagatctcaaaaccatagaatgttaatttattttcacacctaataacattgtttcctaggtggtctgatgtagctgacatcttaagttacactaaaaatgcccccttcattttgtacatcggatgaaatgaactttgtccgtattatccatactcattgtgctatcgttatctcgtctaatacttccttacttatattgtttgtgttaggaggggaaagaaggtcgacgggagcgtaggaggctggacgcgaggagttggtgtgagtgcgagcaggcacacaggcgcaaatggtgcagtgggcgacacgtgggcgcagcgggcgtagacagcatgcaggcatagtaggcgcacgggtgcgcacagcgtgaggagcacgggtggagcacgcggggtgcacaggcgtgggcagaaagcgtgggcgcgcgtagtgcacaaatacacgggggtgcgggggcgctcggggcataggcaaagcgcgcatgcgcgatggatgcgcgagcgcagtaggcacggtaggcatagaggcgcgggcacgacagatacgcgagtgtagcgggcgtaggggtgcagatgcaggtaggagcggggaggggcgtgttagaatatattttaccaggatctagatttactaacaagtatgtttttaacatcctaaatatgaatcgctaaaacgataaaaattaaacatatataaagtatgaga

SEQ ID NO: 306792 - DNA, 1686 bp, Cannabis indica
catttctaaaaataattttttaaaactaaaaaacaaaaacagaaaacaataccaaacatgctcttaattgtctaacaccacattaatatagggcatgagaagtgattagcgattatttatattatttattaaatcaaaatatgtgagatgatattgaattgcactagggatgtcaaaaagatccatttagttggagtgggtcggagctccaatccgatgaatcatttctgatccaaaatattcgactacttattagatatcgcatcaaattcgttccactccacctaatttttttccggttcgaatccgatctgacccaattttaatgtattaacaaaaaaaatttaattcaagactcaaacctcgaacttgaactcgagccgaacccgcccagaattcaaactcggacctgaacctgaacttgggtactagacccaagacccatacccaaacccgacccgagcctagacccggacccaaatgtatgaccaaacttggacccaagattcggacccagaccaggacccaggacccaaaccaggactcgagacccaaacgaggacccgagacacaaatcggacctaggcccgaacccgggacccagacctaaacctagactcggaactcaaacgggacctagaaccctgacttggacccggacctgaacacgagactctgacctagacccagaccccgacccaaacccgagacctgagacccaaactcagacccaagatctgggacccataacttaggacccgaactgagacccgaaccgagtcccaaaatcagactcggacctagacccagatctcgaactcgaacctcgacccgggatcaagactcagacctaggacctaaacccaaacccgagactgagatccagacccgggactaggacccaaacctgagatcgagacctggacccgaacccaaactcagactcgaaccctgaacccgaacccgaacctagacctaggacccgaacccggacccaggactcggacaagactcgagacccagacttggaaccaaccttagagctaaattattctcagcaaaatggaatgcgtcgtagatttttgcattcatcttctattgaggattagagcacgagaattttcatatcatcaaccccaacgatcgtgagttttacgctggaggaagaaggtgtgaacttggattttaacacagaagttaactcgttgattaccctagcctcccgttccgtgaaaggtgcgatcgacttccctagccgaacccagcaacgatcagtttgatttccccacttttgacatcaggtatgttacttttttcacctgtagatttattttttctaggtttgcaaatcattttgtatgttcggtctagtaagcaattttagggtttttgatttgtgtgactgtaatcactagaaaatgtaggcaccacaaattgtggtattttttgaatttagggtttgttggaattgagcattttgcagtagttatgttggaattatgtttcccttgcctaaaatccttctagttttgggctctttattagtctccgtcgtgttttctctctatgtcgttcttaactccttatctggaataaatgactcccgagagtattcatttctgtacaattagtctagtttggacctctccaagtagttaatgggggaggactgttgggttttatgcc

SEQ ID NO: 306793 - DNA, 3218 bp, Cannabis indica
atgttatcccattttttgcactacgacgtgacatcacatgctggtgacacgtggatctgattccccatatctgcccgagagagatgttccgaacagggcacgacatacacctgcacggaagatgtctacccagccgagcagtggataattcgagcaacgcatcaacacttagcaattcaagaatttgaacaaaattaattagactaaaaagttgtgtatatataatatttttgtttgaaaatttgaacaacatgtttaaaagagaccaaataacatatatgtgaaaaataatatagatggaaagaatgagaaaaaagttgtaccgaaaatatctacaaagaccaataacatatatacatgtgtattagttacatatacattatatagatattggttagaaggagagagaatggaaggaaatcatattggtacctgaatacaaagacaataaaaataaaatcataaagagtaattcatatatagttgtagcaaaaattataattaaacatatattatgatgatatgccttttagggttatcataattaggtcgatttaaattggcttataagatgagagaggaagagaaagaacaatgacttaagataaaagagggagattatagattatatatctttagaaaaaaatgttggcatatatatacacatacggtttttatttatgaaccatcacttaaatatatatatatatatataaatatattttaaataagggatatttaataatttgatttatagctatataaattaatgaatcaatatatatacataagttgaataaaaaatgaaaaaaaaaaagagaaaaaattaaagaggttgatctttatatttatacacatatcaataatgatagaattaaaaattacaaacctaataaaaaattaaaataatgagagaatgaaagagaaaacaaatagagccaattaaagagattttaggatgacatgttattgccaaattttgtagataatacaaagaacattcactcaatagcttcttaaacttagaaactaaattttttcttattgttgcatgcattagatttttctgcaggataaatggtaaatatgagtatttaataattgataaatgattaaaaaaataatacaaggaaaatatgaataaaataataatcaccttcttatcaataaaaatcatatcaagacttattaattctccattctttttagtattaagagactttcacattctataaactctaatttttaggctctaactatctgtatcagtattgagaagaagagagaaaataagtagtaaattaaaaaataaaattttaaaaaataatttaaaatatatatagagatttgtaattgaaaaaaataataaagaataaagtaaaaaaatgtttaaaaaaacgtatgatattatcataaatatacatatataaattttagagttaaataatgatatttattaaattattagttatataaaaaatcaaagatggttaaaaaaaaattatatttattttaatttatactattagctatataatagttaatattaaaaaaattaataaaaaataagaaaaataaagaaaaaataatgagtactttaagaccgtattagagtataaatagcgggtcaggttggcgccaattcatttcaactacgtttaatatctgagactccaatgctcgcactcccagagctacggggtcagagctcaccgtacaaatttcaaggttttctttctcgtttttctttgcatgcgatcaaattttgaaaatgcagaagctagggtttccaaccatgagaagcttggatcatttgaagtcgctcaccggatcggtctctggtactgcaaagaccttctcattctcttctcggcagcctacggattcaatatcttcgggaagctttacgaatttgaagatcactgcaggttctatttttatctgggaattgttggttgtttggctgattttctctgaaaatttggaaatttccttacactgtttcgtcggatatttttattttagagaaactggtgaaagagcaagcttccgtgaagactgatctagacatggcggtacctctctttgtttctccctgtgtctgtcggtgctttcgtttaatttgttcgatcaagctcaatgtctgtctcattacgcacacaagaattttttaccaatgtatgatcgttagggtttggtattcttccttttttctatgggaggctgaagatgtagtgatgtagatattactgatggtgatttaataaactatttaaatgcagaacaataaactgaaaaaatcgatggagcacatccgtgcgttagaagaaaagttacagaatgcgtttaatgaaaatgctaaactcaaggtgaaacagaaagaagatgagaagctgtggaatggcttagaatctaaattttcttctacgaaagcactgtgcgatcaactctctgaaactttaaagcaattagccagtcaagtccatgatggtacatacaatatatttggagctctgtttttcctattctgtttttattacgagtttaatgttattgaaagaaaaagaatgctaattgtagtttccttcttttaatagctgagaaagataaggagttatttgaaggcaaactgtctgcaaatgcaaatgttcttgatgatttgaatcagctaatgaatggtctgtctttaaaattagatactgcagaggaaactattaaaaaacgtgagttttcttgctccctctatcttgcaaaagttattggatgtcaaatacacatggatgatgcattgtatcgtgtatagctgctgcttacaatactaaatttgattactgatccatttataaataacaagagactgcagatttcgactactaaaatatattcgatactataatctgcgaatactaatggcaggtgaaaaggagtttgaagatctaaaaattgagaaagaagaaatggataagttttacagagatgaacaatgcagaacgactaatctcatagatgaaaaaggtacaattctatcatggttgagatttcttttagaaaagcaacaaaaagacgaaaaataagtttttgagatttcagacatagtttctatctggatgcaacttaacttaattgttgtttgtgtggttactctttttacaatgcaaggtaggcaaaatttcagtggatagttatggtcacatttcttatcatggaacttttattag

SEQ ID NO: 306794 - DNA, 2137 bp, Cannabis indica
aaaaatgaattcgccataaatacctgtgagtttgaaagaatagattctgaggcgcccatgagtgaaaacaacaccgttttttcggtgcgattctatttgcaatcttgggttgttgccaacagattaaagaaggaaaaaagtgatttaataacaaagtcaaaacatacaaagttgatacataacaaaaccaaatctatgttttgggcactaaacttgacagaggacacagagaacagaacaaggccgtcctatgttttgggtgttccaatgatttctactgtcaatcagactgaaaatcattagccatcacatataacaatgctgtttatctattttaaacatttctaataagatacataaaaattattagcaattatttggatgaatcttcataccacattcatactgctcaaatctaaaatcataaaagatcccaaattcagagataaaaacctagcaaaattgaaagaaaaaaatttccattctgcttgaccccataatgaatcaaaactttatagacaaaactcaaattctctattaagacaatggattgcttagaaatttctctaataaacaagccaaaagccaattatcaacaacaaacagtacatatcagaaaaacactgaatcagtaaattgggttaatttcttccaaaatacaataatttaaagccctgaactgcatgcaacccttgaacaaaagaatttaaacatatatacataaatacatatttgataaatatgaaagaaatagaaaagtgaaaggtctagtacaaattcaaatgaatcaatcacagaccaccaaaataaacaagccattgaaaggaagtgtacaaaaaaagaaagcatttttcagatagaaaataaatccaaccaccttaataaaccatcaaaattacataaaattgaaggaaaacccagtacagttccaagtgcaaagagagacccaaaatgcaaacgatgaagacccatcaagggaaaacgcccattgcagaccttaaaagatgaaaattgaaaagaaaagagaaaacccaaaagaagtttacctgttaatttgaaagaagagaagcttgagcgttgagggagaaaggcaccattaaaatcaatggctttagaagaaagaaaggacttcatagatatattagtttgataaattaattagaagaattatttgcttatttttgatagaaacgatatcgtattggtccattgattatgtcgtttatatgtttatttattgtcgtttttcttttgcttatgtttaattaaatactttttttaactgctaaacatctctaatgatagtattttagagaatatttgatgagataaaaaacttagagcatctctaatggttaaattttagaggatatttggtgatgtggatatattattatgcgacaaaatattgaaatgttataccattggagagaaaatgatgtcattcttaaaattcatgctattcattttttttaataaaaaattgaagctaaaatgttattgtagctaaaaattaggatacatataaataataatgtgtgagatcataattataatatttttaaagagtgttaaggggtgtgcataaatcgatccaatccaatgagaaccgaccgatccaattacaaccgaccgccaaacattggatatccaattgtgatcggatcggattggatgttatttttaaatatccaattggatcggatcggatggtggatggggtgtctaaaaatccaatacatccaacatccaatcgaactaattagtattttcatttagtttggatgagtaattagattttatattgttatacgtcaaatctatatgtatatatgaaaattaacattaaagttttactcttttttcttggattggatggatccagtccaatccaatacatactggatctaaaatattggatggatccgatccgatccaaaaaatactaggtctaaaatattggataaacccaaattaaacaaataaatatatatgaaatacatccaatggatagaaccgatccaatccaacatccaacaacatccaatggatgttggatcgattggatgactgaaattaattagatcggatcggatggtaaaatctaacattcaatatatgattggatcggatctgg

SEQ ID NO: 306795 - DNA, 733 bp, Cannabis indica
tttttttttaaaaaaagttaatataaaaatatatccatgcttcaggttaaatacataatgacataaggtaatacaagtgaaaattttaaaaatctaaaaagattatctattacaagtcctctataaacgataaactcaagttcctaagtttgtacgaaaatgatcttccacttctacttagtctcctctcactccgctggtgggtagcctaactaaaattaaaagtctcatgaaagggagaaaataaacaatgagctaaaattaagctcagttggagtccaacctttttattttgaataaacttttaaacatgcataatttcgataataaaaactaatatttctcaatgtgcatttgtaatattactttatcaatattttttttttttttttgcatgaactcatcataaaactaagataacaaactcacacaatagaaaatccaaactttgaacccatcagatagtcataactctatgtccaaataataagaccacgaataagtagacattgttattacaaggggaaaatagggaagagaaactccattttattatatatatcttgaatgtgttttacaaagagaattacaacatatatataggctcaacttaatatgtacaaccgaatttaagtataatagaaataactgaacctaactgaattaactaatcctaacagccccttcaagttggagtgtagaaatcttttacacctaacttggatacaatttc

SEQ ID NO: 306796 - DNA, 999 bp, Cannabis indica
aaaacagtacataggtttgattattgcttatgtctaatcagagaaatgagaatggtaagaaagtattcaagtaatatcaaagcgctctccttatttaagtagacaataagacttaattcaaaccacgtcaatgaacaagaaacaaagaaattcaagtacgcacaaagcatttacaaaattgagagaaatatggtggaaacttaaccctttgaaaagaataaattaagtaaaaagttcgccttttctaactccctccccgacatagttttgtaatgttatcgtttttgtgatattatatagttttgttatcaaatataaacaattaagcagtaataatagtaagtattgtagctaagatatttataaacacaatgatatagttgaaggcataaattctataccagcaattgttgctgagcaacgactaactgggcggatccggaaaatagcttgaggttgatagactattgagagtaccttctccacagaaactgaaatccaatatcaaataaatttaaaacaacaatcttttagagctagcatgcacacaataaataactaaatacaagagtcataatgatgaggaacctttgtgcttctccaaatatgttccaagcggcacaagaagctcttgatcagatatataaaatgcataaggtaacttctcctcctggagaaaccacaattggacattcatttttcttaaacattgcaatattactgcaacattgatacagcagtggcatgaagtatcccacaaagttatcattgaaattgcttataaaactcattttttctttcaggtactacaacagttgggtctggttagaggtaccttccattttgaaccttgccaaaactatcatggcccaatcatgtataggccgtaccaagacctctttttcaaatttgataaattttgatatttcattatagttctacgatccacagcatcatttcttatttgatccctttgaattacatattcgaagttgcgat

SEQ ID NO: 306797 - DNA, 950 bp, Cannabis indica
atagaacatagaaaccctagaaatatccacaaacatgtctacttagttgtacaaaatttttctaaaaaaaatgtcctaatttgcagcgacaaaattgcactctgtaaaggcatctcatgccaaaacagaaaattttccaaataagatcaagatcttcaatacctaccataaaaaagattatactatctgctatatacatagcaaaacaaaaattatcaactaacaaaaaggaaaatcaatttttcttaagcaaactttctatatagagaatttcttctcttatatgaaaagtttttaaaaagaaaaatacagctattaaccaaagtttcctaaaagaaaaaaggcaaccatacacacaaaaaataacacaagaaaataatatttttttctcaataaatattcacattaattaaaaaaaatattttgataattaaattatcaaaaaaaaaactagtacaaattatacatcattattggagtttaattttataaggatgtgctaaaaaatatacaaatacaccatatttataccactcaattagaagtaggcttaagtcaccaattaaattaaaaattacatcaaacaaatgatatattattaagcccccatttaaataataaatttactaaaaattataattaatttttgtttgatttggggaattataaattttattattcttaatgataattgtatattgattaagcttaatgtaaaaatattataatttgaagagtaatttgcggcataacctctttaagtgctcaggttttggtaactaacccccaattctaaaattttggtagtaaaacctcacaaacttaagttctgttagcacttatccctgtccattcatttttgagtgttaagtgacaggttaatatgtctatgtgtacactgtgtacatgtggcacagtttaattagtccacgtaataaatatttaaaatt

SEQ ID NO: 306798 - DNA, 3966 bp, Cannabis indica
aaataaactgcttctgatttagagatctagggagcaagacttagttgatagtatttcactatcaaattgaagtaactactgtggatcaaatagagataattgttatggatcaatcaggtacacatacctaattattatatattactattgtaatctatgttatatacaaatagatcatgggtatattattaatttttctaacataatattgcacaatattagtttagggaaccaatttcccctcatttatgcataattagtcaaatttcccttattttattcaaaaaaaaatactattaactcttgttaacattaatatagcccacgaaactatgtctcgacttattaaataattttatcgctaagaagagttgagctcaaattaaaattacttttatttcattcatcaacgaaattttcatgaagttgtctaggaaatagtgttgtacattcgtgcgtgttgtgctggtctgactcatatatattttttttatattttattttaaagtatgagtcatgtcgtgtcctgccctaaaaaaaatatagatcgtgtcgtaccttgctaacatttttaaaggatagggcgatattttttgtgccgtgctcgaattcattttgtgctttgctgaattcatactttatttttccatattattttttacaattaataaattaattactcaactatatgtatattttataatttcaattatatttatgtaattttttaataatattttatagacagccatataaaaaaataatttaaattattagaatttgagtatttttttacaagtacttaaatttttttatcaaaattaataaataaattaattatataattgtcaataattataattataaataagtttaattattatttattaattaagaaatacatattattatatctattaaattataggcatttgtaatgttttttattgtgatttttgaacttatcgtgtgcctttcagattagtttaattatatatgttgtgtaatttaatctacatttttatatggtgtcctgttaatttataatatcatgccatattatagccaaatccatgttttttcgtggccgcttgtgccgtatcaaaaagcaaagtttgactcataattataggtaagaaaagcctctggagccaattgggttgtacagcatatttgaaaattatttcctcgaactttaactactgaacaagctagccaagccgtcggcttcaccttagccgactcacgccgagttaattttgccggtagggcacatgccttcatggtttagcatggccccacgtgtaagccaatttgggtgtaaagtcaaaatagggttcggatgatcccgtcatctctttttttatgatttcttttgtcaaaaagcaactctcttatttttactaaatcggaaaaataaaaactcttattttattttatttatgactccctctcccctggtatagcctctataattcaggatgacaaccgaggagtgagtgaagagatattaacaactatacattaaaacaaaaatatacattaaagaaaatgcaatttgagacattttgacattatgatatgatatttatttcgttttttttttttgaaagaaatgcataatttattaagaaaaaatgattgttaaagaagaacttaaaaatcgagagcaaatatctttgcaaacacaatttcttaatacaggttgtcagtatatagacaatactgttcgttgatcgtagtatgcaataactactaccaagagtaataaagaataaatatctaataaaatgaactaaaaataaaaattaatataaaacttattaatctaatcaattaccacaatacaattactaataataatttgggaatttttacattatgatatgatattatcaggtcaaagaagtcaatttttgaggttgagattagtttgcatgagagtggagaccaaagctatgaattgaccatattgtttacgcaacccagacgaaagaaaatgcgtcatatacttattaataattttttatgtttattaaaaatagaaaagaattattattattgttttttatgtttatttgtttcttgtgggggcaaaatctaaaagcagttcttggattaaaaatgggatcgttggtaccaactcattgactcataaataaatgagtatgattataaatatcaagtgtacaacaagtacaagagtacatgtgtacatatagatcacgggcgtgtttggtatcagatttatagccaaactcacgttttgtttccctttctgttaaattgttgtggtgtagcgaaattaattgtgttttcaaatgaaattgacagagaggatgagggagtatctaatctaccagaagaagagaagaaggaaaaaggaaaagcaaaatcatcacgggcttccaaacaagtcataaaggagaggagacaagaagacataaattgaattttcaatcaattaatgccacaaaaattatttagtttattcttaaaaatatttatgtatcactaataatatgaggcctatatctccttgtgatcatgaaattactacgaactttctattactccttatattcactgctacaaaaatcaatttcgctctcagttatagtaataccggctaattacaaaaaccaacacctaaagtcaacctaattattaagtgtcggattataacggataggaaagagtattcaatggtgttgattagtagactgacactaaacaaaaaattgagactaagcttaagtacaagtgaagttatagttgaaaaagtttaactgaaaaaaaaaaacttttatttcattactaaaaaaatctatcaacatttcaagcaaatattatgatgataatttatatatgttcattcagaagaaaaaaacatatttatattttacatatttatattatataaataaaattaatggaatagctagttgattatgcaatgtataattaacaaagaaaatatagaattaagtatataaattgatataatcgtatttgactaatttttttttacctttgtattgcatactttatgtttgtcaataattttatttattcaattgaaaaagagaataacaatttcttaaacttaaaaagttctttctttcttaaaaaaaacaaaattgaaactcgaaacttgaaaatttgccaattggtggatataatttataattaaattatattgtagtgtgcacactactacaaaaagtacaattctcgtcagattaagtgtcatttaaataatttgggttggtttaaaaaatcaacgtatatactatagtcacaaataattttttattagcgtcgttgttcaaattaatgacgcaaaacataattatcttcatttaaaaacggtcacaaaatatatatttttttttttaatcttttgcgtcaatttgaaaatgagctatagctatattattatatcaatataaaagataagctacccaaaatccattagccaaagcatttaagaaaaataaataataataataatagttttataaatgtcaatacaatatgatcatagcaaagttattaatatatataaatatatatacaagagcttatcattcaaaatatacaagtctaaccttcgtaagtttgattcacaaatgaatagctttcatagttttaaccttcataactcttaatatcatctaaattaacattacttctattctccatcatcttttctgtaaaattgttgcctcaagttttataatcaattttctacaatcaagaaaatttattggtataagttaacacacaactcaaaaatttaaatacaaaatcacctcaaatatttgaaaaatatttccatgaacaagttcctaaaaatatataaaagagagagagagagagagagaaattaaatattttttttttactaattccttagcctttatgcctaattatgaaaaatgaaatttttatctagcaacaaaa

SEQ ID NO: 306799 - DNA, 3134 bp, Cannabis indica
tatcaagtactgaagaaaacaaagtaagctaatttgcaatagtataacaatattattagcagtaacaatataaagatgatcttcattagtaacttactggaacatggcaaaattgagagagtttatccttggtagtttccagtagaggctgcattttggtccccaggaagaaatttttattctcagcataagaaagttgcataaaaaacataaaatgcatgaagacacccaaacatataaatttcaaacagtacttcaagctctatatagtaagaacatacaacctggtagtatggcacagtcagtaatactatattgacatagaggatactttgccacatgtttatgtaaatagctcaaatttcttagcaaggtatatgaggatttacacaatctacatgactaaagttgccctaatttgttttcacatttaatggtcagtgggtccgaagtaggtgaagacatacctgagaagagcgggatgctaacaaatgaggagtcaagcctaatgctctgagttcccgaacactgtgttgcgtaggcttcgttttctgcacaaaaacagattattttcaccagaaaaaataaaataaacataaggaaaaaaaacaaaaaaaaacccaagaaatacaatctagaactcaagcattgtaaatctactcactttgatcaataaataaaagtaatactaaaattcaatagtagacctcaaatctaatataaaacttagcgttcttacttgctctccaacaacacccaatactggtatgaggctcacatgaatgagacagaagttatcctggcctggtaagacaattattcccaacagaacagcaattacaaaaatattcaagcgaaggaaaaacaaatgtaaggatatggagaaaaaatgacaagaataataattcattactctcaatttccatatgcaaatcgaatgcgcatatcatagcatcagtaaaatgaacaagttttaaacaagtagtagaatggcaaatactagttatcccacaatatgcaaaaaaaaaaaaaaaaaaaaaaaaaactcaaacaactagaagcaactttccctgaaaaaaaaaaaagaaaaagacatatttttgtggtcttaccaacagaaaaggacagctgacgcagagcctcaatgaagggcattgactcaatgtcacctaagaaatggaataataaagagaaatttttttactagtaaaagaaaacattaagaaatgcataaattagaaaacaaagataaaatatcaaacgtgtaagtgttacctagtacttacccacggtccctcccaattctataacacaaacatctgctggtccctctttcccatctactggaataacagcaacggattctatccaatccttaatggcatcagtgatgtgtggaacaacctagaattcagccaaacataagaggatcccatacattttactttttctaagcaagcaaacaaggaaacatgaatccagtgaatgagtatcctaacctgaacagtcttcccaagataatcgcccctacgttccttctccaagacagactgctcataaacagagatatgtgatggttacttgaagcaaattcaaagtgaggtcaagtcaagagcatacatcttcattgataaagtataagataccttgtatattttcccagtggtaatgttgttatctcttgttagtgtcacatctaggaaacgttcatagtttcccaagtctaaatcaacctgtcaaaacattaccccaagtactcaaaattaacccacatctcacatcgttgcaaaagggtagctctcaatttcatttgcaagcaaaaacaagtactgatatacctctccaccatcatcaagaacaaacacctccccatgttcaaacggagacatggtaccagcgtccgtgttcaagtaaggatctgcagatggttcaaagaaaattcccaccattaaaatcacaaaattacagttcagagatgatgccttactcccgaaatgatcacggtcacactatctagtatgcaagtaccaaaatgcaaacattctaagagaacccgagtctagaaattcaaacaattttcatccctttccttgaggagggaaaaaaaaaacagaaaagtaaaaactttgcataaaagctcaaatattttcctccgtttgttccttgaataacagtgaatatagaaatccaataaaagaccacaattaacaattaacagcagatacccatattaccaaaaggtataatataatcaaaccaaacatggaacgggaaagctaagaaagcgaaaacaaaaaaaaaacaagtagcaaggcaaagcaaagaaccaattttgatggaagtgacacgaaggccgcaggccttgaggaggacgcctatgctgctggcagtaacgcctttgccgaggccactgaccacgccaccggtgaccaagacatacttcattgattcccaggaccgaatgtagccaaagcgtttgtgtaaatgcccgaatgagcagcaaacgtcctataaacacaaaattcgtgtcccgtaaacaatcatacgaattagaaagtaagagagagacgtgacagctctcaatgcgacacaagggcaaaggggttgtattgttattataattttgtttggtgatattaaaattttttttatataaagttttcggatataaagtacaagtttttttagtttcgcaaggagtattcatctgatgaatttataagaaaaaaaggttatcaaatttagtaaaataatagatgagaaaaaaagagaacataaattagaagttagaacccaagactcataagttatttcgctaccaaaaaaaaaagaacaaaacaaaatatattggaggtgcttctgtgggggtcatgggattgagggccagtttggcacagctgtgctgtggggaaaagcagctgtagctgtgctgtgggaaaaagcagctgtagcagaactgtggaaaaaaactgagctgagtgtttggtaaattataattttttaaagtgctgtgagttgttaagattctattacaataatgataatattttaatctagttcattataattacaaatatatataaaaaaatatgttatataaattttttatttttttatatattttttaatatttt

SEQ ID NO: 306800 - DNA, 1630 bp, Cannabis indica
gtttgacaatttttgatattacactattgagtagtttaatttgtaactgatgatgttgaatattaagaaaatagtatatatatatatatattattttttttcaaaattttgattatttgtttatgatttttaacataaacacagagattacagatactaagaacagggaatctagttctagttgatggcttgaacaatataaagtggcaaagtttcaattttccaactgatgttatgctttggggacagagacttaatgttgcaactaggttaacttctttcccaagcaactcaacttcattttactctttggaaattaagaacaacaagattggactatatctaaattctggtgactcaagctactcatattgggaattcaagccttccatgaatagaaacttaactttcatggcattgagttcaaaggggttagagttgttcaatgatcaaggtaagaaaatcgctcaaattaggtctcgaaaatatgatcctcccttaagatttttggcattgggaaacaaaacaggtaacttaggtctttatttttactctccaagcaaagctcaatttgaggcctcttttcaagccctaaataccacttgtgatcttcctttggcttgcaagccttatggaatttgcacattttcgaatgcttgctcttgcattcggcttttgaaggaggaggaagaagaaggggttggctcgggttgtggtgagggatttcgaggagggttttgtggtggtggtgttggtgggaaaaatgaggttgatatggttgaattagaggatgttaagagtgtgttaagagattatgatcatgattatagaagaggtaataatgttagtaaaacacaatgccttgagatgtgtttggatgattgtaaatgtgttggtgcatcttttaactcacaagcttgttttttgttacaaattggtaggaggacttaaacaagtggatagagggagtggaatgagttttttggttaaagttcctaagggaagcactacaagtggtactcatggaaaatccaatgtaaaaaagtgggttgtgattttggttggtgttgttgatgggatgattattttgcttgtttttggaggtgttgcttattatttgattagaaagaaaaggaatagccatggtgacactcctcacaattgataacaatatgagatttcatttttttgaaatataaaccattttcttccttttttgtaaaaatatacaacttttttttttgttttacattaatacctgagtttgtgtatttagattggttgttggcttcattagtttgtttcaattgcaaatatacagataacttgtgttgctgctcattttttagatttttttttcgagtttcatcttctttttagaaaaaggtgaacattttttttttccactttgaaatagagcattgctattaggcaccagtggtgcctagtaccttatcgacatgtcacgttgcgattggctagcgatactccctaaaaactattatattaaattatatgagacccgatcagggccggcccaagcattgggcagcttgggccattgcacaaggcccccatttttttaaggcctaattttattttatttttattttatttttttttttttaag

SEQ ID NO: 306801 - DNA, 2676 bp, Cannabis indica
aaaaaaaaaaaaaagcttatctagtatacattaaataaaaaaataaaataaaaccttatctagtatagtcttcttgtctttattttttctttattttttctttttaatttttttaaaataataataattaatatgggtggtgtggtgttaagccttcacgcctattttaaggaatctatttaaattagaattgaagaggaatcttacctgtgtttttcgagtggaattgatagtttacttgtatgagaattttatcaaatttcataaccataaaataaaaacattagaaaatatgtatctattatattctacttacctcaaacaatgtagaattgatttatattaacaccaaataaatttgaggacacaaatttaaaagggtagaaaattagtatatattgtatcaactatcaattttagctaccaaacaaggtaaaaaaattaatagtaattacaaatataatttagtgatttcacactttaataaaagattaaatcatccttcaatatcaaaaaaaaaagaaaaacaaaggtataaaattagtagggacatcgcctaaccaggattacaaattagaaactctaataaattaatgaattactatattaactaatcatttaacaaaaaagaaaaaaactaaaaatatttctcaaattaagaagcgaatttttacattattaaaaataataaattaagacaaaataacataatgaaatatctaaatttgatcaaaaaaaatactaatattggtagctatgtagtgttggctatctttcaaaatcaattttgttttgctttttaattatgaataatgagtttttctaaagacgagagttcagctcattgtttactacttgccaagacaaaaatagagagggaggccggagctgatgtgccaactgaaggtgagaggtgcacagagatagaagacgaagaaggagactgagtctttgaattttcaatttagggatttagggttaagaatttgattttttttttaaagttaatacattagcggatcgggtcatccccgacccgaaataaatctaaccggggcggggcggggcggggcaaagacccgaatattgatccgattgtaacggggcggcactgccccatcgggtcggggctccgacccgatccgcgaaaaaaccccaatttgccattccaacttggagagttgtggatagaatagagtttgctgacttattttatttgtaataattagttttgaataatatttaataatttgtaaacaataatatttaatacttaaaattaaacacaagtttctaaattttattttaagtataaagttccacattgtagcatacacaactatgattaagttccacattgtttagagaataaaatcttctaatttcattctatctataagcttatctcaaacagtaacttaacataagataatgtaaactttttaaaaatgttaatattaaaattaataaacagaatttgaatattaaaattgggaatggaaaaaatcttgataaatacagacttttcaccacttttcttcaaaccgacaccaaaagtatattttgtattaatgggaaaacaagattaagaaaactaatcgttaaaaattacaaagtttcagctcaaggataagagagtttgtcattttctttaaactaactgttggattcaactagtttgaattagaagagggagagagccaatattagaaagtttgagttcatgagaagagagatcaaggaaggagccactattagaaagaggttttcagttcaagtttcaattgtttggtgttaccgtgtgttaggaaaagaagaacagcctaggtgtctaaagcaagattagaaaaaaattataatattacaaaaaaataaaaaatatattatataaaaataaattatgcagtgaggatcaccaaatattcaagatttagaaattgaactattattaaaattgataaaaagcgaatttgtacgcaaactattttaaatttttattgcaattgtatagcacacacttaaaaaaaatatacttaataataacattttaatcataacataaaattcgctattatcatatacaatcaatctttggccaagaatctgtatggttgttaattttattaatattattctatagatatttatcataaaatttctattaaaatattaatttcaaagtttactacaattatctataagtgagaatgcttatttagaccttttaatatcaaattataaaaatctttaatttttcttaaattaccataaaatccttctatcatttaatcataaaaacactcacattctttttttcaaatcattattcatatattatttttgtatattaaataaaaataattttgtcatcatattagagaattattataaaataggataaattaatttttttattgattaaatactttctacaattatttatttaaaaaaacaaattataatgtccgaatgcttagaaataacatttgttttggacccaaaataagattttttttttttccaaattatctccattaaaaaagctttaaaaaagcttagaaactggatgacttttaatagcatcatccaggggcgaacccacattgtagcgagagggggcagtcgtccccctgaaaaaaagaaaatcggaaaaaaaatgtatatgtattttaatta

SEQ ID NO: 306802 - DNA, 4887 bp, Cannabis indica
aaaaataaaaaataaaaaatgaccggtttggcaggtgggttcgggttcaacccgaaacccgatgaccataaaaaaccaacccgcgaacctgcccaaaagtgtaacaggttgaactcaacctgcctgaataaaacagattttttttttaatttttcgggctcactagatcgggtccgagcgcgttggccaggtccgggtcaaacccaatcaatatgttcaaccctactaaaaccaagtcctatctcaatttggacaatattaaaaatatttatgaaaatattgtcatctatcatataaattatgtattactataccacgagtatgtacaccaacatgtttcactacttgaccactttgtggacatcacatgtattgtatcgtgtcatcttgaccgacacgttacacctagcactacttagagatatcatatcgttattagtgtaattaaatattaagttatataatttattttaataactattataaaatattactaactatttagaagacattaaatatttatgctaatattatgagcgttgttattggacattaatagtgcctagtaacttttagacgtgtcgtcttgtattatatgagatttgataattaattaaactaattacaatattaataagtaagagagagtttttagcatttccctaacattacttatgcttatttattggctagtttggtcttgtagtgcatacagaatgtaattcatgttaaccacgctggagttaacttaacggccgagaacaggattaaggaatgataagtccacgcgccgttacagtgattgatattgactctccagcgacatgtggagttgtggatgaaagtggggactaaggctgggactgttgatctttttgatctgtgactgcgagacacatgaggctggaagtacagcacgtgatttagattattagataagagagtcatgtgagttttgtaagggcgtatttggttctgccttgtgtaaccttttccttgttgttatatcttcgaaagttaagttcttaaaattttattaaaattatttgtcccaatttgttacaaatattaaacaaatgagataaccccattaaagaatgggaaacaaatgagagcgggaaccaaaagaataagccggcttgaactgcaaatacgatccaagtgtcatcaaatatttggtgttgaaaagtgttaaattttattcgtgttataattagtgtatagacaagtggttgaacatcatttatttatatttatttatttgatttgaaaggaccgaacaccaccattgctcaattaataataacaacggaagcatgattaatcacaattcacaagtacattatcaatattgagacttattataagcaggacaattgtattgttttattttcagtattttccgaagatgtaccactttgatttgacaattgtttttattttctttcgccttttggtgacctaatcaagcaaattaaggcaattttatctctcatccttggagcctatgttacccatgtcaatcgatctgcaaattcgttcgcgcacaatctggtagcctgggctaaagggttagatgaagtagcaatctagattggtgatgacccttgtgattatgggatttcttttcttcttaatgggcacctttccctaaaaaaaaaatatttatcatatttaagcactccattatttaaataattctcaccattattcatttaatgaaccttaaataacagtatagtactattcctaacaaaagcaacactacatttgttacaaagtaaaaataattatgtaaacatatattacaatagtaaccttatacttgtaattacattctattctattctttattgagaataattgtgtaattactagtgtaactacacaacataatgattacactaaattaaaatataaggtaggtttagatatgagattgtaaaacacttatgaatttctgatgttttatttagaaaaatagtttataattatacaaaaatatttgtaggtaacttggagaatatttttgtaatttctttgggagcttcaaaattaacattaaagtgtgagacatgacttgataaagcattgaattagcttcaaaatacaagttgaatcgcgtcaattggataataatgagttagttatggctattttattgaaggtagttcatgatccaacgcccaagttgacatcgagcgtccatgttgatgtcccgacacctaggttgacatatgacgtcaatctggacgctgggtaagtgtaaaaatattcaagggaagtactttaagatgcataagtgatattttgacatcacttagcctgtttctgttttttggtgaagctggtcacgagttctcgaagatgttgttctacgaaaatgtgagactcataactcttcatttttgagtgagtttcttatgttggaaatgggaaatgcaaagttgtgatttttacttttctgacttcatggatcttagttattatgaaaaactagacggacggtcaaaatagaattagaattggataagcagaacccagcgcaccaggccatttgtcaacctaggcgttgggtaccctatttgtgatctcccgagatcttgttttgatacttctaaggtttctaaacttaaggaccagttctcttaccctatttttgatcatttcaaattcactggtcgaatcaaatttagtatttgagcaattgaaggtagtgtctcaagctaattgtcaacctggcgaccgtcccctatttctaggggctcgggtttgtggttttctccctaagtttgcttaaatcttcattattttttatgaagatttgctatttctatcaattttctagttcgtttattatattatattcatgtctaatcaaaatatgtgtgccacagggcttctgtggtttattgagtatagtctagagttcaaagagtttgaactacatacataaaaaaatgcatggaacacttttttctgaacttgatcagaaacaacccaggttgaaaatatgtcaacctgcaagctaggtcccatttctagcccttcagaaattttgtttggtccccaaaaatagttgaatctcaatattttctgaaaatagagaagatgctcggaagatttcttgaaaaacatcatcgaaaatggcccatcgttgggcctcatctttggcacccataaagtgttgcttcttccacaaaaggacctatttccatatttttgatgaagaagaagaagatgcaaaagttggatctctgatatgatacatggaaggcacccatattgacagattgtcaatatgggcgctgggtgctcaatcattgattgagccactgtcatgttagaaatttgtacttcaatgaccaaggggtcgttgtgcgggtaaaggccatggttagcatcatcttcactaaattagatgatagcctcttctttgtgcaactactttggctttctctctttcacaaccaatacttcatcatccctttgatcatattagagtattcgagcatacctttctctggctttgctcgaatctcaatgaatatgtccacccccaataatcatttgtaaatgtccgtccgctggtgggggcataagatgattttaattgttatttggttgggcagcttgttggttctggctagtcttaatataccggcgaatatgttgattatttttttctgataaggaactcaatttcctccttcagattgttgtactcgttggtatcatgaccaaaatctttgtgaaattgataggatttggaagtttccctcttgctcatatcttttttgatcgaagggggtctcttatatggagcaactgattgagttgccgtaaaatgatttttgagcatcaggaatacagtgaaggcaatgaactttcataccttctttcgagtatttttgattgaagttattattgaactttccatttttcccacgatcatggttctttttcattgttcgacctattaccaccatggtcagaattattgccagcttaaggttggaaagtttgacctttctggacgaatgtattggttgcagttgtaggacttggatcggtcttattttgaccaaccgtatccactcatcagaatgcttcctcaagcttgataaatatgcatgctcagtccaagaactctcccattgcctacagtgagccttttaatgtctttccacaattcaccttttggatcgatacctcctagcacagctactaatctcccttcttcaataaatccctttactttagttgcctcagtcataaattgatggatgtaatctttcaaaggctcccctggtatttgctttacttttaccagatgttctaagtgggtagggagttgtcttgaagaaaagcattgtgcatagaactttgtggcaaagggattccacgaattaaatttcgttggtgctaacttgaagtatcactgttgggcggcctctgccaaggtagctaaaaaaattgtacatcttacatcgccttttactccttccaagtccaattatatcttaaactacttgatatgagataatgaatcctctttccccatgtacatcttccaagtgggcaacttaaacttggtcggaagatcaagggaattgatccgtgcataaaatggtgaacctcttgtctaatcgagctctaggtcaatgagttttgggccggttagaaattgaatgaggctcttaagctgatccaactatgcttgccaccctggatcaacttaacatgcctgttgattggcctatgtcacctattgaccccctagaactgttggaaatattttaccaggatctagatttgctaccaagtatgtttgattaacatcctaatatgaattctaaaacaatgaaataaacacataagagttta

SEQ ID NO: 306803 - DNA, 1512 bp, Cannabis indica
aggaccaaagatgtgccatgtttagagttgggccactaaccaattttagcaaacgagtcatccacacgtagagtggtactagggttgctcttggaacgaggttgcctttgagccgccctactaccactggtactgctactagtgaacaaattctagaatacgggtctcgtgttaactaggaaaacaaaagagaccttaactctgaggttgaacaattgaaagagattgttgctcaaatacagtgttaacttgctggaatgaaagatgctatccagcaagccctcctgcaacagcacgaggagttcgagggatggttcgttgaacacttgaaggcccttgaaacttgcatggctgaaagcgaaggtaaaagggcacacatttctcaggaaattagagatgcatcacatcaaagcaatgtgggtgcaccactcgatgaccctcaaaaaccttgatcctcataagagatgcagggggatttatttaataattatgatgggtcatatattcaaaacagatggtatgcttctaaaaatcatcaagactcgtgtggactaagagattccattccacctcgtagtgattgaggcaataaacatcaactgtctattgaagcagggtagtcagttgtggaccctcaaacggtcacacgagcgcaactagatagcctactcaagatggtgaaagaccatgttgcttgtggaggtttcgaagacatgagtctcgatagacacaaaatctttccacttttgaaaagggtcatggcattagtcattccactgaaattcaagatgccaaaatgagatatgtacactcgtaagggaaaccctttctctcatatccaaaattttgaagtacagacagacctacaaggtatcctagatgattctcagggccagatctttccagccacgttattagaaacaacacagcagtggtatcttaagctctccttgggatctattgattcttgggaggcatttgaaagaggattctatgaccaattctcgccatcttaccaaagaccaatcgagcctaatgatttgatagacattaagacgcaaatgttgagattttatgtcctaaataaaatccatctcaatataattttatttactaattaataaaagaaaaatcattctatgttgtttggttcacatattactttcatgattatatgtttgatatataattctattaaatcccaaatatattgttactcatgattataatattgtcaaaatagtgaaaactaatcatgattattgcttcaaactatttagtcccacgatttatcagtgttcaagatttacattgatatgataatcaacgatgtggtttacttatacttgtataagtggaatgttctttccaggacattaccaaagtaaacttgtatcagatgtatcagctatatatcagattgtaccgatattgacagtggaaaaaatattataaacttaccgttatgtcttttctaagtcaatgtaaattagttgatcttaggtcaattaa

SEQ ID NO: 306804 - DNA, 1728 bp, Cannabis indica
agtctaaatacttgaaagtcgttggagatgcatctaaattaaccccactccctattttagctttagctaattaaaaagtaggtagatagtcgaattgagatgctcagacaagacaaccctcgcaaccaaatttcacaagaaaatgatacaaagcagaaaacttcctcatgtaatttggaaagttgatatttcactaaaaaactttctcatgtaatttgcaaagttgatatttcattaacccagaaaacgcgaaagtttagaaagaggtaacaaagtaaatcagtacctgggatagtaggtggagaaccctgcggcccataaccaagtttagctggtattctcaactttcgcttttcaccaacacacattcccaacagtccttggtcccatcctacaaagaagaaaagcatgaatacattgattcattcatttaatgctcattcatgacagatcaaaaaaacaagttaacattaatacgttattactgcagcacacacctttgatcacttggccagagccaagttcaaattgaattggatcatttctgtcgaaacttgaatcaaaaacagttccatcagtgagtgtcccctacaaatgcaataataatataatcataatgaataacacttgttcataatgggattcgaaacaagtttgaaaacggcgaaaactactggtatcaatatctgcatctaagcaaaagagctatttcacttaccttgtagtgtactctgatttgatcacctttgtgagcttgaatttcgcaagattctggtttatactgcacaaagaaagcaaaattaagtatggtggtaaaatgggaagacactatactctcttctaaaaaaattactacatttttaaagacaatgtagtaaaaactgaatggagacattttattacacaatcaagccaaatgtacccaaaacataattaacaaaaaaaacttaacttgttaatccgaacgtcactcaataaaaaccacaaattgcagcaaattaagaatcaccaaagtaattacgtacatatctaagaaaaatcaaacaaaaccataatatcccctatcacactttaatctcgctaaactgagatcggaagtgttccaaaagaatcgcctatactacatccgaataccgcaacaagaaatgagcaaaaataaatataataaacaaattaacgatattttaccttcactccaatctgcaactcggtgacatcgcgagaagtttttcctgaaactgagaaaagaaaaaaaaaatgtaatcagattaacgaaattaaacctacagaaggaaaggatcatcgaaccgaaaatcatcattgcaggcctggtttcagatctaaatatgaaaatacaaagataaaataagaaatcattgaaaagaaagttgtggatcttagaagagagatgatacctaatgtagagagaaggaagaagaagaagagaacaggcgtgagcttgagtgcagtgatggaggtcatcttcttcttggccaatttctctgtaactgcttcagtctgggtttcgctcaaaggcaggagaatggagtatttatattgggtgtgtgtgaatagtattattaactattgacttgttctcatgctctgctctcattggttctccaacgtcacatttaagcttacgtggcacttaccctatattttaacagcattcctaataattttttttaacaatgaagaaactttcattaaaaaaaatggaaaatc

SEQ ID NO: 306805 - DNA, 1370 bp, Cannabis indica
taagggaagcggtggtggagagtagctgttatgttcggagatcagaggtaactgatccgaagacgagtcgtaaagtaagaggacacagaaaaggctagggttttggacgtggaaaagtaaatcgatttggggattacaaagatcaagaatttggaagaaagggtgggtggatgaagatataaacctaatcttcttctaaacaatgaagaatgaaagaaagaaagaagtgataagtgcacacgtgttctatactcttcaattattatgttttttttcttgatgagatgatctggaccgttgattcccgttcgacattcagtgattttcttttacgaacactcttcagtgatttttctttttttttttttgaaatagatcaactttttctctgttttttttttttttgaaaaaaataaccaaatagatacataaaaagttaattctgatttttttttgatagaaaacaaattctgaatttctagtagattctttttttagtagataatgtaaaaataaattataaaatttgtttagtagattatgtaataatacatttctgtaacttttctaggtatttaattgtaaattgttaagtaaattattaattgtattaggagttaaacataaatatttataatatatcataattttttttcaaatttaagctgtttttgagttttttttagttcctaaagagaacatttttgagttactaagcatttatgctttgagatgactcattaattaatttttcttctacattattttattattttaaaatttaatatgtaatatatttgtactacattgtttgattggttagcaaaaaatataattatattccaaattcacactaaaaaataattttagtcttcctttgtgtgcacatcctgtggctcacgccacatcactattttggcgccacgtcattgctgattggtaacaagtgtccagcggaaaatcgaaacatgactcattaatttatcaacaacatctcttctctttctctcatacaaaccatttctacactttctttgcatactttttttgattctctatctctacggaaaggagctgtacaagtaaaaactaaaaactatataattgttataattggataaatttatgtaaaaattttaaaacaaaatcatacaaatatatatatattgtgatatgatttttttcacgaaatgtattccgtggtacattagatgaatctcaagtacattaaatgagtgtcaaagtacgtttctactttttaactctaattacctctaaaatcaatctacagccgtacagatcaaatgactccctcatctgacggctgtcgtacatcacagacaatccgtgaaagtacaataacaggacaa

SEQ ID NO: 306806 - DNA, 3043 bp, Cannabis indica
aaaaaaaaaaaaaaaatattgcatcatcagcaaactacaggtgactaacttgaactttctttttttccaaccaaaaacccgaagtactttcccaagtacaccgccctgtctaccatccttccaagaacatcagctaccagagtaaacaggaaaggacaggacagagtgggtctcctcgtctaagtcctcgtgaaccttgaaactttccccttggttttccattgacgagaatcgagaaagatgttgaggagatgcatcctcgaatccatttcctctaaatctctccgaagcctttcttgtgcataaccaaatctaaaaagcaccactcaatcctgttgtatgctttctcaaaatcgattttaaagactaagccacttttgcctctacttctgcagtcttctactgtttcatttgcaaccaacaccgaatccaaaatttgccttccttcaacaaaggctgattgattttcctgtatgatctcccataaaactcctttaagtttgttagctaggacctttgcaataatcttatatacgctggtaataagactaatcggtctgtagtctctaatcctacaactgttgagtttttttttggaattagacagataaatgtctcgttgatgctacctgggatcttaccatctctttcaaaagccttgaaaacttccaatagatcttctttaattatctcccactgtgattaaaacacagccaaactgaaaccatcgggaacaggtgctttatttccctcacaaccaaaaacggcattgcgaatttcgtcttcatcaaaaggtctctctaagtgacttgacgaaaattctgagatcacttgccattcaatcccttcaatgcttgtgtcagttcttctctctgaagtatacaagctagcaaaaaaatgcacaatctcttggacaaagtcttcctcattttcaataatctagcgattttctctttggattcttgaaattgtatttttggcttttcttgcattcaacagattatgaaagtatttggagtttgcattgccctccttagccaatttgcatttagcctttaaccaaacacttcttccttcttcaaaggctaaattctgccattctttcttcgtatttcttctctcctcggctagtattgggttccacaagtttgttgtctccaatctatcaagctcacccagtcttctttccatagcaatcctcaacaaatgattgctaccaaaatttgctttgctccacactcttatttactcatgattttggtacctggccaacccagagctgctacatttttccaccacaggccaaaattcttgaagaaaagattgtgttccagccataagttatcaaagcagaaaggactcataccccattttgggggtttagagtcaatcaccactggattatgatctgagacaatccttaccaacatcttttgtctgacataaggaaacgcattgttccatgcgttggtgaaaaagaatctgtcccgtttgctacaaataggctttgatctgaatttcgaccatgtgaatctttcgttatttaacgggggatcaattaacttaagttcacggatcaactcatcaaatatcttcaggctctttgtgttcgatttactattcaatttctcttggatcctccttactacgttgaagtctcctcctaagcaccatgaatctccacatattatactcaaacccgccatctcatcccaaaagtctgatcttagcttgtatgaacatgggccatagagccctgaaaaccacaaagggtttttcccttccgctttaaccaagactgatatagaaaaatatcctaccaatgattctaacacagtgatatttctagtatcccatatgagtagtgtaccccctaatctccctatagaaggaatcaaaatccatcccttgaaacgagatctccaaatacttccaatgaatttcctgtgagtcgcctccttctttacttcctgtaaaatcaccatatatggattcaccttgcaaattgtcgcttttatggctcttctcttctctttatccccgttacctcttatattccaagttaggatcttcattcaggtatcataccacaccctccttttgtctttctgctatcataattgatgttgaacgtcaaatttttgagttcttggttattcctccaaccccttataacttttgctttctactgagtaacttcctcttcattgaagcgtaattccatacccatttctgcaagcgtctccaccatagtcgattcggctttaccgaccaaatttagtgattccacaaataggatatgcattatagttgcaaaagatctagcctaagactagtttccaaaacgactttgatctaggatttccccaaaagttaatttcagatgggttctcatcatgcctcttttctttctacattcctatatttactactctaattcatctcaaccatcactcatactacaatcacccacatacccctattatctacattctattgtttaaccagtttacccttcactctagctgccatcaatagatcatgcctgcctcaaccaaatctaggaattccagaaatcagatgcagggacagccattaaactacaaccaaacacttaagcagaagtatataattcagcaaaacaaacaatactagcaaaaaataaacagtgtcaatcatcaaccatggaaaactttgacagtcaaaggggactataagatgagcaatccagtaccccagaatcagagcttaatttctcattaaacaaacaatgctaagaccaaaaaaaaaaacagataaagcagaaggcaaaaaaaggttacaggaccacatgtccatcccccagatcaactaaaacaaaatacaaaatacaaaatgcttttgcaatacataataatcaaagaaaacagtaaattcccttcccagaacaaaactctatcctaaacaaaaatataaactttataacagtatgttttaatgcagaagttaaaaaaaaaaaaaagaaagaaaaaaagataatcgaattcccaagaagttgaaggtt

SEQ ID NO: 306807 - DNA, 1450 bp, Cannabis indica
accgacggtgctgaggtggtcggagaacttccagtgggggcggttcttcaggttgttgctgaacatcaggagatcgtggggaacggtttggaggggacacgtatggggttggattatattgcaaaagaaagtggggaagggagaggtttgggccgtgatagtgggcttctcctaaagagcccatataattttaatgtgatagattctgttgaggtgggccgtgggagtcaaagcgttgggccagttgataaacctatgggaaatagtgttactatcaaccatcatcaaccagctgaattttctgatggggatgtcgattttaaaaaaagaaaagtactggtggggggagtgcagaggaacttgataaagggaggcgttattttaataaaggaaagcaaattgtagaagatgagggttttcttactgagaagtcagatactgttggtagtcgattgggccatggtgaagggaatagcaagcataatggagggcaaaggaagaaagtatcaatcaagaacagagctcgaaatctggctaaagcagctccggcagtggcggtcaatcgggctaggggggaggagatgatgcaccctgcaaccgtgggtaatgtggcgggtgaacattttgtgtttaatgctgaacaagtggtacaaaaacaacatgaaaattctgttctcaatgttgaacatggggttagtatttctacttctgtggatttggtttctccagtatttgttgatgaagcaatgagccttgtggaacaaggccgccgagcataatgaaactcttaagttggaatgtccaaggaattgggaacccttggacattaagagcgttgcaatcccacttgcgggagtttaacccgagcattgtttttttggcggagagtaaattgactagggggcaggctgtgcatttatgtgaggttttacagtttggggagaatttttgggccgtggatagaattggtttaagtggaggtttgttgttgatgtggaaggatgatttaaaaattcgagtggactcgagttccccgggacatatagttgctgaagtggcggggcagggatttctcccttggactctcacttgcttctatggccatcccgattcctcacagcgtcagttttcatgggagttacttcgaaaaatttgtcgagaaactcatggagcttggttgtgtgtgggagactttaatgaaatcgttagtttgacggaaaaaagtggtggtagaatgaggggggcgcctgctatggaggagttcaaaaaagtattagatcaatgttgtttgatggactttagttcagtgaagtcggattttacatggtgcaatgagcatgaatcggatactattatggaaagattggatagaggagtttgtactagggaatggattgatcaatttgagggagcggatattcaattattggattggtgggagtcggatcat

SEQ ID NO: 306808 - DNA, 2465 bp, Cannabis indica
ttccctctttgcatgtttatttttaggctttgtttagaattctgattgattttttttttttttgttgagagaaaatatacaggaaagttgttttgccaaaattatatgataagactttatttttattttttattatttttaagaaaatatctgttctcttttttcatatatttatagttgctcctattgaaaaagaagaaaaagaaaaagaaatatatgtttataattgttataaattttataaaattatatttgatttctctgtatttttttttttaccttaagcgctttctcagttgagaaagatgaaaggaaatttagttttttctcttcttctttattgttttattagtttttatattttggggctatataacacattttattagaaaatacgattatatattatggagttatgaaccaaatacattgtactatcttgccttgcagtaaatgtttttcttttgtttaatatgctttctttgaattgattttactttgtgttattagatatggaggaagccgccgagttctcagatatttctgatggagagattattggtatcaaatttagtttggcaagtcacaaggaaattgtgagtcaagagcagaagagcagttcactagttttttatttccattttttacatttgattggtttataatagaactttctttgttctaatatttattgatttaccattttttttgggtgtagtgtacagcatctgttagtgggtcctctattactcatgccagtcagcttacaaatccctaccttggccttcctcttgaatttggaagatgtgagtcgtgtggcacttctgaagctggaagttgtgaaggtgtgtaatgatttattctcattcttgtctttctgaccttctgttaacagaaaaggtttcaaaagaataaaatgatgcagttgataagtttagtttgacatgtttaccatgtcttagaagagaaagttcgtgcacaagtgacagatgataattttatagcatattttgcaaaagtatcttagtacattatgtattgttcaggtcattttggatatatcgagttaccagtagcgatatatcatcccagccatgttagcgaattgaggcgtatgttgaatttattgtgcttgaagtgcttaaaagtgaaaaagaacaaggtaatacacaaatttgttttttttttcctgttatttgcatgtttcttgtatgttgattgtaagattttatttttattattacatgattaaactgttgagtaaaaaagtaattttgtgaaatagcctctttttttttgttattgcttctttttgataccgaaaaatcaaaatacacagaaggttaagtggcaaaaactgtagtagaattttgttaggttcataagtcttacaagtgcatattttgctgtacttttggtactccagtcatgagcagttgtcctgggctctttcatcttatatatacatgtaattttttgcaaaattaattgtttctgtgattatattgtacatgctttaatcttactggattgatgctttacagtctcctgcgaagaatgttggtattgccgagcagctattgggttcgtgttgtccggtgcgtacaagtggttgaatttacttttctacttgttttgataaaaaaatgctataattgcctgttctaaacaggtttcaagattcaatttactttactactttgggagatacaaatgctatagatacatgtcataaactgtttttaagaggttcttggttattggagtaaattagtttcaatttaagaagtgtattaacttactactctttcttcacctttcataacttttatctttttctgtctttttttttttaaacaatgttggagacaaatcatctacaaatttgtattgcggatgtcttacttgagacgttcagatgtgtctgatcttaggggtgtcttactatcagtaactcatcgatactttcttcaaatgttttttaactgcgttttcatcttgagcaggaagccacacaagtctcagtcaatgacatatataaagatggatattggtacttacaattgaaggtaccatctaagaaaagagttcccgatgggttttggaaatttttagaaagatatggttatcggtatgggggttctcttactgaggatcttccaaaacgcactttgctccctgacgaggtttgttcctgttctaatattatgtgttctttgcttctgttatttaggtctagtttttgcttgtttatgtaaagggttcacctttcatgttccattaagtttttttgagataatgtcgggtccgtgagggccttcctcagtgattctgctaatcctatgcatttttctgcagcaatgatgttattgcattgaagagccttattagaagttatatttcatttgtacctttaagaacagctttgtatatatatataagtaacgaagttgtatcgttttttt

SEQ ID NO: 306809 - DNA, 2853 bp, Cannabis indica
aaactaagcggtctttacactagcttaaggtctaaaggttttagaccagctaagcccttgatcatgtcccttatttggtctaactgcgcttgcacagaaggatttgttggtgtggggacttggctgatcgaccctccttggatgggcttcatactcaaatgtgccaagttcttgccaaccatactttgggagagtgtatggttgaggttggccagcccagtgtttggttgtttgacttggctaaccactccaaagtagggagatttaaaatggctggccaagcctatgctagacagctatccatggccggccagccctgtactgggtagggccttgccgctcgtgatcccttggttggctggtgtagtcggtgtgttgacagaaggtagatcgcacaagttactggagttaggtggatctagattcctaatgcgattaatctcacttctcaaattgttattttgggtgtttccacctattctcggccctagccagttaaagattggcctttgggttactcgctctcagatgcctcaagaagggagttcactcccctggccgaccagaggtgaaccactagatggcaggtcagccaaaggttagccaatgggggcttttgttgagcctgagatccttggcctacctccctagaccgttggttgttaggatgtgactgttcttgccataagacctttgtggcaaggtctgtcctcctttgggtaggggatttcacggttcctaaagaacctgattggacagtttgtctgtataccttccccaatttgttgagtagtcttccataaagttgatctctgatgagattctagccttttccaacagtttttttcattgaaatgtcttatcaagtcgctggcttaactattgcaacagtctagctccgcctggtgagactggaggatttactctttgtcatccatccatctcacgacttcgcgtctttgttgagcaaatacataacaatcagcagcgtgtggttgttcagtttggctagcttggtagtcggcctctctaagtttggctatctcgtgatcttctcccaattctaaatggggctcgccaattcctggtcccatctctccagcatagtaccggggacgaggtccggtttttgtgccttgggtctgttccatgtggatccttccttcagtgggaggcacaagtggagggtgttccattagaggcaagggctgattattcagatccaacaggatgtttgtgtgactttggccagctgtagtggccaaattcgtggtgtctaccgagatagcaggactgaccacatctgtagtgttcatggaaattctagttgtggatggagatcacaatacgcagtaagaggatcttgagggagacccaatgaggcggagggtgtagccagagttctccttgtgttaaccatgacgtttgatcagatataatatcaattcgctcttaatgagagcaccaaactgttgacctcaaattcggttaaccgatagcagaaccacgttcaatgttgatgcttgccatgtgttacacaataagaacaataaagtaaatgaacacatgatttatagaggttcgtcccccttagttagtgggtaatgacctactccccttttggttgtattgataccgagagataatactactcagatcactatagaagggatctgaagtagctctctaaaggttacaatataggaatcagagttgacaaatctcaagtatgagaagaggagtagtgggtgtgtgtgtgtgagagagagagagatgagatgagatattagatttagagctttgggttttgaacttctcacttagcttcagacttagggttttagcgtttggttaaggctctttatataggagaatttaaacccttcaaatatgtaaaataagctgatatttacatattaaattagtaaaatgcaaatgactaaaatgcccctttaaaatagatatttcctatattgtgggctattaaggcccaattcacagtctggcttgctgtccacgtgtaaagttgtgcaccaaaatcctgtcaggccaatatttggtcgcccattcacctgcaggatgcatgttggctggccctatgttgtctagaagctagccgccctatgctggccataggaccaaccaggtgtggctggccagtctccttaaggtgattgattcgtcattcatcatcccgtttgattatttggactccccattggttgaagtcttgagtagatgacttgaccttcttgttgacaagatgtatgaccacgtgacacttatattgaccacgtagacatgccaccttaaatgagcaaaaatcgaaataacaatcgtaatattaaaatgtattgttatatattctttataaaatatttaacataaaagtgaaaatattattacaatatactataattggttaattgtcagatttttcaaagttaaaattaactatttaaaaaattataaattagtaatatcctacacactaaccattctcaaccatcaatgttaaatgaaaggccacaaaacatgctcactagtcactggtacctaaagattggccatccccactatagtcctaccccaataattttatatgtagttttgtttgctctcgtaagtactctattttgtgtgattcaatgaaataaaaacaaaagaaagaaaaggtgattgagaggtttattgaaaagctttccttgatttgtcgaaaagcggttatcaaatttgctctacttgcttcatcagtcaactatgatgggctgatagatcaaatctacggttggtccacctcacttatttgcataattttatatatgttacaccctacttttttttttttttttt

SEQ ID NO: 306810 - DNA, 1874 bp, Cannabis indica
aaaaagaaaatataaataaaacaaagaatcatagtttttttgggagaataaaaagaaacatagttaacttgcacaacaatttgttaattgtacaggtgtaattttaattgagttagcaaaatataacgaatttggctccatttattataaaataaatcatgtttaaaaataaataaataaataaaagccactgagtcagccagccagtcaagttctaaaggtgaaagacgagtcctaagagaaaacatgcgattctcactcctaccttctctcaagtcatgcaaaaagaagaccacaccatctaatcctctactctcatctccactctaactctcatacacttcaccaatctcaaccctccattcccatcaaccatccacctctcctatccgtacgatcatttcaaactcttgatatataaaaacattcctgatcactgcacttcaattataccaagagagaaaacaataccaatgaaaggagctgtaatggcggccagtggaggaggaaggagcgagactgagaaagagaagactaagatgagagaaagacacagaagagctataaccggtaagatcttccatggtttgagaaagcacggtggttatccactctctccacgcgccgatattaacgaggttctccgtcagctcgccagggaagccggttggatcgtcgagccagacggaactacttaccgcgccgctaatctagtaatttcactctctatcttctttttccctccacattttctcggcaaccaaacactcctaaattctttcttctttgttttctttttaaaatcggaaggtcggaatcaacggctgtccggtatgcggagcggcgaaaacgagcggaacgccgacgccgaccagcagcgtcgtcattgtcggcggagccggtggagaatgttcggcgacggattctcgaagcggcggtttccacgtcggagattcatcatccggagcgctttgtaatttctcctccggcggcaacgacaatattccgatggcgctttatgagatgtacggtggattctccggtggtggtggcgttttcgaaggcggagatacggcggtgtttcaggaggagcaacatgaacagaggttgaggctgagccagtctcacccattgttggagtctcgagcttcaaaccagaacactcctgtagcttcgcctctacatcgaccttagctttgattagatttaggactatttattatatatatatataaataattatatagctaacaaaatcaagaaaagaagagtagtaaaattggaagaaaaatatatagtaaaagctttgggttggtaatgtgtcaaattttatttatgttttcatatcaacactttatgaaatgaaaagttatatacacatttcgtaaatgaacatggctgttagacacttaagcacctttttaacatatagattcgctagcaatactcgatattgatacataggaagctgataagcaacccctcttaacatttttttttttgtaaattcaaccaaattaggattattggcacttttgaaggaaaaaaaatcataatgtacatctttgtggaactagcagttcctagccacctggcggctctggattggtccggatgagatgagtgagcggcttcttttttccgcaaagtgaagaggcctttttcctttgaataaatgatttttccaggagctattattgtaatggagaatgagataatccttattttcttcatttctgaacaactttggaaatgtataggggtgtttggtaaggacgtttagaattttgggaatggtaatgtaaaatcaaacgaaatgcttattgaaaaaccgtatttttgcaaatgtcagttgtatatacgaaaatataaaa

SEQ ID NO: 306811 - DNA, 780 bp, Cannabis indica
atatatatatatataactatatgaccttttactctcttttattctcacgttagatctcaaagtttttatggaatgaatctcttttattttggttgtaaccctagttttcgaacttttttactcttgattaggagagcactccaaatgactttcttattctatttatttagaataaatgagagcatttccaataaaatactaaaatattaatgaagggtgtgtttagtacactgtattgtatagtattgcattgtacaatattattttatacaatattatgtttagtattaaaatatattaataaattgagttaaattatactatgtttggtgcacaataatattgcattgtattatagtaattttttttaaaaaaataaataaaatatatatcactactacaaaaagcgctattcttatggattagatttttttttttcaaggaccgctgccaataaaatttagtgagtgtttaaccgacgtctatagttaagaattcctatcgattttaaatagttgttgaatatgggcgacagtttaaaattgctactaaattaaaacattaaaattttaaaatagcatccccaacggtagattataggcgacggttaaaattattggggattcgaacccttgatataaaaccccaaaattttcacagcagattcatttaattcttttttgctcaactcacactctctctctctcaaattctcactctctcggatcacctccaaccacccaccacctcctctctctctctctctccgagctcggtata

SEQ ID NO: 306812 - DNA, 1225 bp, Cannabis indica
aaaataaataaaaaaaaagtaaactttatggcaattatattacaacaacaatatctaaaaaccgttattacaattttgtatttttagattcttattgttttgctttagcatataattgtagtgttcaccaaaatgcttactgaccaaattatcttcatgatcaaattattcgttgaaatgtattagaaatgaaattggttttgtattttgaattttaaaattttgattatggatagccaattattagaaatctataaaaaaaagtaaaatgcagaatggcattgataatataaccgatattttatataatacatattgcaaggtaactgttatataacttgaaaacaatgaataaccttctcttgttattataaacaaacttattgcaatagagtttcctatatatgagtcatgcactgccaattttgatccctaattttttcattataagatgtttagtaagaaaattatttgacaatgcgtaaacaacgtactagcaactatgtgtttaggtattgttaaaaaaaattaaccaactattattagactaatgaacaaagacttgtagtttgcggttcttttgtgaagaatcaactgtaagaacactgtaaatcaacgtcaacccaaccaacactactacaaaaatagttttttccaacgtttttaaacagttgtttaaagtattttcgtcggtttctacaaccgtcacttatatgaccgtcgcaaaatgggcaaaataggcgacagttaaaaaccgtcgctaatgtagacttcctgacggttaaaatcgttgcctataacaaggtataggcaatagttttaaatcgtgccctatactatatgcgacacttttggaaatgtaaaaaaaaaagaaaaaaaattgtattttttcccattttttttcctgcattagttttataattttacataaattaaaataaaacaactaatgatttttattacaataacaactaactttaaattatattaaatttatgcaataacaaaataaatatataatatataataaataaaaaatataaaaataaataaatgtatttataccgagctcgaagagagagggagacggatgggaggtggtggtggtccgatgtatgagatggagatgagagggacaacgactggaggtggtgggtggagattgatggacgagaagaaagagagatcaaaataggaaggaagatggcgagagaggagggcgata

SEQ ID NO: 306813 - DNA, 3141 bp, Cannabis indica
tctacagaaaataagtagagacagaaattgaataaactaacaagaaagcgagagattcaggaagccattaataaagagtaacaaagaaaatgccctatgcagagagaagagagatagaaaacttaaaagaaaaaaaaaaaaaaagatagatcatgaaaaaccattcttgagatgtgaacagaaagagtccctaaaaaaaagtaatatatgcatctataatctgtcttattcttcagccttactagactacgtatcactagtatccattttccaccctcatttcttaataacatcaaagaaaatgcaaatgcactaagaaaatgatataagattgttgatgtgaaagtagaagagcatcattgtgatcacattccatgctgcaaatgccaccaaaatgacaccatgactgaggtttatttcagtcctaaaagaacatctttttttctgatgagatcttgggaatggtctctccttctaacatcatttctggttggatttgatttctggttggacttgattctatcccttccactacaccttctccatagccattgttgactgatttattctctgtctcaaaagttgtgagctcaaacttagaaagcacagttggaggtggttggttgagttcgaaattcggaattttcatctcggcctgaatcaaactctttctagtgccggagctcaaaacctggtcttgaaccttagacttctcaccaacaacttcaatgccctgagagataatagctggtggaggtgtgtgttcctcttttgattctttgttttcctttacaatgtcaagtcctttcaccagtatggatgtttctgtaaaaggcaatatctcagaaactggtgcaagtgatggctcaacttctgaacttctttttgtgtctacttcattaggtcctttcaccactgtggatatttcaatatcaggccttctctcagaaactggttcaggtgatggttgttctgcttctgaacttctatttgtgactacttcattgggttctttcatcagcttcgaggcttcaatcttaaataatgtgtcaacggctttatcacactccattggggccattacatcgctggttcggctatccagtccaggctcatttgaggtggtgcaacgaaagttccactcaatgaaagatcagtattatcctttggaatacaatctacctgaggtacaatatcaatcaaagacttgtccttaagtgccacaaaaacaccaggctgagattgagaaggttggctttggtctgttaatgtaggtacttggtctttcgcctcagtagattgcttattgctgttttctgggtgtgcagaaccggaaggctgaggatgcggattgggagttgggattggcatctcttttcttttgtacataggaacaagaggagccacatcgtttgttggattaactggagtgaaatgccccggtagaaaaacaacacccctgagctcagtatcagtgtcacctatcttcacattaagcagatatccatcatcaaatgaaccctcaatcactcctgaaaccacctgaccaaccattttatcaaccccatcacctgaatccaaacttagtctgcttttcttcacactctctgatcctgccactgcctggacgctctcccccttgaccaaactttcatccttacgaggacgtccacgtttccgcttcaaggggaggtccccaggcgataaagcattagccccttgaatctgttggttcatcttgctgaaacaaatgaaaaagataaaattttagagtgtttactgtcaaaaaaaaaagttttatgtatctaagtgatatggaagctttcacacaacgtttatttttaccccataatgtcaagcactttactctttccaaagagaagtaacatgcaagatagatattggcacagataatttattaatttctctgccatctaagcaaatgtcatgcatatgaaacaagtaatatgcttttaaaacttcataaaaaattgagcaatgtgtagcaaaggttttatgcatgtaaagaaacgactgttttgtcaaagtttgattgccttaacaaaagaaagaaaagacaaattctttcacattttatggaccattctgttatgggtttcaacttcactaagtttgtggatcatcaccatgcatgaataaagaattaacaagtaaattcattctgtgaacgatctccattctgtaattagtcttgatcaaatacattgcaataaggaaacaagagcctactgtaggaaatggcaaagtgtttatgcattcatcaggagagaaatattgcagtagtcaagttgagaatgcaaaaccaacaaaaacaaaggacaaaaacagcttgaatataaagacatgcaaccaaccaatcaatattttttttattataaaatgaaaacaaaaaatcgaaagatagcatcaatgaattaaaatatacacataaaacaccttaaaaatgatctgaatcaaataacagccacacatataaaagtttcgattcacctacagaacaatcatgtgcgtagaaactacaaggtcacacttacattgtcataaaatcattattacaaacatatagtggacaggcaataatgtgaagaaataaaatacaaaaacaaacctataaattaaaatcaaatcataaataatgttaacagacaaagagataccaaacaagacccaaaatagagaagaaacttcgggaatttagatctaaaacaatataatcagatttgaatcgttgtaaaagagagggagaagagataaacgtgaggtaatggagtccttttgaacgaagaaaatgagtgtgaatagcaatgcgcctagatattatcagtcattgaagagagggctccgtccatggagttcatgcagagctttcagaacaagagaaactgtttcatcaattttctattttttaattgtaaaggagagaataataataaattatatatatataaaaaaaatcttgctttttttatataaatatatattttttaaaaaattaaaatttttattggttttatatatatattttttttgagcaaaaatatagtgttttttaagagttattttatgggaaaattgaagaaaaaatttaaaaatgttataaatattattaattatgtagat

SEQ ID NO: 306814 - DNA, 1902 bp, Cannabis indica
aaaaatattagttctataagtgaaataatatctttttttctgaaaaagtcatgatataaataatttcatttttttttttttgaatagaataattcattattttaaatttaagaactcgttacttttaataaaatacatattaaaaataaaaagtttcctttggaagtattttaagaggagaaataaaaaaattgatttagagtttgggataatttttgttcaatcactccaagtccaaatccaatataatatacaataattaaattgtccaataatatcccaccaatatttatgtcatgcaccaaacatgatcacagatttagctaaataattggataactaatatagtatttatatgaaggatgaaaggaacgttaagcatgatcatttaattttcttatatagcaagcagtgaatatgtcaggataacttataagtattcgtaaaaaataataattataaaagccatttaattaaggggacatcgtgagtcaaagactcaaagtggagaaattaattaattaattaaacaatttcaattattatggaaactaatccaactattaaattctcattatattttaaattatgcatgtgcagtattttatttttcacctcgatccaactagtactaaaattattaaaatatgtatgcttaggagatatcgtgattaattaagaccatcatcgtcttatcaggtgtgtattttagtttagttagtataattggagtactgtgtagcattgctattatataggtgtgtccaatactatataatatataacatcatctacgaattatatatataacaatataaattgatcgaagatgacgacccctattaattaattatatatataaattgcaaaaaagtcattttctgtcttcttcaccctgcaagttggcaaagagatatatagcatgtagcatgtccatgatttcattcatatatagacaaacttatgacaggtgagtccacaattataccatatatattaagtaaaaaaaaaaggaaaatttatggcctcatgagtcatgacatataactatagttaattaattttaaaaaattaatacgacggatatgcatatgtggtcaaaatatatataaactcaccaagtcttaatttatggtttttttttttccaccataatatcaatattatatatattatgaagaaaaaaataaataattaattttaaaaaaagcatggttttttgtaatcatttggcctagctaacgtactatatcaatagtgtgtaaagtatgtatactaatagcttatatatataatatatattcggcgatcgatgcatatatcaggtagctaacatgtataagagattattaattagttaagaactgagctaggtgaacccttttcaaaccgatgaccgaccataactttgtttatatatatataatcacaacaagtttattaataattaatgtgatcacatctcctaaagatatgaagataatttacacgtatttattatatttatgaattaatacactaattaaaaattaataaatataaatagaaatatatagatattagaaaggtcatatattataaggtcaaaactcaaaattaacataagtattcagtactgctaatatgaacatattattgtctatttcaaatcgtttactttttgaatcaaaattagcctgataacgacaatcaataagtgaagttcgcaaatagttatttaaataattttttttaggaaggaaagaaattgtaaattgtaattaatatatcattaccaaaaatcttgttgtgactaaaaatgaaaaagttgtgattaattataaattattatttatgttgtggcaaaaaatattagttacaaaaattacaatttattgtgactaaatgtatttttagtcacaa

SEQ ID NO: 306815 - DNA, 1058 bp, Cannabis indica
gtgtcctcccaaagccttgccggagctgaatcttttgccacagtagctgcatatgtggtttttctcttctccagagttgaactccatactcagttacaatttgcagttttttcttgcggaaagagaagacagagagacgatagagagactaatgaagtttgagctggtttaaggacgtaaaggttagggaaaaaaaaataaactgaaataaaattcaaatattaaacaatatattatttgttagggttagtaaaaaaaaaaaaagtaaaaaaaaaaattcctaaaaattaaatttcgggaaagaatagcgcatttatcggatgagtatcattatattaagatttttacagattttattaccaaaaaaaatcaaataagtcgtttgaattaattaagtttccaaattgttcatgtacctttattaatgcattttttttttgtgtcagacctttattaatgcatttaattcaacatcctttgccaaaacccttttatttttgtgtttccgttattgtatatacctattacaatatattattattatattcatctgaaatgaaataaaagaaaataataataataataacaacaacggcttatatttttttggctccatgaatttctggatgtgaggttgaaatccttctcatacgtgaatcagcaatttcgacttgggctaattttctcgcagatatatcgtttttcgggagaaaatgttattgctaataaggttaattatatcaccattaatattttcatgttttttttctcttccataagataaaagataatatgatgattctagaatgcaccccttaaaaggtatgtactgatacattcttgacttgtttcggtatttagaaaatttttttagtctatttttttttcatattcatatacgttataactatttaagataatctacaaaattttgagaaattctgaataatttacaatatagaaaacaatattcaaacaatctattttacagaactataaaataaaatagtcacgcgcgcaatacactgtttgaattcggcgtgttaaacttttccaaa

SEQ ID NO: 306816 - DNA, 1787 bp, Cannabis indica
tataaaaaaaggaacctttctccttgttcttgtgtctttatattgctttactatatattgatttctataaatcacttatcgcttactaaataagactcattgtcgttggctaaaagcaaggtcaacaaatttaattatcaattagaattggaaaacttgaattggacaatttcacaagttcttactaagtagtgaaatttataagattaaagaaaatgagaaagagtttattaaatgacaaagttgtttaagtatggcatacaatttaagttcatagtacttaagttaaaatggaaaaatcagtatggcccaatacttggtggtatttggctatacaagtgatttaacccatttaatttagttaattaactatttagtttaattatttaactatggtaaaattaaaaagatattttaatttaagaacattgggcatgaattaacataataaaattatattggcccaatagtttttgtaggatggccatagatattgatttctacctttagttttagttaaataactattttacaaaattgtttaattaaggtaaaagtaaaattgtatttttatttgtttgtagagatttttggaaatcgattataaaataaataagcttaagaaagaagtaaaataaagaaggataaacaatgatttttatgtggttggggcattaatgagccttaatccatgagtcaatattattgagttagaaaaacttcaaaatatctttacacaagtgttcttgttaaagtttgagaaccctaattcttagcccttggtagcaaaatgattttctaatcctttgcttcaaggaagaatgttctatttataggctagagtcgggtttgggtgaacccggacccagtaggattttcatgtatcaagtaggtccactaatggggtaaaatacaattgatattgactttgggccagttaggcgaggcccaattcattaggtaatggtcatccataggagtggggaccgtttggtgatgacaagtgtcgtgcacaaccatattggtactgagaatgtcaaagaatatggcattggacaaaaaggtggcttctttttgatggtatgcgtacttcttaggcctgacataggggatgaatccctgacacagtgggaccctgtgtttggaggatgtcatgtaggatggtatccaaaggctttcggatgtctctttagtttcccattccggattactccatgaggatattcaggcctgtcttgatggacctttcagcttctaggtagatagtctttcatggaccaaagtggtctgaccttgttgcgtttatatgttgggcttgcatccaaatcctaagccgtagtctgacttcactgtgggttgctttgttaacttgattgggcctaggaatgggccagtctaggataatattaggccttggaagtataaattccattaagccagaaacccaaataacatttacccccaagccttcatggctcgagagttgcggaggcttgtagcctacttctgaattcattattgaatgtggaaccatgaacaagtgtaaccattttggcttcccaggaagtaagtggcagatgctcgtgatcctttcatcttcctagagtaggacacacatgtcgtgaatcccttggtctgtgctaattacgtgtgtaaggaccgcttagtttaatttggaaattagcagttaatcacgtttaattatgaaattatttatagctatttaaataatttattatactgttattattgaattcagaaatgcattgctatgtcattcagtagtt

SEQ ID NO: 306817 - DNA, 2204 bp, Cannabis indica
gatagaaatgattagattttaaaaataaagtgtcaatttatataaagttaatcgatatattaaattaatgagatatcactcagaattctccaaagtctctttctgccaccatttcagtagttagaaatccttccagtaaatctctcttttttgaaaagatctgctgtagtatttttttttctttcgttatgtataaatatataaaaatcagaaattaccacacaataaatattttattattttcgtaaatactgctatatttatcatgctaatactcatcatttattgaagtgatttattttcactttcttagaaaattattttctaaatttctatgattttaatttaattataaattaaataatataaaattatgtatacgtgccttgcaattaactactttttttctagtactttttttctagtatatatatacattgatattaaaatttagaagtataagaaaagacttttttttagacttttcagactcacaaaagatggtaaaaaaatgttgaattattcaaaaaaaaaaaaattagaagtaatcctacataactagaacgtgtaagataaagtaaaaaagacttaaaaaaaaactttagtaaatactgaaattgatgaaacaaacgtactaattaaataagtaaatatttttcatatattgatttacttaactaacttttctaaaatttattttaaaacaagaaataaaacttcaactaaacataaatcatattagattaatatatattttaaccactagtgagctttgtaataagataaaccagagcacatatataacattaattaaactgctaccataacatattatattcgtgtattggtgtgctagctagctagctagctaggaaagttggcctgaatcagcgacgatgacgggtttagaggtgttgccagtgggagacccaacgagctcaatggctttaaccacattcattccttcaacaaccttaccaaacaccacgtgtttcccgtcgagccatggtgtttctgccgtacatataaagaactgggactcattggtgccagccccagagtttgccatagacagtatcccaggcccagtgtgcttcttcacgaagttctcgtccgcaaactttgagccatagatggactctcccccggtcccattacctgccacgaaatcacctccctggcacatgaacccagggatcactcggtggaaacttgaccctttgtagtgtaaagctttaccgctctttccaattcccttttcccccgtacaaagagctcggaagttctccgccgtgcgcggcgtcgtgtccgcgtacagctctatcacgatccgaccagctggtgaaccacccacctccatgtccaagtacaccttagggtttaccattattattttgtataataaattaataattaattaattatctacaacaaaataatatatattaggttctttttctttaaagctatatatataattatagggtatttcctcaccgttggattaatttacacgtgtaggtaggcaatcgcaatttcggtgaatattttgacgcgattcatctgataagacacgagtattggcaaatgtcacacgagtgggggatgatgatgctatccacgtccacgtggcagctgcttctgaagttactgttctctctgcaataaaaacacacgagtaagaacaaaatagtaatagaataaaatgaaatttaaaatttatataaaaaaatagttattaacataggtcttaattcgaattttcctttctcaaaatcaaaatataattaaaaaagaaaatagaaaagttaacgagtatctacagtgtctaatatttttaggggtcttaattattttttctgaaagctcgggtattaattattttactttaggacatgtttagtacagtgtaattaaaattaattatacaatttgatatatttgttgaccacgtaatataattgtataattcaaagtaagtgggagatgagatattggcggctaaaccacttgaactttacggtttgtaacacttaatcacaaaaactgaatttttaggggctaaactatttaaacccggattccgttttgctctgcacacctccgtccaaaaatcacagttaagtgccacggtggactgtccacgtgtacacacttgtacacgtgtcaaatttttagtggtccatgtaatattagttttaaaa

SEQ ID NO: 306818 - DNA, 3397 bp, Cannabis indica
acaaatgattagaaaatacttctatttctttattgatggattacttgaaattgagttttattaggcaataaacccaacaaaaaacttgtagttggaagaaactagagctaatcccaatagattgatttgtttgtaaaacttctttcaatgataattatttaccataatttgtttgtaaaaatccattacaaatataaaaaatggtttatttatttccattacatacaatgatagtctccttactcccatgctctttctggtggctcattgaagatgaatttgaggtgatgtggttagacgctccaagttgacaaacaaggcatcactatcaactatctcaagtgtaactataaagcattattgttttgttttactaagattaattgtttccttgatcagatcacatgtacccgtcatcgataatagcacaaaactgaagagtgtatgtattttccatacacctggcatgttggccttccaccatttgaccttcccctttttcaagaactgttacaacggttgttggagaaataatctcctccatttccaagttctgtgtttttattagagttggatcctcgaccttgactgtgcccgtggaagtttgatttagaggcaacattagcttgcggtgatgtaggaacattagcaatcttattagttttcatcaaggtttggagtctttagttcttacaatcaaagcttagtgaagtgtcttgtagctcctgccaagtggatttaggttaagcttcgatttccacaacaatggagatatattcagcattgagttcagacaacatgttcgccactaggtgagcttctggatagaggtctcctgctagagcaagaatgtcagacaaattctttttctgcctcaagtattctaccattattgaggatccctttctggaatttgacttagggtcctaatgtcatccattttttctcctgaataagcaccatacatgctttccaaggcacaccaaagttttgctactgtggttgttcccataacatcggtggctaaagatttggacgtggagccataacaagaagttggtcattgactatccaattctcaaatttgagattgacttcgactatcctcaccgcttgtttctacaaccataaatttattaggatagattttgttgcatttagaaaaccatccaatcgatggcctcttacaatggttgagaccattatattccgcatgatatagttttttttgtaaagcttgagtgaaattggttgattaatgtactgaagtgttgtttagagtaaggatttgggagctgagtgattctggtggtggttcgagtgttttctggaccaacagcaatggatgcataggtgtttccttcagtctgaggggtttggtttttaagaatcgacattggagggtgatggttggattagctcagataccaaatgaaaatattaggcaaatatatttgatataaaactcagctcaattaacaatgagttcttgcattcaatttataggtagagtctttcacttacaaaagagtcgttaagctcaatacagctggaaataatataatgaggaaagagaggcaatattctaacaatataatttcctaattactgcaaaatgattatagggattgcagaaaaaagacaatttagttatgcaaaatatattcacctacaacagtagagtaggacaggggaatctaatgcaatttcttcatttcagaacaaagcctataaaaggagtcttctcttttctttcaaaacaaaaaaaacaaatagtcactcactcaaaagctatattatcttctttttgctttatcttttccctagttatttggtgatagagtgaaggtattaatttgagtttgatggagtagtgaaagtggtgtactcttctactcgttcctgaaaattggttgttcaatgtatcctttaacactaattaggtagatgggcaaattggtttttcatcggtcggttctaattggcaaatctactttaattacttattttctatctcattaatattgttgtatatttatattactgtttttcaattaataacatattgttatgtttgtttatcatctccattctcaatatttttatttaacattatttattaaaattattctgacattctattacatataagaatctatactaggcaacaaggagaaaaggcctcatagcataaagaaaagaaaaatattagaaagactcccaaaataaatatgtaggaaagtgatatatatttgttatatatacttttccaaatgttgggaatctctgaaattttgtttttttggttcctaaatagaaagcacattgcatgcttatgttacctaaatatggtatcaaattcatttgtagccactagaagccatacaaatacaattgtgatatccctaatgccaacgggatcattaatagacaactttttcttgcaacttaaaattttaaaatatgtgcatgtttgtttaataaggcaacataaataggataacgtgggcccctctgtaatatttgcaagactaagtgtcccactcaaacaatttcgtatgttatatagtatagtagccagttactttacacatatatagtacaatctgtatatatttatagtttttgtgtagtattatatacagtaactttataaaataaaattttccaatatggtatgaataaatgcatggttggtaaaagtgatatcgcaatgatgcatcttgtctgctctatttgtctgcgaggaacaatttgctgaagattttctacattttgcaggtggtgctaaaaggattcgttgataatattctattgtactgataatatgtcctacattataatatgatatatcaattagttatatattagaataataattatgttgattattagaatgatgagtggtttagtcttatcattatcattatttcataacatgcctaagggacacaaaagcaacaccgggataggttgtgttgaggggctttctttatctttcttttttcccttattagttagttaagaaaattaatattaagctaagagatgaccattttattcattgttatacataaatcattgttaccatcaactccataatttgcctgtatttaaatgactatattaacttcgaggaacttagtaaaatattattcatctattgcgttgaattcttgatgatgctgcctataaccaattcacacgatagggagaggtgggtgtgtttggaagtaattgtgtaattattaagtaggttaattactagggtagtaattacacagtttagtaattacactatattttaaaatgtaaagtgtgtttggatatgaggtggtaattacgtatgaattcctattatcttgtttgacaaaatagttagtaattacatgggaaa

SEQ ID NO: 306819 - DNA, 1468 bp, Cannabis indica
agctccacatgttgaaattttttgcataactatttcttgactttcagaatattttatttttttggaagcttgactttccgatgttaatgtcatcagtgtttccggataaggaagggacaggtgcattttcaaaaatccaatatcaactaaaataggctcattcctgggcagtcaagttagcacgtcaaccccaattacaaagttgagttatggctccagattcggatgtaagtccaacttacaaacgggataaggccataccatttcagtcctagaaatgttgtttggcccagaaggaaaaaagtccatcatcatcaatttggatgccgtaatggggtaatttgggcacacaaaattgaagagacatcgaaaagccttcgaatatcatcctacatgacgacctccaaacacggggccccaccatgtcaggagtttgtcccctacgtcagactcaaggagtgtgtgtaccaccaaaaggcaatcacggtttttgtctaacgccatattctctgacattctcagtaccaacacagcaactcacaacacgtggcatcataatcggtctccactcctacaaacaatcataatctcatgaattgggtctcacccaattggctaaaagtaaatacatattgtattttatcccatcattaggcctagttgacacctctaaatcctaccgggtttaggttcacccatactcgaatcttgcctatgaatagaacatgatcccttcatgcaagaggattagtggagaaatcatttttctacttctaagagctaataattagagttcttcagctagaaaaaaaaacacttgtgtaaatttactttgaagcgtttttagctcaatgatattgactcgtggattaaggctcagtaatgccccaaccacgttaaaatcctagtttcttcttctttaatttatttctttcttaagcttaagtactttatatttggtttccaaaaaatttggtaaatgtttttggtgctttcattgagagctgaggaaagatttgtcgtagttgtcatctacaacaatggttgcaacccgaaaggcagtggtcaagccacctactcgagatggtagggatatttcgccaacgatggcaagaaccagctccccccgacaaacactcaagtgtgtgtcgcgagggaaggaaaaacatcaaaagtggacaattgtttgcacctagaagaccagtaccacagagaacctgtcgttgatgatcctattaacaaggatgagcatgaaggtcatgaagatgacaccataggtgaccacaacaaaaatcacaaccaaaagtatgaagaagaatactacaagcaggatcctgaagtagtatgattccagcaaaagcttgcagatacccaaaggaggttagcagagcaggaagaagactcatgttggatgcaagaaatgttgggttttgtgccctaaatacaactcatttcaatataatcagat

SEQ ID NO: 306820 - DNA, 1837 bp, Cannabis indica
agtttccacacacatggcaacactatggcccatgtcattatcagtccttcttttttttagtctcaactagtcacattccttttttggaaccaggctgattagtaaccaactcctgaatcacgtcctgtagagagttactgagttgactatttccaccatcaatttccttccctgacatatgcttcttcccacgatcaatggccatgtctgatatcccctgatgattcgggacattaacaactcctttactcccacgatttgaggcatcaatagctggtgtttatttctcatgacagttagcattcataccttctaatccagtacgcagccactgagctccgatgatcttcgtacgtcgacggagcggtgctctcatacattcgccataaggtttttttaatttcatgtgctagtgtatcaaataaccttgcacagaacgtctctaaatgccccaacatcccacagataaagcaaaaagtggggacattttcatatttgaaagtgatccaaaaccactcttcatcaagcttgcgaagcctcattctcctctttagaggctttgatagatcaatggtgactctaatcctcatataatccctccatatgcccataaaattattaggacaggattcggcaaatgtgcctatataatttccaactgcctgcaaaatggttgatgtcatacatccagtttgaagatcatgaatcagtacccatagatccactgtatcaagggtgatacatcgaggattagaactattcttcatacgtgagataatcaaagccttcctattaaaataccatggactgccttcaatgacctgcttaatgtctatttcatggaaaaactgaaacagaaagcggttagcatccaattcttttatataaactcccttaccgggcttccacagagcagcaagagtctgttgcatagacgagaaatccactgcccctaccgtgataaaacctcccaacaagcacagccgccaatcaaacacaaactcctcttcccccctcgtatccaattcttgcaaatcgaggccaccttcagtttcatcttcaatagctatgtcgtatagttgattgcttgaactactagatgacgccataatcaatagacaaaaaatcaaaacagactacttataaaaacagagtacgaacaaaccatgacaatagtcaagacattctccaatgtgttttatttagttaacaagtaaagtttatttttaaaatttggttaattaaattatattatttatggaaatgattttgtagttacattattattattttttttaaaaaataatatgtgcatgtctttatttgtttgatttataaataacttgtaaatttcactgttttttatatatattaatcaatatatatataataaataatatgaaagaccaaatgtagattacacaattttatttaaatataattatattgtatattaaataaaactattttatatctatgcttataatttgttatactatatgaaaattaattagtttctaccgtaaatttaaatgtaaccaaaattataactttaaaataattaattaacaatttaaatatttaccaataaattatgtgatttttttttttgaattttattgtaacttattaatttattaaatgacttgaaactaatataaatatttttacaaaaataaaataaaaaagttgcgtaaaaatatttaaaataataaattaatttaatataatctaaaattaaacacataagtttcaaagtaacataaaatgtttataaaataattagtaaataaaaaaagagtttaattatattatatgacaattcattagtttcgaa

SEQ ID NO: 306821 - DNA, 1247 bp, Cannabis indica
agacaaaacctattctctaacagatttagattttggaaaaactcacaacctcatgccaacgtgtctcatgagacccaaaaatcgaaaaacaaaaagaaaaaaactgaagccaaaacttacgtgcaaataactacttttaacattaaaagagaaaaaaaaaactttccattaattaattaattaattaattgattttgttaaaaagagaaaaagaactaaaaacagagacggtcaaaaaagtaggagggtggggtgtgggtgtgtgtaagaagaactaagaataagaatctcacatgtcccttcaaacataacaagaaacgccgctctagtttcgtctttttattctttgttttcttctccataataaaataaaactttttttgagttattttcccaaaactctccgtgcatccttttatctttattttattttatttattattgagttgaatggacttgtttgtttgggagtttgaagcaagtttggagcccacacttcaactttgagacaaaatatattttttagactttggaaaaataaaaatgaaaagcaaattaatccctcatggaattacattactacaactttgtataaggatgggaccataaggtttgccaagagtgtgacagttacctagtccggaaatgatgtgttccttctctctctctttgcatgaatgaacggtctcagattagtcttgttgattggttggttagaatagggttaaaagattactgtacaatgtatgcatggttttggattatctaatttggtgatgtaaacacctttgcaatagagcctcatatctctccttttctttttttaataattaatctcaatttaacatccttgttttggacttaataaatctcaaatatggacttattctaagttttgtcatctaaacatttttccaaatagaaaagcaatgcaaaattaacaaactctcctcctaattttctgcattcttttctttcgagtttcacttataaaataatgagtaattataggtgcaaatattttatactaacaactttttattcaaccaattatatttatttaaatattaattgagttcgatttaaaaaaaaataactgtgtatacacatatatttttaatggtagaaaatacattacaattaatagttgtgttgtgaaaaaaaaataattacagtaaaattgtggaaaaaaacttgagcgactagctacaaaatttttttgttaattccatttttggcatatttaa

SEQ ID NO: 306822 - DNA, 3770 bp, Cannabis indica
aaaaaaagaggtaaaatgatagactttaaaaaagaaggtaaaaataaaaaatgacaatataaaaagagtatagagtctaatttcctcatttgaacatacttaggaatgtgggttccgacactaaatagttgattaatattttaatgagtctctaagaggcccgtgagggctcatcctcaagtaggggtttagggtgtaaagttaaatattgtaaaattttatgtctaatttgtatgttaataaaaaattccctttaaatgctattgttcaaataaagcatcattctctactttatattataaaaatcttcaaagatatatttgataattatagaaagaagcctccacaagctaaaaaggaatcaaataaaagatcgatcaatcctaggctagctacacctgctcaagtagaatccaaatataaattaagagtgtcaatcacaccaatttgaaatctgaatctttttttccaaaatttacattttattttatttttacattgatgctttcacatttttttagttttttaattatttaatgttatatattgtgtaaaattatttagaaagcatataatattaatgttaacaaaaacttaaaattttcattaaaagttaaaagaaaataataaaattcagaggaatcaaaatattgtaatttatttttaaaaatatataatttttttttacattttttctcacatactcggaattcgggttcgggtccgaggttcaaatttgggttcaagtctgggtctggtttagaggtcgggatctgggttcgggttagaggttcgagtccgggtctaagccgggggtctaggttagaggtcggggtcgaatcaggtccagaattcggggttcgggtctgcactccgagtctagggtttgagtttgcagtctgagtttaaggtctagagttcgagtttaggtccaaggtctaggttttggatttaggtttgggtccatgttcgagtttgggttcacagttcgggtctagcgctggtttggagtttggggtccaagtttgactttcggatttcgtgctagggtaagaggggggttggttcatgtcgaggtgtggaatattgaagttaatttttaagtaaaaaaaaaccgatctaagaatagtttttagaaaatattagtaagtgtattgtattttgaaaactataaaaaaattgttttctatttttatttttaagaacataattttgaaatcaaaaaattataaccattgccaaacattacttaaattaaacacatatttatataaaaaaaaatatattaacaagatgtcttaaataaatgagttaattacgataaagctccaaaaattttaatctcgctagaaattaactttcaaaatctattttttggcaataaaatctcaaaactcgtgttctgttagtatttagccaattttatccatctttgacaactaactatcaacttggctgtctatgtgtatatagtgtattgttcatatggacatagtgtacatatgatacaatattattgactcacttaaataaatatttaaaaataaattaatttaaaattaaaaaattgtaaattaaaaaaaggggtaatttacagccaaactctcttaactttgaagtttggcacgatcaaacactagactgaattttgggtaatgaactctacaatctatagaatcattttgctttgtactcctttcgtcgtgccaaagtggattgtcattctgtatacaagtgtacacatggaaatgtctacctaatattaataattaaatattaaaaaaataatttaatatgtatgtggataatattacacatggacaaccagccagatacttaactgataaagatggacagagatagctaaatgctaatagaacacaagttttggaaattttaccgcaggttatgtacggcgaaaccctcttatgttttgattttttacatttagcccctttattttttttttttgtagcaaaacccccttattttttttttccgcaaatttggggtgccagctgaatatcattgttaaatatcaactagattattattgtattagcttcgaagttttactttcagtatacacaggtgtacataattatcatttagttgatatttaatggtgatatttctttgatgtctcaaatttgtaaagaaaaataaaattaaaggggttttaccataaaaaaattaaatgagttaagtgtatgaagattaaaatataaaacaaattcatagttaattactcttttactgctaaaaaataagttttaagacttaattgctagcgaattgaaaatttcaaaagttttaccagaattaactctaatctattatgtcatgtaaaaaagattaatttaaagtttaataattaataatagtgatatataatattattaaaatagtaaatagcggcataagtatctaaaatcttaagtttgtaagtgacataaatttaatgtttattttagcgacacaagtacctaatgtttataatttgtaatttttttctattttcgctagtacaaactttgtattatcttaaacaaagtacatataaagttcaaattttagattattgggtttagacaaaaacatttagtatcagttacttctaaatgtattttaaataaatttaaaacaaaatttatactgacgaaattgaaaaaaaaattaaaattttacgaatattgaatacttatgtcgctaaaattaaaattttgtatgttttgctttttaaatgataataataataaaaaattgatagatgggaaaataatataataaatgcaggagaaatgtggtgtaggagtgaggaccataataatatgttatctttgtttctctaaccgttcttatctgagtaaggctgtactacaccacctatacattagtaataagtacggcccatatcacatcttcacccaacaatgttattttaatatgatgaaatatcaattctcaaattgttcgtacactttatatacttgaatttgtccttccccacatactttctccaccaaataacctcattttcctctctttattttctcttcccattttacccctctttctctctctctctctctccttttctttgtacttatcatcgtccttcaccgtaccaaactcatttctttccaattcacataaataccccccattcatttctttcttctagatcaaatattgaaataaagaggaaagttaattatgtgctattataattttttagggttgttcttataatatgtaatttgtggttctaaatcttaattaatttagatcaaattatttgagatctaacccaaatacatttagtgtggatgatttgtttaattcagaccgtttataattctttgatttaattacggtttcaaaaatttcaataatggttcaaactaaactaatttatgtaattattttatatatacttaatatatggtgattctataatgcacctcttaaaatggatgtattgatgtactctctttttgtttcggcatacagaaatttttttagtctaatttcttcatattcatgtacgttatagctatttaagatatcttacaaatttttttacacgcgtataaaataaaatagtcacgcgtgcaacacactacttgaacacaattttcgacgtgttaaacttttccgaatttcttaaaattttacaggatttcttaaataaatataatttacatgaccataaaaaaaattgattaaaaaattatttaaaatattaaaacagataaaaatatatcggt

SEQ ID NO: 306823 - DNA, 945 bp, Cannabis indica
tgcaatcaatctgaagatcagccaagaattggatgtcaaattttattaaagcggaatacaagctcagacaaaatgctggtgaataaggttgcttatgcaacatttaaaggccaatatataagttttgaatgcagataatcagctaccatcctacagaatctattgttaatacacaataaatatgttcgtgacaaatgttacagaaggttatttctgatttttgagtgtgcatagttcaagatacagaagtttatacttttaatcacacaactataatcataatattggagggccttgacacaaataggatatagaaaaagattcaaacttcaaccacataagatcaatctgaagacatgttagagttcaatctacaaactgaaaaatgagattaagtatgtaggagttgctatgttgtagtttcatgaagcaggggcataaattcatgccatataaatctcaatgagattatgtaaagaggtatacaaagagaggaaaaagtatttacccgaaagcattgtaacttagttgcagcagagacagctagatcagaaagaacttcattaggtaatggctttggcctagtcatactagccactgtaactgcatcattagcttccaccttcaaaaaaatacattttatgtttttaacgttcaaaaccaattatgctagttgaaaaacctagttataccgattcaaaatatttattaaaacccataaaaaaatttacacaactgaaacaaaaccaactattccaattcaaaatggatatacatagataaatataccaaaatcatcattgatagagtatccaattcaaggagggatgaaagagacttacggtgttgatgagatctacaatgacactcagctcctgttgagccaactgcaaattctccaccatgctctgccatggccatggcgttgagctctcctttgcgctc

SEQ ID NO: 306824 - DNA, 2194 bp, Cannabis indica
gcctacattgtaggatacttggaaaaatattcttgctccacctcaacctcatcttccttgccaagctcttctttcatggtcttctcgcagaaggcaagcatggcttcaacccttcacctaaaaagttgaattccatatcagggttagccaaccaggtctagtaaatggttctcctggcaatgctattgacccagtttttggtgtcagccttcgcctcttcgagcatcttgtcaaggttggcctggagggacttgatagaatcctgaagctctttgatcttcttttggtcagccagacattgcttttcagcctcctccattatgcgagaaagctcagatttagagtcattcctttttttggccatggtgtccctttgctctctagtctaacgaagctcagtttcaagcatttcagcccgctaagacgctttgtgctgagtatcaaaatagagaagcaatccctgagagaaagaagcaaattaagaggagtaaaaaatgagaaaaaatgagaacaataaggagaaaaagagactaacctaatgcatgagttcataactccttttagcaagaccctcaaagctgccttgcgtgagaagctcccagtcgctagacccaagagtttggaagtgaccccaactattggtaacatgcaacgagcagagttgcgaaccttcagtcccagccttgagaggcaaggggaaatgaaggatcgagaagaaccatctctggatgagaaccagagaacttcacctggtgcactgacccagaaggctgctcattggcactcgtcacagctgaaactgtcttctctggagacttggctagctcgatggtgagttggctttattttttcatgttggcaatggttttagtccttttgggtttcttgctagaactcgaggcataacttgtttgggcagctctcttcttggacttcttctcaaccaggggaggactgcttaaaatgttttccaagtcgaggtccatatctgcgaggcgaagggagtacatcagcacttaaggaaaaataaataaaagcaaatggggaataaactcccactcaaagaaatttaccatagttatcagaaggtgacaaggaaggactacaataataactaaactccctagaccctgtgatctcgtaaatatcagaaggagttagtggagataaatcccaacttgaatttatatggctcgacctatctaggttggtcccatattgcttggcaattccatagtatgaactagtccagctaagctggacatgaaacctagggtaccaactatcgactttatgtactatgcaatctatgagaaaggggttccaagtgtaaaaattatattaactatctcggaatcacacaagtgtgttatgctctgccctaagcacagtaggtgaccatccacattgattaccttgggatgctccctctttagcttctcgaggtgttattttctggagataatgtgcgtgagccacatagtctttgctctcctcctcaactggaactgggaaaatctggcacgaagaatacttgggtattttataatcacaaataaattcatttgaggcaagaaggccaattgtcctcaatttcttctcactacataagaaatctgctactcgcaaccggaatggaagacttagcaggattctatgacgctcggccatctcaggagtcggaactggtgtctaggaaaccgctgtaaatagacaaaaacataataagtgacctcaaagatgtaagtcaatacaactaaaagctaagttgtttagagaggtcacttacgtataatacgaaatgcagatgtatttattggagcgaagccagttgttctgaagaaatcttccttaaacttagtcttgtttggtagcctcacaataattctgcgatcattagtgtgggtatagagataatagaagcccgctgcacattgcttcctcgtaggaattgctttaatagaataaagatagacaatttcctggtgagtgggacactcccattttagaatcttatacagaacccttagacttgcaaggattctataggaaattggaaccaattggaatggagctattctaagatggttgataaactctttaaagtactctctcagggggagaatttctccagtcctaatatgctcgaggctccaagcacctatcccagccgagctactgttgggttttatgc

SEQ ID NO: 306825 - DNA, 1127 bp, Cannabis indica
catttcgaatctgcactttgggcttgagttatccagttaaataaaataaaaaagttttagaaagaatagtaaaatcaagtatcttcaattttgaattattttatactaatatttttatccaaattagttaaatgctaaactttttctttttcttcaaatgttcaaaaataatctttgtaagtattatttttttgtcacaacaactattttagtaggtatttgaattataataactaataaatagaactattttaatatagttgtaatttaaagtaacatggtgaagaggtataaaataatcaagagtatataactatatatgtagtggtaagggcgtcaaaatgggtcagacatgataatacgattcaaaatgtgcaagaaattaacgggttggttttgtgtcatttttcgagtttacatgtctaactcgtttaataaacggatcgtgtatttgtattgatacatctaacacaagtactaatttgttaatgacttatttaaaattaattaacgtattgaatatcttataaacattttaatcaagtcacaataaattaatgggttggcctgtttaaataatatttatttatatacgagttttacaggtcgtattgtgttaagctgtttataaacgagcgtatttgtgtttcaatttttaattcagttattaatcaaattttattcggatcaagcatatatttgtgatacatgaatcttccatgacacaaacacgacccgtgaacacgaattgtcacctctatgtagtagtaaatattctcgaaacacttcactctacttagcacaacaaaagactcaatcccagtagagatgattcatctcatgaagtaagggaagcaacttatttgaacaaggtaagaaggagacatggagaaagggaacatacactgaggagagttgttcactaggttcaaatatgggataatttaaataaaatacaaaaatatggtctgtatggagttttcaatatttttacagtttttaaattttatttatataaaatacagttttttggtgtactttgtattcttgttattttgttgtaatttttttttattatttgtatattattttttatgttactttgattagttttgtttttttttttt

SEQ ID NO: 306826 - DNA, 3222 bp, Cannabis indica
ttttttttcttctttttttcctttctttcattcatctaaagtcattagtatttagggtttggaagtaagattcttggctaaatttggcaaaatgccgccatttttgtgatcaaacatgtctttgttttaacccaaataagccacattaagctccataaatagaaaaatttccccttttgcacatattaagttttgaagcttcttcttactttgtgtgagatagtagaagaagaagagaaagatttatctatctggctataggaagaagaagaaaaagggttgaagtaattaaaatcgatctgggaatatataatagggtagatagggaagggagattattattattatggctagggagaagattcagataaagaagatcgataacgcgacggccaggcaagtcacgttttccaagagacgaaaaggtcttgtcaagaaagctgaggagctctctgttctttgtgatgctgatgttggactcatcatttttttcctctactggaaaactctttgaatactcaaacacaaggtatatttatttactttaattttgatctgataagattaaatttatggggattcatgagttgaaaaatatatatatatatattaggtgactctatttcaaaggaaagtacgtatataaattaatatatatatatataatattagaagctggttatatataggtatgtatagccttctatatattggaaaagaaaagaaaagaaaagggctgtgttagtctataataagatttctaatattaagaggggaaaagattttataagaaaatgatagttattaatcctataattaatcaatttctttcttaaaaaaaattgtttagataagaaaaacaaggtaacatgcatgagtaagtaggggtagttgttgagaatgaagatatatcatgacctagaagattcttaggtagctttaactttgccttattaggttagtaaagctgtgaatcttccatgaaatattatcatagtttcttatatatatggtgaccacataggatgctgtatacttgtacttttttgtttttagacctcacttctatcattttcagcatctaattttagaaggggcgagaaagtagcccaatgtggttaaaatcacataaaacattacaaaaaatatgtataattgctccaaaaaaaatatatatataatgttaattaatgtgtgtgaatatacatacatagggtattagttgcaacttgcaatgtatgtgataattattaattttattggtatttatacacaatgcatatttatatattggtgataagatgttttgttttttctcatgtcttttcacatttgaaaattattgaactccatttaaacaaaaaggctctatatatttgtaactttattatgatattatttgaaatgctgtaccatggtttccatgccagtaaagctgcacaaggttatgattggcaaaagtttttgaatctatactagtaataacttcaaagatgaaggatctattagcaaatataattaatggtacaagttgtacaaatttatatacaagcacgtgtactgactggtggtgagtatatttatataaccattataattagtttgtggcttcttatattatttatttaattaaaatgtgagaccccgtatgaaatgcaccagactaataactttatgccatatattgtttggtttggtgtaacaaaatttttagaaacctaattactttcttgaatttgatctcttacgaacgtaatggaatgagtaaaaaacttctattggaatttaataattattgctggatactattccaaatttaaattgccgtgtacgtactgatcagtagtataataagctcagagatttggttggaaatttaatatcctttatttttagtaaatgatgcatattgcttttcctacatatttgtagaaagttataataagtacactacaactatattttgtccaaaacataaatatagtagtactggttaaattgaagatgagtatgttgaatgattcacgtattgtaattattttaatatgttaatttttgggtgaaatatacatgatacaattgctttagtttgttggaggatttttaatcaaattattgcatttaaaggttagatattgaatgacatatacgccccatcaaggagtatattgttttttaatcatttacaggagtgccattaatgaaacttctgaaaatttcaggcatagaatgatatatatacaatatctttataatttgaaatttataattattataatttcttgtcaatgtcatgatattaattatgacatatgtatatatttaaatgcatacatgtttaatcaaccattcgaatatatatgtctgctttggtcttgtgaagcatgaaagaaattatagacaggcatcacttgcactcaacgaaccttgaaaaactcgaacaaccgtcccttaagttacaggtaagtttgttaattatattaatttccatgcacgtgcatgcatatattatgtatatataggtatagtttctatggttgggttcgagcatttctgttttggcacgtaaaaaagttatatttttttatatgattaatgcatatgttgtttttaggctaagtaccattttggtttgttcatgttagaaattagtcttgggttgattatattaaaaaaatagaaaattaccccatatgtatactattgttttttcagtggtttttatgtgagttgttatacggattttggttgcgatttaagttgctctgttaattgcaataggagtttttatgtggaattcggtaaaaataccaaaaaaaaaaaaaactgttttgaagtgtaaaaaataaaaaaaaaaaaattgataaaattgagttcgagatctattttatactattttgaaaaaaatattagtgatttttagaaattattttaagcttatatacactctaccatataagaaatttttaattataatttgtacctaaaatacatcatatactacatcatctgtagatactaatactatgtataatttacatatactatcgatgtaagtgtgtatatatgtaggagcaacacacatgcacgtactaccctgtacatcttcttatttgtaaacaaaataattttaaataataaaataaaatagatagatgtatagcaaattagcaatatatattagcatataaactcaactcagcatttaataatacgaattaa

SEQ ID NO: 306827 - DNA, 1222 bp, Cannabis indica
taaaaataaaagaatattctgttaaattgattgaagttttgaagactctttgttgagctttaaatgttaggaaggaggcctgtatagaaatgaggttagagaaagaagtagagggtcataaaaagaaaaatagtagaaatcgaactaaccaactggaagagatcaacacctcgccaagaggtcaatgtaatttccattgttgatcaggttccagtcatcctattggcatgttttaaagtgtactagttttgtgtagcatagtgcgagcaagcctaggaaacctcaatgcctgcatattttggtaggggtaggaaggttccaataacaccatctctggatgggtcacagagaattggacttgatgaatagaccttaagggtttcccatttgtgctcgtagatgtaggcacagaagtggaaccacttggagcatccaattctttctctatgatgattctagatgaggtagcttttttcctattagccccttctttctcttgggagcttcaggttgtgtctcggaagtaacttccttaaggacactcctcttcttgcctcacttgacaatgatgctaggactgtagatgagatcttccaaattatccaattctacaatggtagaataaaggaaattaaaatctgacaaaaaaaaaaaaagagtaaacttaaagtggcgagattaaaactcccacctaaatgatcaccaaaaggactaggcaaggaaggattgctattataattattaaactccctagaactagtgatcataaagagatcataagataaagtgaaaatatatcccaatcctgactagcagccctattggtgtgaataccatattatttagcaattccataatacgagctattacaagttagttggacataaaacttggggggccaactattgaacttataggctatcaaattgatgtcattccaaatatagaaattatattggctatctttaaatttcacttagggagtatgctcggtcctaaggatggtagtagaccatccataaaaacaagaagtattacctcagggactcctttcttaaacctcagtgacttcccaagtggttacatttttaagataatggatgtaaagcccgcttagttaatttggaaattatcagttaattgtgattaattatgaaattatttatagctatttaaataatttattatattgttatttatgttattcagtagcttgcatatt

SEQ ID NO: 306828 - DNA, 1838 bp, Cannabis indica
ctctctctctctctctctattgatttgattgaattaattgaatggaattgaattcatttcattaaaacagagagaaggatttggacgaagtgctgcagtcgcaaaccgtttactccaatgtctccaaaggggttttggccaaatccaaagacttgattgctgcatttgggacggacgatcagtccaaaatatgtttgcagattttggagaaaggagagcttcaggttgctgggaaggagcgggagtctcagttatccagtcagttcagggatattgctaccattgttatgcagaaaacatataatcctgaaactcaacgcccttacaccataaccatgattgagcgccttatgcgtgacattcatttcgccattgatcccagtagtgcctccaagaagcaggtaccccactactactactactactttctctatctccattgttgtaacacacacaaccataagttaagtatcttaatttcaggcactggaagttattcatgaacttcagaaacactttccaattaaaagatctccaatgaagttaaggctgagtgttcctgagcaagggctttctactctcatggaaaatttgaattcatggaatgctaaactgatttctaaggatgataaattaggaacccaactatcttgtgtaagtatctctcattttatttacttactaattgttgtgtaggaaaattacgaacactttattaatattgaagagtattagtacaaaacttagaactctttaaaataactcttaggacattcttaaaattttacacactttagaatcttttaagtatctaagctttttttagaattttctaagatttttacatgtttctattactctctaaagaagtctagaattatctatacttagtagtaattctaagttcattctagaatttcataaaacatccaagggttttctttgtattttctagaacattctagatcggtaatgactctcaacactatttagccttagttttagtcacttctctttcctgtaaatttaacataaaaaaccctgctagaattagaagattgaatttatgattgaaatcaggaagtaaatattaatatcaactgtttcttttcttatggttatcttgattattattctagtctgattgatattgaagcctcatatttggtgttgtatagatttgtgagttggatcctggcctttaccgcgactgtgaggccttgatgaataatctacagggaaagtttgaagttcttgcactttccattcatgcggaaggagacgctcatttggatcaatatgatgaggaggagcatgaagcatcacacttgcgcaaggagaaggagccaccgactgattctgttgcatcgaagaaactgagtgaaaaattgcaaaaacagactatctccacaagtggtggtggtgaagaaggaaagcaaaacaaatgcagtacatgtaatgcggttgtaggcgattcgagtagtgagtacagggagcacttcaagagtgagtggcataagcataacttgaaacgtaagactcgaaatctcccccctctcacgaaagaagaatgcatggctgacatcgaaataggcgactcgagggcagatctgaaggattattcattctagacattttgagtactcgatggattttcggtcaactttgttttgcttaaatacttttttgtgtaaatgaagtttgtttctaacatttagtagtttgagttggaaggaaatctatatgtattaaaacattgcggaaatatgagctcgtttagtatgtattgtattgtattatattaaattggattatatatcatatttttatataatact

SEQ ID NO: 306829 - DNA, 1949 bp, Cannabis indica
agctctttataattccatgtgtcgtgtagaagtcggtgaacatctggctgtcaaattattttttattatctaaaacaatcttttgaggaagtctgtgccaacatataattttttttaccacaaaattcaaaactttcttagaagtgatggttgtcaatggttcagctttcgtccacttggggaattaatcaacaaccactattgaatacggcattcctccttttcctttaggtagctgcctgatcaattttatttcccatatagcaaaggcccatgggctctgcatctacatcaactcgttttttggtgcaagggggatttcggaaaagctttggcatttgtcacatttttcacataagcctttgaatcttcaatcattgttggccagaagtaaccctgccttagtattttcttggataaactttgccacctagcatgattgccacaaaagccttcgtgtacttcagacatgagtcgtgcagcttcttggtttgtgacacatcttagaaatgacatggataagcctcttctgtacatcacaccgtccactattaaatatcgagcagttttctttattatttttcgagcctcactcctgttgttcaaaagttctctaaacctaagataagttgttatgggagtcatccagtttggtgtggtgtccaccatctcaaattcctccatacaagtgatgttgggatgtttaagaaactagattgggacaaggtttgctttatctataattgtgttgcttgacagtcgtgtcagtgctttggctattgcattttcttcccttggaatttccttgatggtgtatcctttaagttgtgtgagaaaatcttaggttttacttagatatgccatcattttatctcccgagctatatattccccaagaatataatttaccaccaattgggagtcactgtgaatttccagatattcagcacatacctcctgagcaagttttagtttgacgataagtgcttcgtattctgcttcattattggatgctgtgaacccgaacttgattgctccgtataggggttgcctcccaggcgtgataagagcaattcgagctccgaccaattgatcagtagacgatatgtccatttgtaacttccaaatctatttaccttcaatgttttcttttggtggggtggtttttcttgctccctttctgattcagtgttttattttgagtttcttgcctccttgcccgtacattcaactacaaaatcttccaaagcttgtccctttaccattgtgcgtggttgataggttatttcatactactctaactcaatcgcccacttgagaagtcaactagaagcgtttggcttttataaaacttggtgtaagggttggtcggtgtaatccttgactggatgagcttggaagtacgaccttaacttcctcgtggctaggatcaaacaatagatcaatttctcaattagaaggtatcagcctcaattagtcttgtggtgacatagtagacttgatgttgaacattatttttctacctaatcaatacgacatttacagcgtattcagttactgccagatcaattgctaatttttccctatccagaggttttgagaggatgtggggttttgcgagtttctttattagctcttgaaaagcattctcacattcctctgtccgctcaaatttcttgttgccttggaggatgttaaagaaaggaacacacttgtccattgatttcgagatgtatctgcttagtgtgactatctggccaattagactttgcacttcattcacttttgttggcgaatttttatctagaagggcttgaattttctctggattagcttctattcctagagcattaacaatgaatctaagaaacttacccaagcttgcctcaaaggaacactttaagagattgaatttcatattgtattttttgaggattttgaagcattcat

SEQ ID NO: 306830 - DNA, 2586 bp, Cannabis indica
aaaaaaaaaaaactcaagttaagacaatcttacttttattcatacagtaatgcctgatcatcttgcagacagacggatatactgatggaggaagtgcaagataaaatagtctcctagataatccattttcactatgttttgagacttcatgctttgaaatttccttatccaatagccgaaacccctcctcagcatcataagctccacaaacgtacttgatctataagaaagaattactagcaattaaatataaccataaattcatcaataatagttttaggactaaacggtgctaaccagttgcaaaaactgtgaaacagtttccaagtccttggatgagccacctttcttagggataagatatctgcaattaaatatttcaataacaaaattaccaaaaaaaaataaaatatttcaataacaaatgctaaattaatatttcaacaacaaatgattcttttgaaaagaaatgaaccatttggacaaaccaaaattagattaggcatagttctcttcctcctaactagaaaagaagatgagagagtgcactaaatattatcatctgtaacaaacaagaacaaagcaaagattaaatacttacccacgcaagcggtctcttagctcatcatccgtgatcttggttcttgcataaccaaaaatgtgaacttcattggatggaagaagtccctaataaagaaacacacctcaaataaagttaataacagcacttagtatcgaatctcaaaaaatctacaaaatagcaaagaagaagccattaaacctgtttgaaaaggttaaaaagtgccggaaatgtcttcttcttggcaagatcaccagaagctccgaggacaataatcgaaagagacccgttttcaggaaaattttcggcctctatagactcagaatcgtttttaaaactgcttcttttctcaatatgccactgtcctgatcccattttctaatctctgcaacaacaacaaaaaaaacaaatcaatcaataaaccaatctgatattcactcatttcttcaatcaaatattcaaaatcaataacaattatcaaacaaaagcatgataattcaaattcatttcatttaaacaacaaaaataggttattaaaaaataaataaaaacgaagaaccaatcacgaacaagtttatacaaatcaaacacacatgaaaatgatcagaagactaaaaacacaggattaacagtttatgattggagtgaagaatgaagaatctttaccagattgcagaattctcagaactcaaaactaaaagacaaattaacacagagacagagagagagagagagagaatttgaggagtgaaagagatgggtttgaattgaattgaagaagaagaagaaataggccaagtttgacaatgaagaagaaaagtttggtggttggtgaacaaaattaacagatattattgtaattatttatatatatttttttatattaaaatgacaaaaaaattatgcaagagaagtcaaaattttattaacagaatattattgtaattattattaataaataaattctctcaaaaaaattattaataaataaataaaataggtattgggatatctttgcgttcttaccagccgcctcactagtttttacctatttttatattttattatttattttctcacttattttttttttattattattaggagaattatttatatttttattttttattttattttaaatttacaatttaagttgttctgtattttttatatggttgttatgtaaatttttgttgcaatttaagttgatttattagttaatatgtgagttattatgtagatttttgtaaaaatacagaaaaaaaaaaattaaaagtataaaaatgaaaaaataaattcttgttattattatttatttattttgaaatggatataattgtacattttgtactgattttaataaaaatatttttagttatatttagataacattcttttttagtattcagtaaacagcctaagagaaagttgtaaaaggtggattttagttttaccttattcgggaatctattttatccttaaaaaacgatttaaggcatttcaattttattaaaatctaatatatttttattattctaaaaatacatataaataaatatatatatattaatattttacaaagaaaataaataaaacaaaaaaatgcatgttaaaataaaaataattaaaattattcattatttttaaaattattaaaataataaaatgcttaaaattaatacaaaatataaagcaattatgtgaaaaaagaaaattttgaaaaaaaaaaaaaagttttaaaaaataattaatttaatattttttaataaatggagtccgagtatctttgtattacacatcctttctcctttaatgaatatttgaaaatacctaaattatcttttactaattataatgattcccttataaaactttttatttctaactggtgcaataaaactaagagggctaagagtatttttaatagggattattcattagagtggtcttctcaaatatgtaatattttaaaattaattttatttaaagtgttgcttaacata

SEQ ID NO: 306831 - DNA, 1760 bp, Cannabis indica
ttttttttatctttatatagctaatagttattgataaatttgatttgtcactagtcatttaaattggaaacttagtattcttcactttcctgatacttcaaagctggcagcataatatatacatatatatattcatatgttaattaattactgaaattttaataatcattattagatcgaaagttagcaataatagtaattagtaggtaaaagagttatatataccatataaaaagataataaggcaatattacaggcttttgggaaccatataatttgcctgcgtgtttctatttcttggaatatttttagctatctatcgttttctttctttgttttgttttctttttatttctctgttattgtatttttgtccttttctaaaagtagaataatttaatctttctggttcacccaaaaaaaaaataataacaataataaaagtagaataatgggaatatagtgggctaacatttgatgatattaaaccgaaccctttattcccatatattgacttaaaccgaaagttgttttgatttgaaaagtcccaacatataattacttataggaatcaaacgaacaattcaaatctcctaattaactcactgcctaaattagtttttggtccttagaaatctcaagagccaaataaatttaaacaatatatagctagtgcatgtaattaatttgatgatgatgtatatattttttagagtgattgctgatgtacatatacgtacatatacatatacatgtacatgtttaaatgatgaaaaaaatgcctataatatattatttctctaccaataagtatctatatttaattaggaccctcagtttagaatcttcgtcatccatgttggaaacgaagacaaaaaaaggttgatcataaatatactttagcagaagatcaagaatctaccattggcttttcgatgctctttttccaaaaacatgtgaactcttaataattatcatgcactactatggaaatggccacgaacaaaatacttttacataatatatatgtttaaataaaggtccttggcttttggaatgtgcttaaagtctcttcaccccaacccttctttttcattttttctttttctatttctatatcattaatggtcttaaattctacgttcggaaattaaaggcaatatgtataatgttatttttggtcgtaagataaattattggtttggattgaagggggatctgttagattcagcttgattgaatggtttcgtatcactttcttctttttcgccatggaagagaagagctaaagagtgttgtaggactcaaacttatactattgtgtaatgcatgtgtcatacaccacacctaattagttgccaatatttgttaaaaatttaaggatgcaacacgaggattttgaggtcacccatcttagtactactctcccccaaacacgcttaactgcggagttctaatcgaatgcggtgcattatagtattgtttctattccaacaattcacatataaatactgttttgattttcattcaactgatgcaatttatttgtagcttaatggcgaaggtttatatctctgacatattaaatatagctatttaataaaaattattggtttaatgatttttttagttataattaattgttaaaattactagttaaatcaatcacttaattattatgattctttttttttaaaaaaaaattaatcttaatcatataaatttaatttaaaaatatcaataaaattaaataattattt

SEQ ID NO: 306832 - DNA, 902 bp, Cannabis indica
aaaaataaaaaaataattatttgaataaaaattaatttttttaaagagttgaacgagttgactgagttgaccgggtcaacccgccaacccgctaaacccgaccaaccgaaacccgccaacccgtgactcgccaacccgccaacccaccaacccatgccctattcgggtccgggttcggtttcaattttttgaacccaaaacctgtgaacccaaaacccgccaacccgaaacccggtaaaccccgcccgatgttcagccctaaacagagaggattagagctagactggtggctagattcgattttgactttaagtgattattgcgatgaagcttgtcggccgtgagtggcttcaaaactgtggtggagcttctgtgatggagagagaacactcggagatgagaaaatggtgactagggtgcgagaaggtgtttactggaaagggagattgaaatgagaagaggatagattagtgaaaggcttttagggctaaatatttggtggtatttagtttaataagtaaatattattttcattatttttttctttctttccgaaacccccacattagtgagaatagatttcaaaaaacccccaaaaaatttccaacttcacatgctccaagggactgcaacattgcttcagaatagcattttcttttttgtccctgcttcaaagtgttgagaaaatgttgaaactttgctataaatcttggaacctcacgcttctaaaaacaaaatcttacttttcacaacatataaccagtttcccttttcctgcaatttcctattttgtacctgaaataaatcaccaccaccattacaaaaatattagtaacaatagagaacaaacaaatatatatatatatatatgtaattatataaatatgaatatatattttttt

SEQ ID NO: 306833 - DNA, 3930 bp, Cannabis indica
tttttttgggtttttggggtgggggtttgttggtggtgaaagaatggaggcgaggatgaagaagtaccggcaagtgagtccggagagagcgaaagtgtggacggagaagtctccaaagtaccatcagaatcggaaagttcctgtagtttactatctctgcagaaatcgtcaacttgagcatcctcacttcatggaagttcctatttcgtccccggaaggtctttgtcttagaggtaattatagtaccagaaccagaaccagaatcatctctttcatttcaattatttatatatatatatatatttttatgttttatgagttattcgcagatgttattgagaggcttaatgttttgagaggcagaggcatgtctaacatgtattcatggtcttcgaaaaggtcaaattctttcagttctttatatgataattttcaatccttggtcttttgggtctgtgttcatagattttctttttggctgtaatttattgcagaagctataagaatggatttgtttggcatgatctcagtgaagacgatctaattcatcctgcccatggcaacgagtacgttctcaaaggctctgagctctttgaagattctaattcaggtataatagtttcctttccttttctttattgtttggttgcccagaaaatatagttcgagtagaaacatttcgatttcttatattgaatttgcataacaacacaatggaattccgtgaatgtcaaatcaaatctgagagctgaaacttctttattgaccaccagatcggttcagccccgttgtgaatgtgaaaatgcagaacttaaatttgaaacaattaccaggacctacatcttgtagaagtcaagacgattcttcatcttcatctagtctaaatgggaaggaaactaagcattctcaagaggaggaactctcccctccagtaaaaagtcctggctcttcagctgtatctcctgagtcaagagctgggaagaattcttccacatggtctaattcgctgagcttgactgagtataaaatttacaagactgatggttcagctgatgcttcaactcagacagaggaaaatgtgggtagatcaaaagtgcgcgaaacttgtactagaggtgtttcaactgatgatggctcattagagcctgactttagtgagagctatcaaaatcgggttctgaggggaaaagataactcagagatttgcagtgattcagtttcacctcctccatccacgtctagtgcctcatcctctggtgggaagacagaaactttagaatctttgattagggcagatgctagtaagatgaacagtttcagaattcttgaagaggaagaaattcggatgccaaacaatgcaaggatcaaggcttcaaatgttttgatgcaactgatctcgtgtggttcaatatcagttaaagatcatagtcttggcctcattccttcgtacaagccacggttttctcattcaaagttctctccctttttctctagttcgattatgatgggggagcttgattgcctgtcagataatccaaaatttatgggtttaagattagaagataaagaatattttagtgggagcttgatagagacgacattgcttaaagaagatggtcatacaactctgaagcggtcatcgtcatataatgcagacaggttacttttgcccattgattcagttaattttacactatgttaaaagcttttttatgtttcacaattatctcttatgctgcaaatataaattattaaccatgcaagtagtttggttaatttgttattccaagtactgaaagagatgctcaacactgcagctcagttttgtttttgtgctgagccttatttaatgaagacaatgccacaattattaagctagtcaaaagtgaagttaaacttcgtcatgagaagaattgcttaagcttagaagatttacttgtttcttgtttatttggctcttcagttttatattttcaaatattcatgtttgctagataacacaaccttgcaggacctgtaagcaattggaatcaaatgaggatactgaagagtctacctcagggcgttcaaaatgcatcccaagatcgatcaaggcttcactaactaagcaaccacgatgtgattctatgaggtccccagcttctgatagaccaagaaactcttctgatggtattgatggctcgaagatcatttcaagcccatccaatggtgctagtaaaagaattacagaaccttcaactaatacggaatcgaaaagactagattcttttagggaggaggagaaaatgattaagattgaagaaagttaagtattgactcctcattttgtacattatttgcttaagatatcatcaaaataactcccaaatattatttgttcacatgggctgacatttttgttaatttcctccaacaggcttgcttcaggagctagggttataatccagtccaaagctccttgccatacaaccacagttggcagcacatagaggtcctctgcaaacatactatcaagtaatgcattcacaattttaggcactttgttcatttctgtacaattagggttttttcagtcgttgtttgaatttcaaatgaggcaattttttttgggcgcgtacgtgtaaatcatctctttgtaaattttgctagtgaaatgaacagagaaaacctttgcttgcaaagttggggattactggtagtttagtttagtgtgttgacagacactgtggtggtcctggtggaccaaacccctgagtgttgagaataggagttggatttttggtttagtttttcaatagggattgtacttttctgtagctaacgtcaaaaaaagatcttgtcattttactagtctcatttcactttttttcccacttaatttattttatttcatattagagtttcacataatagcaatgctttttataaaaatttgatattgttgggtggcaaactagcaatttgcatttttcataggattcctttgctttgcccacgtatgtaattgagttttgacttaccattttttctttttttgaaaaaaaagtcagatatttgactcgtagttgacagtgaaaaaggggtattgtttatttatttttcattaaataaatatattgaagtcaaagtaaccaaaccaatcacctaacctggtccttgggccctggctagtgctacagaaaaatagtagagcggaaattataaaattatctcttgtttctttctttgatgagaactttgcttgttatgttaaccaaaaccatagtgccacataggacatagccagtgtgtttttcttgtcgttgtatgcaagtagggttaaaataaatgtggggtttctgctactggacagatgcagaattagaacattgctaatagttaattgtttggttggtttgtttgtttaatttttttatatatatatatatatatatatatattatattccttgacaatttaaatgtttgtttatgaaagaagtggctaggggcaatggggtatgggcttctaaaaagttactctcacgtgtgagacatctttctttaatgtgttttctcagaattaaggctttttgagaccttaagagttaatagtgaggcagtggttggtggagaataaattgagctgtctatggcttttccttggttgtagtgcatctgggttttggggttttctttttccatcccttttgaaaacttttaattgctttttcttgtggcaaatcaaatctttcaaaattgataacttgctcaaatacacaacaatcaatcttctttttacttttgggtacttaaatagtagtagtagaagtatataatacagaaacttaaagcatactcaaaaggaaaaaaattagtatgagagagagagagagagagagagagagagagagagagagagagagagagagtagtagtagtagtacgtacg

SEQ ID NO: 306834 - DNA, 1028 bp, Cannabis indica
ttttgttttgttttgtaagtcacttttcattctcaattcatttatttgtctcaggcttggtgtgtgatcgggggcttacacttggtgatttgttgggagtattgcacgattttttctcccgcctcggtatgcatataggcgctgtttgattattttgtatttatatccctatggcgatttgaagattctttttctgtatcttatgttgatgtcaggcatgtcaaagctaaaattcaaacctgcttataatccatataccgaacccagcatggagatcttcaggtgataaatcagtacatctctgtctgataactcttttgcatttgatgatctgaaggggaaatgattttttttcttcagttatcacgaaggcttcaaaaagtgggtagaggttgggaattctggtatgtttagacccgagatgttgcttcccatgggactcccggaagatgttcgagttattgcgtggggtctttcacttgagaggtaaaagagtagaccttcatcaccatcatcatcatcattctatataatgcaaaattgaatgtttgctcttgtgacaaattttaaccaggccaacgatgattttgtacgggattgacaacattcgggatctcttcggatccaaggttagaccatattattattattattattattcaaatatattttaagaatgtagtttgttagtgtttccacattgcaatttgtgtaacttgtttttttttggttttgtttcttaaattgcagatcgatcttggtcttatcaagaaaaatccgttatgtcgccttggaatttagaaactgttgtaaaatttttgatttaatattttgtggagcaatcttttatattatgggtgtaaaatgatatttaacgtgagaagaacgttttggattttgatcagaattttgtaaaagcaaaatgggttataacttataggaaaattctacaatgcacacccttaaaatggatacattgatgcacccctataaatttaagcattcgaaataatttttcagtcaaattt

SEQ ID NO: 306835 - DNA, 1922 bp, Cannabis indica
ctcaagaaatgagtgagtgtgtagctattttattatatagcaaagaaaaacatacaagagaaaacaaaaataaggcccaacagtaagtttgttagaaggtaatgattgcacaatgattgtatagccttaagattctctcattcagtacaatcactactcccatgccagctcatgattggattcaatttctttaacaccttctccatccaccttgtattcgcaaacccccccccccccccacccaccacacttgtgggtgctagtttgtgtagtatttgtttagtttgattaataaaatcttcttttaatagataaagaaaaagtataataatacagatgttaccagttccacaaagaatgaatgagaatttcttttgtaaccattcaagttaatattacaagattttcgagaaggaaagcagaaataaaacaagttacaacatttctcacattttgtacaacataaacacatgttactatgatcaagcgatactatacttttctcctcaagtgtttgcgtctcaaatttatctctctcttttctaagtgtaaagaaaaattataaaaaataatatgatactattatttcttacaaaaaagaagttccaaattcgaacttctccccctctatttgtaaaaatgacaaaatgataacaatactctttcgaaccacgttttatacacctttccaagaaaagctacctaataaacttgagctttctcaacattgatcataggaactagctctaagttcttatctttttcctcctcatcgtcaatgttaatggatgcagaattattggtcaaaagatctgaaggaatgatagcctcggattgaccagacttggggaccaaaaatatcaaagccaaagtcgaaaacctcaaaacatttctaatgagaacaaccaaccataagtttgtaaagtcatttctagtgacatgaaacagatgaagcaccattccaccaccccattttgaggttaaggagccaaggctatcaatgcacataagtagggcaaagaaggtgccttcgattccaagagggcagagtcgactgctcaacacgatcataggcatccatcgaattctgctcacgattctagaaacacattcttccataatcacaaacaagtagtctgggattccgagggctaagttccacctaaggatgaacatgaggtccaacattccacacacactgtagagaagttgtgccatgaagagtatgcttctgaaagggtagtccttaagattcttgtggtagattagtactcctaccatagatgccaatgcaccaatggcataaatgatccccacaaactccttttttgataaataacaagttaattaggtcaattgagaataacacatgcatttgtagtttgtgatatgtttaagctttgtgtaatatacctgagagaaagcaggaccagctttggggtcagtgtaccaataaaaatggccttcatgagtactaaaactgagagccaaggataggaacatgtaaagtgatggcttccacacttgagggaatcttattgttttgtacatgccccttaatgccaatcctaacttctctgttgactgcacacaaatatcaaattttcatatttagttaccacttagttgagaataagaacagagtatgttagagaaagataaagtgtttgagaaatgtatcatatgtcatgagactactggtattttatagagatcaattacaagagaactcaagatctgttacaactgaagaaaacaactaacaattaacatttgcaacaaactaaactgatttagctaaccacttaactaaccgtaacattagagtatgaatactctaaaggctgatttggaacgtcgtattaggtcgtattgtattgtattatattaaattggattacatatcatatttttatataata

SEQ ID NO: 306836 - DNA, 507 bp, Cannabis indica
catttaaaaagagatttttaagtaaaaggcaagcttaattcattattctcatctaaatccagaaaagaaaactataaaaatgtgaattaggcaaccaaccaaacaaacatttttatagtttcaatctaaatcattcgaattgaaaggtttactaaaacaatttattgatcaaatcacgttttgtattccttttttttttcttcaagaatgaatggtaattaagaagatgaagatgatgtgatcgaacgtaccttgagtgcaatgcttggcgttgaaaatcttgcgttcttcagctggcgaagcaatgagtaaggcaggttctctttgactacgtttgacccaaaaatccctcatttccgaaggaatacccatttcactaaacttaatttattcttagttttcaataaaaggtttcactttgccaaaaagaagagagagacaggagtgaagaagaagaaggagaatcgaattgtaattgcttctctgatttttaataataataataat

SEQ ID NO: 306837 - DNA, 2097 bp, Cannabis indica
atgtatagaaaataagattaaaacagttaattaccacatgtataagaaaaattaatcatgtgtgcaatgaaatctttaaactttatttttagtacttaaattatttagaattttttaaaaatttataattagtcctataaataaatataacattcataatcgtgaaaataaattagactaaaagattcttctgaatacccaaataaataaaaatctatcgaaactttcttttttcttttaaatttaagaagtgtaatatagacatactctacaaataataataaagcaataatagactaaatagcaaaaagatgataaagagaatcctaaaaccgctgacttatgttatatcaagaaatagagtgattagctttattattgcactatcttttgctttttgttttaaactttaatggaattgtagctctctctatttatttatttattttagttttcactattaagttatcaactcaaaagttagactgaaaaattaaaaattaaaaataataaattttatattttgtgatatgttataaatataaactcaatacatataattaataatattttcttcaaataatttcaaattgcattttagaaaaggctatacggttaattatttgtgcaacaaaatatagatttttttttttcttttattagaatattatctttttgtggaaattaaaatttcaaaatgtaattataatagccttttggaagtgcttgcatggattatttttttcagaaaaaaaaaaggcttggggtataatgatgagctaataatatgagaatccaattattatattttgttttttagaacaaaagaaaaaaaaaaaccttcagaaatattctgaaagatctcctccaagaatatatactgtatatactaagatatatttgatcttattctctgtactttatttattaatttatttttctgttttgatgatactgatatatatcaactcttgactaagtaacattaataagtaattaaaataataaattatacaaattaactttacataatgaagataaagatgataattagatagtgtgattagtgtccctacatgatgagcaatattcatatttattcaacctttataacaggccaaattaatcaattactacctttctacttaaataaatttgtcaaaaaaaaagcttttttatttaattatagttaacatctcatgatcatataccataatcaactaattagtcaaatagctttaatttttaattattttgtacaatatttttgttttgataagacaaaataatttttaagacacactcgacgttattttatttgaatttttaaaataaataaaataatttatttttatataataattcaaggggtcttttaatttttttttcttttaagattcaaaaaattaattggcaagaaaatttgcttagaaacttatttaattttctttatttttaaataaaataaaatcctatatattcaaggtagagacgagcctgcattttataaaataagattatgaagaaaaaattcaccaagagtactcaaataaaaatgtcataaaatattatatacccattaccaatattaaagaggagcatatataaatgtatgaaaatgaatacatgtgtaaaataagtttaattatcaattttcatttttaacattacgtgaacaaaaatcgatatgaattattattatttgtgatcatgtttcatcattgcatgcatcattgaaatttgcatctgaggagattttattgagtttttccatattgtgaactctgatcaaacagtgattcattgcttaatcatcctccacaatcaccacatatcaaaaccaattgccaaatttatttagccacaaatcccatataatcatgcacaacattctaggcaaatatatatagagaaaaatattaaaagatattaatataggaatggaatgggaattggaatggaatggaataaaattaaaatggataaaaaaattgataaaaaatataatttttttgttacattggaatggtcattcattccttttaaaatggaatagtcattccaccaaaatggtaaaaagagcattccattggaatg

SEQ ID NO: 306838 - DNA, 1468 bp, Cannabis indica
ttttttttttaaaaaaaaacccattaatgtatttgtttttcttaaaaatgcactaagatatcacaatgctcttagtcttcaccacttgtacaatttccttttcattttccaaataagatatcatcatatcaataaacaacatttcatgactcaaagtctttttctttattgggtaaaaggcatattacttaaatacttggctgtaatcactctaacccaccaataaagcaaaaaatttgatccaaaaccataaaccaaaatcatgcactaacacatatatgtatatatatgtaattaaaggttgaaactttggtaagtaaaagcaaaactctaaccagaaacatcaaaccattgttgatttgtatgatgccatatgagtcatgattcttcttcttctcaccataatctttgagtgttttttttttctttatttctttctctttctttaaaggtcctcacttttccacagagaacccactttaggctttaggctttagcccactctctcttgttcatcttcttactgagctttctttctttctttgtggagagaaagaatcactctctctctcaaaaagaatatattctttgctttacagattttagtaggtgggtttgatttttttaaatctctaaagctccaaagaagatgccaaagttttcccctccaaatccacaccattgaactcaaaattcccatttgatttaaagttcttatctttttcccaatcttgagaagaacaaattcccatttggttcagccaaaaagatttgatttttaaggttcatcatcatcagaaaaaaaaaaaacagagaagaaaatgaatggttctgttcttgatggtataattaataggcttcttgaagttagaacaaatccagggaaacaagttcagctttcagagactgaaattaagcagctttgctttgtttcaagagatgtttttttgagacaacccatgttgttggagcttgaagcacctgttaaaatttgtggtataccttaatttaacttacttcttttgattatacatgtgatattctgttttgggtatcctttaatttttcatgttcatatgtatatttgctctgttttggtttatgtattatgttaaaatctttacaaattatggaatttttgtgtaattagaataataattttgataaagttaggctttttattcaaactataattcatggcaattcccattcatctgtaaacatgttttacgtatagataattaagcatgcatgaaagtagattaacttaattaatcataaaagtttagtgttacaatgttactttttttttgagaaaaactaacttgagatgatttttcaactaattcaaacatcaaacacttatctttgtgatttgatttctaagggccgcacctgaactaagacggactaagcccgtatctaagacctacctaatttaagggcccaaaaaaatattttcctttta

SEQ ID NO: 306839 - DNA, 1649 bp, Cannabis indica
tgtgtaatagtaatagtataaatgtacagatatagtatattcaattaaaagtaaaatacaagaatgtaaacacataatcaattgacattttattattagatttttttttttttttttaaaaaaaggttttgttcatgtatggcaaaggatgggcttagctgggctttttgcttcatgagccctggaaaagagttaggcctagcccattcaatcgcaaagcagcttttatagtggcccttcataaggaaataagagttgactatattaatcagttaaataattaattaaaatgggacaactctttttttttcacttatgataacatttttggagcaaaaaatactaaaatgggataatagcaaaagaggattttttttttttttgagggaaaagcaaaagaggaattctttctaagaaaaaaggaattagaagaaaataaaatagaaaatagaaaatagaaattataagcagcaaaccacgaccaccgccatggctgctgctcaaccaaggatgctgtcttcccttgtagcttctactcactttctacattcgccgccctctcagcctctccaccacatctttcgctacaacacaggttctctctctctccccaatctccattgaatttgatacagtagtactcaggttccaagcttttaaaaaacctcaaaatctttaaatttccaagcttcaagcaaaagggcagttagtatttaacaccaatacaactatttccactaaaatttactgtaattcttacaatatgaattcgggcaaaaccatatacatacatgttgagtgagtgagtgagtgagagagacacaactatttaactttcatttatgtagtctgagtttttaagtgtatgtaagtcttgactgatatatttataatgattggatggattctcatgtttcaaattgtgacaacataggaagaaaacatgtgtacatgcagctatcaagaacattttctgggttgaccaatctcttatttaatagaaggtaatccatgctatgctactatagctattgaaacttcacatagatattcctttttaaaaagattggtagtttgtttatggatttaattagcagaaatgatttgcccaatacaaagcgtaaaccattaaggcctggaaagatctcacctcgtagacctgttcctgatcatgttctaatgccaccttatgtgaaatctaagaagcctcctggcattgccagtggagctgaggttcatgatgaggaggggatagaatgcatgagagcttctggaaggcttgctgcacaggttctacaatatgctggcactttggtcaaggtgacaaacattttttcttctttcttctgtgtcatatgttgtaattatgtatgatcatagctgttaccatcccattaaccattttttttaataagtgttttgtaatctagctctgattgttgaataattggtttgtgtatgattgaggattgtaatttgtgagcttgtttacagtaggaaggagtaaaaagttactcactcctttccaatttagctattttgtaaataaaaacatggatggataggaaagggaaacatttattctttattcttattctcttttacagtcaattactggttttggcaattggataaatgctatgtttggt

SEQ ID NO: 306840 - DNA, 1728 bp, Cannabis indica
agattaaagagatcataagggttaagggcattaaaggcaatataagatatttggtgctccccctctttagaactagacaaaaggatgcagatttttattttattttggataaatttacctctaagcttcatgggtggaaaattaaaactctatctaaggcaggtcgtgcaactcttattaaattggttgacatttttctcctagtgtattctatgcaatccaccaagatgaccaacaagcttccttcaagaattgatgggatggtgtgtgttatcttgtagggccatgaaaaggggaataaaggaatgtacttaattaaaagccttggataatctttgtcttcccaagtctcgtggtggtttgggattcctaaaactagtgaaatgaaccaggctttcttagccaagtgggggtggaattttatatcaggcaccaagtcattatgttgtaaagtgttggaagccaagtacttgagaggaaagaaacttttaacttttacgtacaaagacgctgactctttgttctgaaagggggtagttaaagctaaggagactcttaagtctggagcctgtaaagttattgtcaatagaaaagatattagaatttaagacccttgggtgactcatagttctaaccactttccaaaatcaaatggtatgccatccttggagtttaacttagttgtcgatctgttaaaggaggatggggattggaatcttcagaagttaaaccagttgtttgaccaagcgactgttagtgcccttccgttctggagggaaaccgactggtgaaggtagtgattactggatatggaccaaggaaattcatggtctgttttcctttaaatttgcttacctaattcaggcccttgcgagagctctttctattgttgtgtctccatctttgtggaacaagctttggggtagcaaaattcatgaaagacacaagatcttttggtggagcattctttttaacgctttccttatttggaaggtgcttggacaacctatgcacattgatgacacatcttgcccaatttgtggaaatcataatcaatggagcacctcttcttccattgtaagctagcttatcatctttggaggtcatccttgtggggcattttccaaattttgacaaaaaatcagttcaaggtcctatgtgtaccattttgaaaaatacggggtctattttgttatttaataatatagaaggtctgattggtaatttttgcaaaacacatgatccaaaatggtacttacccaattttaaaaatcatgccaaaagttttgttttttcttgctcagaattaaagggcccaatttgtttaggaaaatgtcattttattttttatatgtgtacaaaagaccattcaattgaaaatatactgtttatactctattgattcggccctctaaaattttctcatattgaaaaatatggttgtcataaaaatgaaaaacctaaattcaacaaatattcattgcttttttttttaaggtaataatttctataatatacctaaatacagtaaaaaattaacaaaaaatatagttgtacgaaattttttacacttacaatttttaaatttatttaaagtaaaaagactttttatgtttttatgttatttttatgttatactcttgttattatgttattttatttaaaaataatagaaaagaaacaagtaactaccaaaacataagtaatatttttttttttgaacaagaa

SEQ ID NO: 306841 - DNA, 1199 bp, Cannabis indica
atcaaatactgttgtatatattttataatttttattaactaattaattatatttaacgattttcttaattttttaaaaaaacaatatttactaacttaattttaaatttaaaaatattttacatctccgtcctaaaaaaaaaatcttatattgatattttttttttcttctatataattatttttgcagagcaattaaagcccttgaatggaatttttcatgggtcccgccgtacacgctctataatttgcaaaccttaaaaacaaaattctaattaaatgatcataaataaaattatgtcgaatagtattttttttctctttaaaatagttgcacaataaatgtaataataataataataataatgaaaaataaataaataaataaaaagagagaacaaatatgcatggaagtctaataagagtgaccccaccaccatagccatgaataggctggcattgcctgagttgcctcttaaacccaatttttaaaaacccaaactttgctaagtgtcaattgcttactcaaatcaaagttcaccactactcagttcttatagctatattattatatatattatatatcagcctataaactcaccaccaaaaacaacatcatcattgcatcaataataatctgtcctcttttcgtctataattatattccgacatttgtttatgtattcaagtgctttgcatgctttcccttaaaccattttcctcttatccgggcttttttgttccttaatccacactttcattccatagatttacgccacttctgttttttatttcgaccctttttcttaatctatccaaactaatcagagttcaaaacacgaggcttcgttttccggttctgtgattcagtttgtctccctgtttctgggtatatatttgtaaacaattttgttgcaggtaaggtgtttgattgagtatcttcaaatagaaagctttctgggttttgatcaaggtaagcaaattggctttgaaaaagaatcctttatctataaatcttactatactccaatttgtggaaactttgaaccttactcttcttctttctgttgggttattcggcgttgtcaattatgagttttgaattattatataaatatatatatgtatatacacgtgaaaatttgaatcttacttttagtctttcttcttgtctgttgggttagtcggcgatttcaataa

SEQ ID NO: 306842 - DNA, 2644 bp, Cannabis indica
ggagatgaatcaggcatttctggcaaaatggggttggaatatcttgaatggaagccaatctttgtgttgtcaagttcttaaagccaaatacctcagagggaaggatttccttaactgcagatacaaagattcagattcttggttttggaagagtgtggtgaaggcaacatccattctgaggaaaggagcttgtaagttggtcgctaatggggaaaacacgaagatctggggtgatccctggattccgcatagaaaagggttccacccgcaacctctccagggtaatccttccagcttgaactatgtagctgacctgatactgagtaatggaaagtgggatgttcagaagctgcgaagcatttttgactgtgaaacggtctcagacatgctgaaaggaggcaatccctctgggattggtactgatagatgggtttggacgcttgagaggaaggggtgtttctccactaaatcggcgtatctggcccaagctttggaaagagctcctcactgtgaggttgctccgaaactctggaataagctctggaatagcaagattctagagcgtcacaaggttctgtggtggagcatcctttcgaatgccctccctgttcgagcggttattgggaatagattccacatagaggatactagctgccctttatgcggaatgggggaagaatcctttgaacatcttttcctatcctgtgatttagcttttcacctttggcgatcctctccctggggcattttcccagtgtgtgatactggcatccgtgtttgggactgggtctttatctgggatttaaataaaagagggattgaagctaacgatgttttcctgtatgcctcgattgtggtggatactatttggagagtgcgaaatgagaaggtccataataactgttctcctgacatattaaaatgtattgacaatgtttgtacttcttatgcagattaccatgattctttgctgcctagtcccagtcttgttctaaccgatgcttggtcccctcctcctcggagtggattaagttgaattgcgatgtcaaagtgggactcaatagtatgtgcattgctgttgtggcaaggaatcatcttggcagtgtgattagagttcagacggctcgggaagacttctcggatgctctgtgcggagaagctgcggcctgctgcttagctgtgtctgttgctttagatatcggatggttatcaacgcacttaatgggattgactctcattgggctattgaaaactatgtctctttttgtactaattcttctcctttatttatactatccagattgcctctctacctgacaatatattgtgtaacgaccgggaggtctaacttatttgatttaatgatttaaaacgctttttctcaaaaaaaatttatcctgaaccaaaaaaataaactttaactaattatttttttatataataatatataaacaggaaaagtaaacgtattataggagaagccaaatagaaaacaagtgtaatggtcatccgatacgcaaggattcaaactcttcataactaactttgaggattggatggggtcctcacaaacgattgctattattacccagtcatctaaccataaaaaataaaataaagaatctcattttctcttcctagtttcctatataaacgatcatatccaaatatactgtttaatataactgaatatattgattaaaagaaaatcaattgaaatatcaaacagaatggctaagaggacaactgtaagtacatgaaacattcatgtaaaaataaatgtttttctggaatttgggtcattatatttttctaatttcatttgtttacatattttgttcatgtgtagaactattggagatcaatccttgcccggatggggtcaagccactcatttgtaactgccactgctcccaaatctaaggcttttacacctactatggatgatgctgctcactctaaattcaggtaataataaatgataatggtaatagtaataaccatttatatggtgttgggaaaccaatgtttttctcaagtacccaactttgaaatgtggtataatgaattgggcagggatttagcaatgaaaggtgagtttgtaccaatctatatggtgatgggaatggtgttggctgcgttgacaatggcaacacacacggcaaagcaacaactgttgcattcaccatctgtcaatgtaagcaagaagaagagagagacagtggctgaggtggactaccctgatgctgctattatctcagctgacaagttcatcaacaagtcctttctaagaaaagtggctcatatccaagacgccaatcccactctccctgaccctactcgaccaaacccctttacacagtatgttgttgttatttctcattacacctatgctgtttagttttactattttactcccacaatattcacaaacaattttgctaagagggctgtttgtttttcctttgcagatctagagagacagagactcttaaaacagttggtgtgaacccaagccgccagtgagtctaagcaatatatattatgtgtctcttggattggatcaagtgatgatgccatgatggtggtattagtatacatgtacataaattatatattggtttttttttttcttttgttatgt

SEQ ID NO: 306843 - DNA, 2530 bp, Cannabis indica
tcggattataattaaattttattttgataaaaaatcaattctggttcctatttgtaccattttagaaaatacatggtccattttatcatttaacaaaacaaaagatctaattaataacttttgcaaaacacagggtccaaaataatatttacgctatatttatacctattattaattttttgacaaaatacaaatttaaaattttaactttttaatataacgagtgaaaacataataattaaaatacaagtttaaaatagtataaaccattgaacaaaaacataagtatatttacataaaaaaatttatgtatatagagatattaatcaaacatataataatgatctaaatactaaaatttatacatgtagaaggtaaagccagagaaaacatagaagctaaaagcaagaacaaaggcatcaaatgaatttgaaaagcattaccctaaacagggcaggaaagcctttatttatagttaaaatattacaaccaagacacttaacagaaagttgttaaaactgacagcaataacagaaagaattaacaactaatacaacagaaaatatgactaagtgatatcactagtaattaggttgttaacatcccccctcaaacgaaaaggagtgtctaacatcttgagtttggacctaagatagtgatatctatctgttgagagaggcttgattaaggcattagcaacttggacataccgaatggacagttgcttagttactacaagatccctcacaaagtgtagatcaatttcaatatgttttgaccgagcatgaaacaccgggttagcagcaatggctgctgcactttgattgtcaacccacaatattggacaatgatgagagttgatatgaagctcagacagaagagagaccagccatttgatttcagcaatcgcattagctaaggctctgatttcactttcacttactggaccgagccacaacctgctgctttttagcagaccaagacaccaaatttccaccaaaaacatgacatagccccctgtacttcgtctatcatctacagaggatgcccagtccgcatctgaatagccttctaaacttaaagtagaagctggtgtaagatgtaacccaagatgaatggtgcctttgagatatctcatgagccgtttgcaggcttcccaatgaatgttggtaggtgcatgaatgaattgactcagcttgttaataatgaaagcaacatcaggtcttctgagggtgagatactgtaaagcacccaaagtgcttctgtagagagttgtatcttgaaacggctctccttcagcaagtgatagcttgaccgatgagcttgtgggattaggacatggtttttcaccttccatgttaagtcgaataagcaaattggttatgtatttggtttgtgaaagatacataccagacaaatcatgatgtatctctatgccaagaaagtaatgagctggacctaaatcctttagagaaaaggatttgttgagatcggaaataagctgagagatgagagaagtatttggtccagttattaaaaaatcatcaacatacacaaggagtatgatcagtgtgttacccgacccatatatgaacattgaggtatccgactttgatgcagtgaatccccattccagaagcttgtcttttaatgtttgattctaagcacgaggatcctgctttaagccataaagagctttgtgtagttgacagacatgagatggttttgtagagtcaacaaagccttctggttggctcataaacacagtttcatggagctctccattaaggaaagcattagagacatccagttgtttcacaatccaattaagagacacagctaaagtgagaatgattcttacagatgttggttttactacaggagagaaagtttcctcataatctatgcctggtgtttgtagatatcctttagccacaagtctggattttagtctatcaagagaaccatctgcatttagcttgattctgtgtatcaatttatttccaatgacagtcatgtgaggagaatatggaaccaaagtccaagtgcctgccttctttagaacatcaaactcttgattcatagcattaaaccacctaggatttttaagggcagtagctgtactcttgggttcaaagggaatgagagactcaggtagagggaatttggtagcactataagcttttggtttccttatcccacttaaggatctagtctgcatattgtgtgttcttatagcaggggcagtagaaggagctactgtgggatggacatttgtgggaatgggacatgagggagcagtggcattcaatgatacgggtaagggaatggtatttgtgtcatgaggtgggataggtgagtcatttgtagttggtggtctactatctaatgtgatggtacggggtgttgtggttaatgtgtctatgttggtagtgggaatagtgtttgtcttttgtgatagaataggtggaggtatagtgtcaatgttggtagtagctgtgtctatagttgtgtaacgtcctcgcttcaa

SEQ ID NO: 306844 - DNA, 1846 bp, Cannabis indica
ttttttttactaaatataaattttttttattaagactaaaaaaaatcttttttttttaatgaattttttatactaaaaagaacattttctaacagtttataagtattcccaacggttgtaaactgtttcactgttttttttttttaaaaaaaaaaaacgtttagtattgcccacggttgtccaccatcggcattggtttttcccaacagtttctttgcttcagttttaaaccattgggaaaaatcttcgcttactttttccaacggttttcataattaacccctttattaactgttgggaaaacccaattttgtagtagtgcacgcatgacaacaatattcacacaagataaattccagcaggattgactaaacctacagccaagaaggatatggaatatggtttcctcatctaagttacaccaagggcacataatagctcaacattcacatgtttagtgttcaattgtccctttgttgggagacactccattattgcacgccacaagaaatgttgaactttgggaagaatatcaagctgccacagtctcttatacccttctctgttggttccaggttcacgacattggttgactactgcaagaatttgtaagcacttttaaccgaataaaaactcgatgcctccatgttccaataccatgtatcgttgtctactgtatcactcaactggatagagagtagaagttctttatctctatcgtcaaacagaccattcaccacttgaaggtcccattggtttagccccactgagaacaagcttgacatcatttgaccctccaaagcagggtgatttgagctaatatatgtccattcttcaatcatatataaaaacttgatataatcatttttaacaagtgccactcatcttaatcaattatagttagctaatttttttcaccatatatgtatcaaatttttctcttggttttgcatgtgtcgccgtttagtgtcttatttctatctcttaggttaaggttcattgactcttttttgggtttggtttgaggccatcggggatggtttgttcggcctttgagattgggtttaatgattgctattattatgggttattttttcgttcctgcgatgtctttgttggtctatgatatctctttggcttggtcgtgttgattctcgagccatgggtcacgtacttttctagatctttctgcagtgctggctctgaaatgggttgttttgagtggaccttttcttcgttggtggtctatttcagattgggtttttaatcagtggttttgatggatctttggcaggaccttatggcctgtatccgggttttggggatctcttaggttgtggttaatgacagttggggtgtggtcagtgaggcaaggatcgttggtgtggtccttttggtgattagtaccattggtttttgctctcaattgtgacttgtcttttattatgtaagggtcttggtatttttttttcctaataagggtgtttttaccttcctttttgatctctattttgttttagatttagatgcacagagtattctaaaatttttatcggtgtcgtttgacacattgttttatgattctttgatatttattgtcgagaatttaaacatagtttgtcatgattttctccattattctagttagaataattagagtgtctttacctaatttttattgatagatctttagctatttttcattgataggtgtgatccgtcacatgttcattttgaatggaaatctagctctcctcacattgttttgatgattcacatttgacgatttatgagtcctttagttgaggatgctatatggtttttatcctatttaatgtaaatgact

SEQ ID NO: 306845 - DNA, 1394 bp, Cannabis indica
tgttgagtagcaggtggagccatagtataaccaaaaataactaactcagggaaagagatatgggaagttggtaatgaggaatttggaatagtctgagaagaggcaattcaggttgggattggtaatgaagactctgaaacaaggatatgggaagttggtaaaggagactcttgagtagtttgtggattagttgagttaaaaggaggttggggttggtcatttggggtagtgggttgaatggatgtttatggttctgggaaaacagtttgaggagaggcaatttttgggtttaatgttagttgaggtgggatagctaaggaagtattaggttcaggaggtgaataaagtggcacatatgaagatgtagaaccagtggtaaatgaggcaatggaaaaaggaaagggtgtggaagaggatacctaagtagtagatgaagattctgagtgagagacttccatagtaggataactgtgttcattgaaaatcacatttcgagccacatatatccttccatccttattttcacagatgtaccctttgtgatgagaggaataactaagaaataaacacagttgggacctaaaatttgacttattagtattatatggccaaagatatgaaaaataagcacatcaaatggtttgaggagtttgtaattaggtggagaattaagcaatacttcataaggtgagagatggtgtagcactctggtagataacttgttgatggtaaagacggttttataaaaagcatgccaccagtaacaaagtggtaagtcagagttagcaagcatggttaggccagtttcagttatgtgcctgtgcttcctctcagcacaatcattttactcatgatcatgaagacagggttgttgaaagtgaataccttgatccctaagaaacctttcaaattttttgtactcaccacctcagttagcttgaacaaatttgataggtaaattaaattgcttttcaaccaaacttttgaattgaataaaaacctcaaatgcttgagacttcagagttaatggaaatatccaggtacacctagtatagtcatccaaaaaatgcacatattacttgtaaccagctgtggaagcagtgtgagagggcctgtatatgtctatatggatcaattcaagaggttgggaagctcttttaaatgatagagtatagggtaatttatggcttcttccttgttaacaagcgttgcaaagttttagatctttaagggagcctatatggagaagatggggaggcatggtgcttagggtactacttgctgaatgaccagtgccaagcattaacatctttacttacagaggaataaaaatctacaggattactaaaggagtgagctgaggaaaagaatttttattgatatcaaaatgtgta

SEQ ID NO: 306846 - DNA, 2993 bp, Cannabis indica
tttttacgtagttcaggtattaattaaccttagtccacgagtcggtctattagcctcttaggacacttttgatgtgtttacaatatatttttacaggaaccctaaatctgtactcttagtttctctcgaaaaagataaagacaaagaataatattggcagagtttcagctaggtgagttgtgttctcctctcttcgtataaaaatagaagggtatttataggctaagtagagggtatggacatgcccatgacccccctagaatttctgctaacaactcagctaataggtaaattatacgcaaagcgagagctaactattgggtcccttagaaaccaatgtgcatgtgcatgctgtagctagctggacaatttgagaccattcgtacgaagtggacacctgtcatctaaaggtttagcctttaaaagtagagtccatatgttgcccaaagctttctcctttaaaaatagaggtctgtaatatccatatgttaaaaaggtgatggaggtgtgcgcactatcatgcttggacatagggaacaagatctgatccttccttagagaaagcataaccgtcaattggtgacttggcttgtatcaaaggtagatgtccgcggcaatcctaggtagccgacatccacaataggccctttgagtacccgtttgggtattagctaggcaggcttccatatttgtacccctctaggtctgagagaggcaggacacctttcatgttggggaagctgaggcaggatcaagtagacttctgcatatccttcagtcttaacttgctcctggtttcgcgaggcttctctgggaaaagattatactaggatatttaattaggaaaattatgaggctaatccatttctttaaatgccgcatgtcacctgcttagagacaagaataatatttaccccaagcttttgggactctctgagatccaggagcttgcagtaaccttttgtcgcgaattcatcccacgagctgtcatcaagtaaaagaccataaattgaaggtaccattggcgtggcatgcatgcgacacctttaatgtaattgttgacaacacgcgttgggggcatgtttcttgggaggagttgcaatgatggcgggacgattcaaatgacgccaagggcgagttttagatgccatttttttaacttcccatccatcggatcatttgggagaagaaatctagggtgtacatttcaagtcgtgaggatcttgatcgaggtataaattgatttgcccaactcatttcttctctttcatcacctcagaatttcaaaactccccattttcgaacttgtaagccagtgctccttatttcccagaaaacttctttctcaccatcgtctccaacagtgaatgcaagaggtctttgactgcttgattcaaatctttctaaacctccgtttagcccattttcttaaatcagaaccattgaagctagaacagttcaaccccctgactgacgaaagcttagatgctcaagccggctacgattgtgtaattgactaggttcaacattcttagacagattttcacgacaaccttcttttttttttactcacacaacaagtgagtatccgacactctgttaactttttgctatttcgtatctaagagagaaattcttagttcaagctaggtctaagatacctcgcatatttgagtggtaaagtgttacccgtaaagttttatttctagggtaagattacatagaaattttgtatgccgtggaagtgctgattttatgtggatagttagggtatggctgtttcttactccgtagacatttacatgcttataggattttggaattagggaaatttaagaaagatgaattttttaatgaacattagacctgtgtacttttttcatacccattcggagttaattgtacaccactacaagaaattaggggtttctcccacacatgtaatgtgtgggaaatacatctctatgtgtggggtaaactttatactcacacatacataatgtgtagacatgtgtagaaaagtaggtgtagataaatgtcattttccacatatacattatatgaggggaattgatttgtcattaaccgtgcacacacatatgtgaaggaaaatataatacatttgtgtgggtgagtatctagattagatataattgatgatttggatgatggcttggcatgtgacatggcatgacatgtggctgtttttccaacgtgtcatctaacgtggcatgacacgtggatacaaagttccaacttggcatttatgtggcagcttacatggtatgatgtgtcattatttatatgtgccatgtgtaaattgagatgtgtgggtaaaccataaacatgtgtgggtaaatattaaattatgtgtataaatattaatttattatttctatttagattttttaaaatattttactaattattatatatcttaattatttgttataacaataaatgtaataaacactaaattgttactaaaataaaactatatcaaaacagaaaaaaatataaaacatcactaaattttaaatgtaagagcaaaacacatacaaattcataaaataaaactagagtatacactgtagtagaaaactagatgtctaaaatatagatagcctacacattcttgctcataaactctgaactaggttggcaaggtgagtcttgattatttctgaaaggagtagggtttattgaaggtcctcaactatggtcagatgcatgtgtatttgttgaaggtaacatgatttcctttgcaattaaagcttgtcacatagtgtcaagctctcctcgtaaatcaagataaagctccatgagtcgagaataactaggacaatctggattgttactagtgcttgttgtctcagatatgttaggagatcgaccccacccaaacaaacgaacagagtgttgaccaagtacctgttctaaaattttccttgtcaaacatcttctctagaggattatcttgccttaactgtatc

SEQ ID NO: 306847 - DNA, 1213 bp, Cannabis indica
aacagtataacaccgaaaaaggtactaagcaccaataatatcttttaacaattttgtactcaattataaataaaataattatatagtgagtgctacaaaagtattgattacaagatacacaaaccacatgctgcacacatacaaaatattacattgggagtaccaaagttattaattgtcccccaattatttcattaattatatattaatatattcacttcttaattataatagtattaattaataatttattaaaattattcatccatataaattgtaaaaagagaagaggttatttttaagactatacttctttttatttatatatgctgagtctatagtaatatttacttataagcttatttgacttattaatttcatgcttgtcatagacaaatatgtatgattgtatatacataggtttagtaataataataataataatttatatatatatataatacattgatatataatatgcatgattctggcaggattaatgttagcagaagcacatgtataagagatcaatatatttagggctaattttatggagacatattgggtagttatcaatcaccaatctaaatttattttattaatgattatatataattattataattaaaagtttgaagtccataattgcagtacctatatattgacccttaaacaagaatttataatgaagtttataaataatattaaataggaatctaattaatttgtatagtacaattaacttatcaagatttatagtagtagtagtggtattaaaaccaaagattgctttaataaactcctaacaagacaaaattaaaatgttcattttttcaaacatgttaccttacagatagtgagagccatcatttattagtattcatgattaatagacttcacccaataattaacttacatttattctatatatatagtttatgatcacttaaaatactctaatatttatttaatatttttccaaattaaccccattattttttatataaaattctcattattattatgcaatatagtatatgtagataaaatatgtctaaaaaaaatataaaaaatttcaataaaatactttcaaattgttgtaatcacacatattaattattattattattattattctattatagccacaatattttttgttgtgagtctagtaatgtagtatacaattaaggaatttagggttgtctctagc

SEQ ID NO: 306848 - DNA, 1621 bp, Cannabis indica
cttaatcctacaatgacaaaaaaaaaaaaaaaaatcattagatacatgtacttgtatttaagagtttatcttagtacaaatataattagcgtacctgaaattcaggagttagccggctttcaacaaattttaaccaatcaatgaggtcgattttcagttacttttcagggacttgtgccagttgttgcacatccttctcttcaattgcgagcattataacgtcttttgtcattctattcttgaagtctttcattaacttcccagcaaggatcagacaatcatgtttgaactcattcgaaactataaaacccctctagttaatctgatattcctccacgaccgagtcctcatacatgatctcagcctcgtcctcctcatcaagttgaatcatttcacactacctttctaaccctcagataacctcactccagaatgtcatgaagaaacaatgtcacacagacgaacattctatccaaaattttattgttagagtactatctgtgcaattattttttgcatggactctcgaattacagtaacttagacatagatcattcttacattacaaaactgcttgcataaacaagagaaatgcaaccaaaggggtaaaattacaattatttacaatgtttgggtggcatttttagaaaaaaaatcagggggggaaattatataagtatcaaagtttggggataaaaatcatattcttttgaaaagaaaaaagcgaaaaatatatatatatattttaagagagtgacattatgtgagatatttattattaaataaaaagaaatttttaaaagtactttttttatgttttatttacgatattacgacctaaagtttttattggcaaaaatactcttataaagttttaaaattataaaaatacatttttctcatcaaaaagtaagaaaacaactaaaaaacaacgagaaatcaacatcacgacaactatacatcaactataaataaactaaaaataacttcataacaactatatataaactataaaataaccaacaaaaaaaaaaatagtttactattgttatcccaaagttttcacatctgatgtggcagcaaccctgctcggccaactcgggcaaacccatctactaagtttccaccagaaggcccagttaatatcgggcaagatccaaaaaataccgggcaagtacctgtgaatgttggagaactttcccaaagtaccacgggagttcctttaacaagaactacccctttggtatacgttggagaaactgggcctggagttggccaacctagtgtcaatgaatcccatttgactttggggatgattctgagctagccaagctaagagatgtcatagggaaagtgtaggatcatacaaacatcctctatcatgaacaagaagaaacacacgctgttgtaaccaatgcgtttgcccagcagagacgcgagttctaggaagggatggatcagtaagtcacgatcctacaagcccaccatacaaggttgaattgccaaaatagggaggcaaatgaactagtaagacaattcaatgaaagggctagatccaaagttgaactcataagggacacccttcgggtgaagtcccctttgttgggtttgtgccctaaat

SEQ ID NO: 306849 - DNA, 2366 bp, Cannabis indica
tacgtgcacttgcatattaaaattgacaacagcagttcaggatttcgaggcacatcattagcattaaatgcccatcttttccaatttttccatgttcccaatcgttagattttaattcttttgatataactgcgatcacttccagggtataaaattcgagagtgaacactcattttgccatttctatcttttaaactttcaagccattctggaaaaccattttcgatttctcatcacattgcatgccctcactatctttgacttattttttgcgcgtttcattggacttcatccttaacctcagagattctcagaactcattacctctgccatcaaattctcattcgacaagttcttcattagctagaaacattcgtcaaaacagtgagtgttttatctctttatctttgttattcccttttcctgagttagtaatcctatttttgtaatcgattgcatcattatttactttgtttggtttagataattttcgatttagttttctggataatttttagggttttaaggagaaaatttaggttattcagttcatggattcttaggttagattgtatttgaacttttcagagattggaatattatttgctcaaaaacatgacccaagttgttccagaaactacaatccttgaattcttagaaactaattgtcctaaattgttggcctcccccttcgaatccaaaatttatatacctaaaaccattcttgagataaatgatgccaaaattagggatcacttaatagaaacacatcaaactgaatttgccagtcgctataggcggtttttgcaagaaatttccgagggtaaatgttgttttccagcgagatgcagcttggccagaatcccagattttagcttctatccctttagcgagacccttgttttacctcgagtcactttgttttttcaccaggtgacgtagactttaaaatcatgaccacccaagttcgtaaatcaaagaccccccaagatcctactgtcactttcgaagacgagcttatcgagtccaaagtaaaggtcattgggtactatgtcagcaatatattaaagtcttgtggcatcaaacaagagcgaggatgttacattagatgtgttgctccaggagaattcagttactttccactagaaagggtgattcgagaggaatgtggtgaagttagtactagtgcctcgtcaggaattggcgcttggagcctcgaggctatacttcattaatcatgcttggagattacaatagaaaaatagaggtccatcttcttcaataatagagtcttgctcctacattatagctcatgtgaggatactgtgatcagacacacacaacttcttgtataacagttctttcactcaatatgtcatctaaattctcttttgaatcgtcacccaacaaagaacactaaaggcctatatataaacatgtacaaaaggagctaaaagcttaaatattagttcaacaaaattaattaactttgaccactaactaacaaaaatgaatagttagttaggacatttggacaagtgtttaaactccacagacatgtaccaaatcgtttttctaaatttttatttgcgttaggcgctcattagtaaaattagacaagagctcttgaatctaacaatctcaataatttgggggtagatttaacgtcctgaaaagtttaaggaaacgatttagtatatgtcaaagtttgggatgcaaaaatcttaattagcttatacaataaaaatgtgtggacatcactcatattattgtgatttgtggagtttatatgttacccttagcagctacaaaatcttaactccatgatatggttttgataatcaaataaatattgttaggtgcaattaaatatatcaaaaaatttagctaaagagaagaagtttcgcaccataattaaaaaaattatatgttgttttgtttttttcttaaaaaatataagtgattgaaaatgttttcataaaataattttttaaacaaattagaaaaatacatttttttttacaaaataaataggtttgatgaagttttcattattttttattcaaattattttatcttattatttactataaaattttaaaatatttataaagaaattaaactatttttcaaaaatatcaacaaacacttttaaatctatgaaaataattaaaaataatgttaaacatgcctaagggcatctacaataaaactgcaaaagaacatttttggtgttaaaatgccatggtactgtaaatacgtcaaatgctttttcttttagtttttagtgtttatattaatatatatatagggatatgattttgtcccgtgatgtacttttacggaatgtattccgtggtacatta

SEQ ID NO: 306850 - DNA, 1493 bp, Cannabis indica
tttaggcatccatgtcctcacactcaccctcaaaatggaaaatccgaaagaaaacatcgtcacattgtcgaaatgggactaactttactctctcaagcctcaattccattgcattactggtgggaatcctttagtacagcagctttccttattaatcatctttcaacacccaccttaaatcataaatctcctactgaagtcctctttagagttcaaccaaacctgcattttctcaaagtgtttggatgtgcatgcttcccacatcttcgagcctacaaccaacataaacttgactttcggtccaccaagtgtgtctttttgggatatagtcccaaccacaaagggtacaaatgtttgcacccatctggccgaatctacattgttcaaagtgtcacatttaatgaaaaagattttccatttgcatctgattttactgttgctcatttcaaaacttcagacatcaacacttgttctaatcaaatacaatatagccagtggttaccatttgtctcgcaggtacctgaagaagctgctactgaagttgatactgctcattgttctcccattccccaacgatctccttcacggccaggcactaaatctgtgacatccagcaatcagaataattctcctcaaactcccaaatctgtctcatcccactcacctatatccatgtcaccattactcccacacaccacttctcagtcaccatcagtacctatatcaccaacaacccaatcaactttgccacccgataccacataccagcagccacaactccccaaaccagtaccaccccagtccactcatacaatggtcacacgatccaaggccggtattttcaagccaaagctttattttgccgccattcctactgcctatcttgatcactcactccctgaaacaattgaagaagccttatcctcccctcaatggcttgctgctatgaatgaggaaaaggctgcccttgtgaaaaataaaacatgggtgctggttaaaagagaaccatacatgcatgttgtggataacaaatgggtgtatcgtatcaagttcaactcagatggctccgtcaatagactcaaagctcgcctcgttgctaaaggcttccaacaacaacccggtattgatttctttgagacattcagtcctgttgtcaaacccacaactattcgagtcattctcaccttggctgtcactcaccactgggacattcagcaaatcgatattaacaatgcttttctcaacggcactttgcaagaagaagtattcatggagcaaccagctggttttattgatcctcaacagccacatgccgtttgtaaactctccaaagcattgtatggcctcaagcaagcacctcgggcctggtttgacaaacttaaaactactcttgttgctcttggttttcttaactcagtggctgatacttctttattttctataacaaaaggtgatgctcttctctttgttttagtgtacgttgatgatattct

SEQ ID NO: 306851 - DNA, 2232 bp, Cannabis indica
ttttttttttttctaaaagtgaaattcatttcatggaaagaacttttcttttgtataaataggaaatttcctttttgtatgtgcaattccaatgttattttcaatcaactaactactcttagaaaaagaaagaaagaaatgtttttgccaactaacataaaacactataaaagagtttggtgttatggagagtgctaatcaattagacttttttccatacctttctattgtaacttgattgcatttggttttgtgtatttctttttggagaaatgcttaagggtactactaatgtttaagactattataaattagtatactgttattaatggaattaagtatcgagttttacatattttaatttaataattattgtaaaaaattgttaattatttacaaagtgttgaatttttatttattttttaaaaagaaaaatataagttctttcaaatgttttatgtgaagggaaaccggaaaaatacataaaaaaatttggaaattatgtaaatacaaaagagtaaaagtggagtaataaaattgaagtaaatatatatattttatataagtaacatttatagattagtaaacctttgtcacaaatttataaataattgttataatcatgtaaatgtttaggaatttataaatattaattatagatattgtatttttatttattattttttattaccatttattttgatttttttttctttctagaaaaatatatattgtggtgtactagaagcaattttgccctttttattattcaagattttaaataggaaaataagccattttataatgggctttccttttcaaattgtgatgaagaagagcaatgttttgaagataaaaaatcaaaattggaacaacaagatgtgatcacattgttgacttttattaggagaaatctagtttacatttacaacatagcatactatttactcaaattaaaaaataagcataggatagattctataagtattgaaaaaattgtttgtttgcccctaaaaaaagggaattgaaccattaagatttaatatttgaaagttttataaataaaaaaaaactagtactaatttttggaaaataaatattacctattctatgaatcatatcatgtctttacttttgcttaggattttgaaatcacaacggctactttttaatgtttaaagtccaaaatcccatatccatatgtgagtgagatatacaaacaaatcaatactatagaaatatagaagcaatttttttcaagccacacaaaataattatttactcttgaaaaacaaaagacatttacaaggaaaaaaaaatagagatcttttatattaaagaaaaattaacaaacgaatattaaataaaaaaaactaaaaaaataaaatctagatttatgtttttacattaaaccagttgagactggatcaaagtaatcgtagagagtattagtttaatgagctagtgttatgcaaataattgtagatgtaatttcaataagaaaaaaccaaacatcatgtaataagtattcataggtaatttggaaattagtaaaattatcttttcattttaaattttaagagcattgctattaggcactattggtgcctaatactttctagacgtgtcattttgtgattggctagcgatactttttaaaagttattacattaaaatatatgggaccccatacttaattacatcaatagcaatagtaacatgtaggtgggtactaaacaccactctagtgccttttagcatttctctaaacctaaacttggtttagtagtaccacattgctcatattgtacaatttttgcaacttaactcttataaaaaaaattataatcaaaactatgaaataaatttatttatttgttgtttttaaattattcattttcaataatggtaattattatatctttacctcgatcagaatcgagtcacaaataataataatcagtaaatcaataagtgtctattccaaaacactctaagattttctacggactcttcttcataagcttcgaaaaagtagaagaaaattgcattgtatacccactttactttatttgttttaatttttacctttatttccatattctttaagatatacccatttttatagatgatgtgcctattatactctttacaagtgggtagattttaattgtataaaatatgaaggtatttttaattaattgatacaaaaagaggtatttctcaacttat

SEQ ID NO: 306852 - DNA, 1733 bp, Cannabis indica
gaaaaataaaaatatgcatgcgttgtttgttggattggatatggcatagtaaattactcaacacactctgttaatttatttcctatacttatttaatcctcttaacttggagacttattttaacaattactaaattttttaaaaaataaaaataaaaataaaactatataattaatctagagacttatttactaactagaaatttgactttaaaattttatacctaaataatttaaattttttttttaattaaatccaatccaattgtaatataatattaattactgatcatccaatccaatatttaaaattgatttctcgtcccaattatttgtgtatttcttctctttcatgaaaatagtactaaaaactacatatttgtacgggaatttttaatccattttcttaaaaaaaaaaaaaaaaggaaaaaagatatggtggacaggccaacattttcttctcgtttcaaactctgacttggtccctgatcgagtccacacatttatagtcattataagtatctctccttttcttaggtactttccatggctagctatattattatatactcgatctccatgaccatgcatgtatatacttttttttatatatatttatagaatgctaatcagaaaattatagaagaaaaaatatgatgttgactttatttgactacaaattagtaactatttcgatatctttcatggagtttggttaggaccaattataaccatgttcaatttaaggcgatttttaataattatataatttctataatataaatatgaagggaaaaaaataaattgttttaaaaatcaagggattgtttttctaattcttcttataaaattcttaggaagattgtttaagagtgtgtgactaggttgaatgtggagggcggtcttcaattgaccaaacgaaattgtgatttatgcctataattaatttgataggttaattttggtaggaaaggaataatatataatacttgcacaaacgtacttaacaaggcattttactatacttaatccaaacgaagacttcaacccacaatataaatgaccatatatttctgctctaatctcttaatgataatttgtttcttattttattttattattatttatttatttaactttttttagctttgtaattgtttgtgtccaacttttccttaggactaactatgcatgtggacaccattttgtcaagtatgggtatgccaatattatatatggcgataaaattattactacaaattattattaattacgtacgtttggttttagaaattaattaaagtccgtgatactattaattacaaacgccttgtaagttgtaatacttttttcataatgagagaataatggaagcatcaatacccttaatttcaaattgatcatcatcaccaacattttcaatgttcaatatgcttagattccaatgtacactttcatatataccaaaaaggagcaaaagcaaaaggtgacataataactaggagattatcaccaccatataaaattaataaataaatgataattgcaataaactgatatttcctcactatattaaattagtaggtttacggcataaatattttatattttcactttcatacacttatatatcacattatttaatattgtatgttacatttttattaattttgagataaatactattttggatcctgtatttgtaaaaattattaattagaccatctgttttgt

SEQ ID NO: 306853 - DNA, 1377 bp, Cannabis indica
gtatgtttcaaataaatataaaattagagacaaatttgattaattattaataaaagaggcatttttcaacttaccccaaaattttgctatttctctctgtgcagagtgcccataacaatgccataatggtaggcctccacaatttaactacaatttaactttcctcttgttccccatctgaagtgaaacaaacgatcatgttttcttaaaaaaaaaattaattatttaaattattttaaagttattacttagatcactaaaatagaatttgagaactattaccactaatttttaaaatttaaaacttatctggatcaaaataaattttttaaaaatttatgccggcaacttttcatttagaaaataaagctaatatataaaaatatttaacttgttttactcaaaacgtacattaatgcaaccatgatcaaatcaaaaagtcatttaacatcattaaacatgaggtgattgattctgtcaattccaatatcagaaatgggttcaatgggctgatcatcaccctccatggaaggttccaaactggagggttctctactgaattcatctgcacaagaataaaaatatttatcaaaaaaggaaaagatgaaacaacaaatacagaaataagaactaatgaaaagctagccatgatttctgagtttcttaaatgaaccagatatctgagatgagaagtcggcgctcaccgaaaattgtgttcaaggaagttgggggaggagtggacatgaaattgaggcctatgtaaaatccgagagctaatactattgtcaccattgcgtatgttggtatagccagtgcccaatatctgaagaaacacaaagcaattacacaacatatggggggaattcaaacagcttgtattagtttgtgtttaattttacaagaattttcctttactctttttgtttttctgaaaaataacagcgttcatatatagcaatgaaattagacctctcagtcattataaataatgttcttaggaatgaaggtatagacccacttaaccaccttatgcataacaaaatcacattctcttacaatttttgaaaataaataaccaacaaaaaaagaaaatcttttacagtgtctagtgtaattatcagtttcgcatcgggaacaaacatcattgaaggaattgattaccacactagagtcgcttcccacgataaagctaggcccattgagggaattttccattactcaataaatctagagaaatcgtttgctggtgccgtttggtaatacttttgttttttaattttttaattcacaaaatgaaagtaaaatttttgtttttaaaaattttgtttttgtaaataaaaatgcgttctgtaactacttttgtttttaattttaaaa

SEQ ID NO: 306854 - DNA, 2046 bp, Cannabis indica
ttttttatttatttttaaaattagtaaaggaaaagcttaaaatatagatttttttattttatttctttacaaaaatatagtataaaaaagctttaatgtaaaaaaaaccaaaaagccaatactcccaaagaattaattatttatgccataaaaaaaatgaacttttataatttcgtcgtgtaatttatattttttaatttgagaaacttacaaaaatattgaaaattagattattttttataaaaatactgtcacacggaatttttttttttaaatactgtgtttttataaaacaacagtagaatacaattcgagcccgggactttgggcttatcccaaaggcctagcgtgatcaaaatacctttattttaagcctattttgtaaaatataacaatatgaaactaaagattatatataaatggatttttttaagaaataggattataatagataattaataatagacctatgtttcccttatgttgtttacacgtcgccatctggtgaaaatgttgcttttattatttatttttcttcctttggttggacaaatatcattttcaatattcaataactgagtggcaataagttaatcacttcaatttataggtttcaaggaaagggaccataaaaaaaaaaaaaaaaccaggggaagagaaaatataagaggaaaattctataatgtaccattttaaaagggatgcaccgatacatctctatatatttgtgtatctgaaataattttttagtcaaattttttcgtatgatcatgtaaattatagttagacatcttgtaaaattttaagaaattcggtgaagtttatcacgccgaaaattgcgttcaaacagtgtgttgcacccggaattattttattttatacacgtgtaaaatagactgtttgaatattattttttgtattgtatattattctgaatttctctaaattttgtaagatatcttaaataattataacgtacatgaatatgaaaaaaaaaattacgccgaaacaagtagaagatgcatcagtatatccattttaagagggtacattgtaaaatcactcagaaacgtaaggatcacaacagggtgagaaaaaaagtcattgacaacaaacacacatcatgcatgcatatttattattagtttaagcaaaattataaaaataaaaaataaacacaccatgatcatcaattaatggctatatgtatttatggaatagggtttataggttggggtaaaataataatgaagctatatatcaacacaggcccatcccatgtggaaccaaacttgttatattatatatgttattatttaataaccacactattttgggaatattcggtttatattgtaattaacgtacatagattaattagttgtgcatgctttttaatttatttctttgggatgtttagactttatattgatgtaactatataccgatatgaaaaacattgtgtgtatatatatgtaagcaaattcctcaaactatatattacagatttacaatgaattgttttgaaagaagaaaaaaaaaaactaggtatattatgtattttttttttgttgaaaataaataaataaaaattatataacatgtatagctaattttgcttagtgtggtaaaataaaagataatgactagtcactagttcttaattacaattagcttttctaccgtgcttatgcggggaattttcattatttatgattttttagttaattttgataaaaatatattatttttgaaaaaataaaataaaaaaatagagtaatttgcggcataacctccttaagtggccagatttttgtaactaatccttaattctaaaattttggtggtaaaacctcctaaattcgtgttctgttagcaatttaacatttccatcaatttttagctattaactgtcatggtggaatgtctacgtagacacagtgtgcacgcaacacaattttattaatccacgtaaataaatatttaaaaaataaaaatttaattattttaaaaataaaaaaattctttttctttaaaaataaaaaa

SEQ ID NO: 306855 - DNA, 1281 bp, Cannabis indica
ctctctctctctctcttcatttcgtcccttctattgtagtttctaaggaattgtctttctctaaatcagaagttgaaggttttgtctgttgcatattccaagcacataattatctactcattaataaacacaatccacaactcttgaaaatgtgtcatccttacttgactgtagatattagaaaataacttattaagaaagggttggcaactgtcacaggtagctatgtcaccaccaataatataatatcatgggccacataatgtatatatatagagagagagagggagagagagagatttcaagtgcaatcactaaaagatttgtgaaatgagctcctatattcagaattttcagtagcatgatttcaaacaccatagcaggtaatgcaatcactttctaaaatcattagagccaaaagtgaaaagaaaaaaaaatccataaatagcaaatagtgattggtgaaagcattaaagttgatcagaagtcaaaaaccttcattgcggcattgttgattagctatttattttaggtgattgtgatactggggacataaatattatactcaaatttattcatgtgttgtatcttttttttttagcaattaggggtaagcataaattgatccaatccaatgagaactgactgatttaattataatcggtcgtcaaacattggatatccaattgtgatcaaatcggattggatgttattttcaaatatccaattggatcggatcggatggtggacgaggtgttcaaaaatccaatacatttaacatccaatcgaattaattagtatttttatttagtttagatgagtaattagtttttatattgttatatgttacatatctatatgtatataaaattgaacattgaaattttactctttttttttcttggattgaatagattcagtccaatccaatacatactggatcgatggaagtgacccgatcccaaaaatactaggtcttaaatattgaatagacctaaattaaaccaataaatatatatatgaaatacattcaccagatagaactgatccaatccaacatggatcgattagatgactaaaattaattggatcggaatagatagtaaaatataacatccaatatataattggatcggataggcctaaaaatattggatgtgatacaatgaacacccctagtagcaatgaataacttcattaaaaaaagaaatcataatgtcatacaaactttaagtcttaagaaacccaaataaaagaaggaatctcatcaaaccatactag

SEQ ID NO: 306856 - DNA, 2228 bp, Cannabis indica
cgaaaagagagaagcgctaccaccaactacttcacccatatcaaaattttcacagtagaaaaattacaagagagaaaaattatattgtagcaaacagtgcatagagtagaatgattataaatttaatttggttaagatgatgagtgacaaacggctccaaaagcagtgcataattttgtattaatatttttttatattcttgataatgttaattttagagtcgtttattaattataatttgataaaataatgctaaattgaattgatttacagtaatcatatgttaatttagttttcaaagattgtgctgcacatgtggtgattggttaattttttttataaatgtaagaaaattaatggaacacaactcaaaaaatagattgttgggatatcggacaccatccatctctactcttaacgtgatattgttttctttgcgcttaagctattttttcttaggcaccttcttaaaagacctcaaaccaatagtaatagtgttcatccttatatacctaagattctttccacttctagtcaatgtagaactttatttgcacactaacacacatcattgtggcctaatatattattacaataattcatgcatattaaaaaactacaagtcgtttgttattataaataaagggaattttcaaacaagaagtcgttcgtttttcatgtgtaatggacgacaagtcatttttgttggtttaccaagaaaactgtcattattgtcaaacgacaacaaacaaacactcattttatagcaaaagaataaaataaattatggaccatgtgatgtgagtctagtggaaaggtaaaaaagacattgaagactttttccaacagtccaagtatggaaacttccatatgactattcaatcaaagttttctaatcattcatattctctttggttaaggtttttgagaccatattgtcccattgcatgattgttttaaaactattattataataaaactgaaaatatactacatataccaaagaaagcgtctaagtagtaagcccactcaagatgagtgctctcctatttcgactttcccagagtattcggtagcacagccaagacagcaatgagttttttgtccctacaagggtggagtgccagaagttttgagaattcaaaagaaggttatagcgaaacgagcggtttatcattacaataggtgtcaagtataagtgcagtgatgtatgcagccgaggcatagaaataccatcactaatttgatcatttgtctaatattattcaagtttaatttgtagctccagcataagagaatgttattacaaaagcaactttttttccctttcttttattatattctttcactcacttgtttactctatttgaaaggccttaacaaatagggatctaaggtgagtctattattgttactttgagggatccaattataacaattgtctcaacttgttattagattgtttgacagagataggaattaagctggactctcactcatagcattgagaatttgagatcacaaaaactagtagtaattgtgtcattaaaataaatataatgtgacagaactcaattctcaagctaagatttttctttatttttctccctttttcttcaacattaatcacaatcaaaacattttagttttctctgatataaccaatgactgagctagataaaaaggttaaggggccaaaactattaaaaaggggaaaaaaaatctgcacactatttacttataactaaccacaaaatgagataaaacaaaaaggaacactaaaaaaaataaaactaaacaagacatgcttaactaataagtaaattaattaatcaaagctcataagtcatccctactttgaccattcttttgtgaggaatatcaaatgaatggttactgctctgcctcaaatttcttaccaagaaatcataagcataatcaatcaaaattttcttacccaaattagctcctgcaccagcaaacacttggctttctcccatcaaatgaacaacaccatgatcaacaaaagctttgtcaattctttcaatctcatcactccttaatagttcttcttgctcattactactacttatgacttcttcactattcttcttcattataaactcctttaatttatcaaccaacattttctcaaagggttcactttccttatgcgaatccctataaccatacctcgcgacacagcgaaacatgttcaactccttagg

SEQ ID NO: 306857 - DNA, 1024 bp, Cannabis indica
ctcagcttcctacttatccaagcttcagatgtcccttgggcaaacgagtcaaactgttcacttcttgtggaaggtgcctcctctagatacccattaaataccctcagcaattgtttcactcctttcattcttcccatctatcaaaccagagttcttgagttccaatttttctcccgtcttgcaaaactttatcgatacctctatagtcggacactaattcctccggcaaggacactgcactaagatcaccagcctcacatttctcttgacaatgggtaagttttcttttttttatatatacttgttgtaaagtttttgagggagttatgagggtgcattttctttaggaactctagttccatatctgttgcctctaagaattttgtggtcgtgtgatgaccatttcttgcctttgcactgacttatggcaggtacatcaagtatgctatgcagagaactctttcttccaaagcgacaggcggcagttctaccaggaagaagcagaggcttgaggtgtctgttctaggaataggggcccacccctagtaccatgatcctccattgaggcttggccagcctcggtcttctcattcttcagccctggcaaggatccccccatggggtacacctttcctaggaaggttgttcctttcggccctctcgacatgcaaaaggagagggaagcaaacagggccctaaaggggcggttggaggccaaaagactaaaagttcacaggagggtggtcgtgctgtcggcggtccgtaaggccaaaatctcagatgggatgcatgtttttccacctacagggccgaccgtggaagttaatgccttctagaagtggctgacctacaaggtggggagagaggctgcaccttttactgccgagcttttggaccaagtggccgggagcgcctctattgtgaaaaattgtatacgcaagtgtacgcaatcgtaacaagtaataaagtgataattcgagtatcgtctccacagggattgaaaattggaaattaatttataaaa

SEQ ID NO: 306858 - DNA, 927 bp, Cannabis indica
tttttattattattataatccactaaaattcaagatgaatctgctaacttaattaattataattacatagaagaagaaaaagagaatccaatttggattatcattaatgcaattttgtctttactatttaattttcactaaggttaatttaaaaatcaatacaatatataaaatatatagacttataaggaatattacttttgctagtatatttttgtgttggtaaaagtttagtattgtgctggtaaaatagaatttacttctgatatgttaacaaaacgggttgacaaatcaacgttggtattaaattttttgccagtacaaaataagaagcggtaacaaaaatgactttttccaatgtgtaaatgcgttagtagaagttagattttagcgaaatgtgcactggtaaaactttgacctttttatcagtgtaatttacgaaatgctaacttttatcagtgcagtaactaactatagtgataaaaatgacatttttggtagtgtactcaactttacaagacttataatgaaaacatttctggagatgactaaataaaaagagagaattaaccacattgaccataataaccttcaaagcatactaatccaattccatacatatataatttatatatattatatagattagaattggatatatcattctatccagtttcatatatatatatatagtgaggttatatatatatatatatatatatttgtcatgtatctcttatatgtatataaatatggaagaccacatgcttcaactctattattgaagaaaaaaaaaggacaaagttgtaaagtgaaggtaaaaaagacaatagctatatatatactgggattattaaaacttcttttttctttttttgtaatttataagaacaaaaaaacaaaaaaacaaaaaacaaaaaagaataa

SEQ ID NO: 306859 - DNA, 1424 bp, Cannabis indica
ttcctaggcgaaattttaatgtgcagcaacactgcagcgtctaacattttcataccacgtatctccaatttgctctgtctacaaaacaagaaaagtaatttctctatctataccttacttcactctatttctctataaactcgtccagattgagaacatgtggtggtcttctttttctcagataagaatccagcataccaccaacatgttagcaattaattcctatttagccaaaatggaaaaactaaatgcctataaaatactcaacatgagcaccaatgaaaatcctaataacatacgatttacaaaattccccaaaaagcaatgttgaatcaaaactcacgaaattctaatccgatccctcattttccacagcaacaaaacagaaaatcaaatcgaatcaacaaaaaacccagaaattcaaccagcgtagaaaacaatccacagcgaacatcgatcactgttacatataagcaaataaagaaaggtaagaaaaagaaaaagaaagcgggtaacgcacaggagacgcagtggacaagcccgccatacgccaaaacatgttgaattaggcaatagaaatgggctccgagaggctaacagtagtcagatctacagaaacaccactccgtgaaaccctagcacacgctcaccaattcctcgattccacaaaatcaccgtacagttccgccacaaaagaaagatccaaggagaaaagcgaaaaccctagattgaattgggatcgagtaaaaggggttcagagaaagagagagagaagaagaagaagaagagctgcaatcgcgggagagatatgagagagtgcctatggagatgagtgtacggttgatatcaaaatataatttcattcccatttcttttagatatatttcctttctaatttattcaaataataataataatttattcaaataattttattgttaaaaaaaaaattaatttattgtaagaatgatatgtttggccctttttgttattctcttcctgcaaaaacatttttttcctttctaaaagttatgtttggccaaaaaaaataaattgaataattggctggaaatataaaaatctaacggttaaaataacaaaagtgaggatgaatttcttctctgtaagaagtttattgtctattttaaaagtatattttagcattaaaattgtgacttatgtgaaaagtgattcccctaaaaaaaaaaactagacaataaactataaatttaaaaagaaaattccaacttatatttttcaacttggtcccaccaaaagaaaaaaaaaatgaactattattaaatacttaataatactaggtaataacaatgccatgcatgttttttatcgtttggtaacacttttgttttctaattttttaatcacaaaatgaatgtaaatttttgtttttaaaaattttattt

SEQ ID NO: 306860 - DNA, 2053 bp, Cannabis indica
gtattatttttattatttataacgaaaagttaattttaatactttttgagagtttgatactaaaagattaagatttgaatcctagtactaatcttaatttttaaaactcctttccaattttagcagatattcttattatttataacgggatactaattttaatactatcgagagtcttatcttaattttcaaactctttctgatttagtagaaaaaacttattcttattttataatgtaaaattaattttaatacttttaagggagccaccgtactacaagatcaagattcgaatctcaatctcattttaattttcaaattcctcccaattaagtagctttacataaagattattcatattaatcataacgaaaaattaattttaatactctaattgtaataacaaattacttttatctatataaattcagcgtgtcataataaaataatatatataatttttcatatacaaaaattgatattcatccttaccaatctttcaaaatagataaataaataatattaacatatcaaagttactataaagatataataagcgaagatttagagattctcgaataggttaaccttttaatttttttactgaatttatgaacagtcaagagataatttggcgaatccaaacatcttagcagtcagaggaaaataaagcaaaagtaatttatatagtaagactggcaaacaaaatgaaagcaacctgaaacgtaaaaatagagttgtgtgagaatcatgcaactatgcgaaggagcgtagtgctgcatcatccactggcaatagtctagtagccaaaagcatcactagcttgtattatttatttatttttgaataaaagagagaaaaaaataactttttgttttctatcttttggttttaaaaaacaagttagttagagcactcatagagaactaaaatagataatagctgaaaaaaattagctaagaggtaaaagttagtaatgtttgatgagatattataacttaaaattttaacacataaataatgtttaactggatagaaagaatcactatttatttagctataaatattatattattttttaaaatctttctggaatgtatgtgtgtattattattatatttatttttaaataaaaataaaatatattaaaattataatttttaaatgatgtagagaaaatatagaaaaattaatatattgtataatgcaaatgtaaggtaaaataaataaagtgaagttttaataaagtattataaaaaatagaatagagaagtgatgtgagtacactcttagtcatttggatttctaataaccacaaaattaagtagaattgaaaatataaatattcacaaatccatgtaaaaaaaaaagtgaacatgttatttataaatgaaatatcactacaatttttttttttactttttagtcacaataaaatttgtatttaaaagtaaaaaaattgtgactaattataaattatcatttctatgttgtgactacaatgtctgtgactaaaaatattagtcataaaaattacaattttttgtaactaaatatatttttagtcacaatatttgtttgacaacttttatttatataccatatttcaataaaagtaattttttattataactaaaaattatatttaattacaaaaaatttatattatcaatttatcaataaaaaattgttactaaatataactattttttgtaaaggtaatacaacttttcaaataataacatttaaaatgaacatataatatagataaattggtcaaaacttgtttgaagtcaacaaatgcaacacaaggtaacatgtacacgtatgtagaagaatcattagtttagtacttagatcttctaatagggacagatctggatactaataaaaatagttacacatcaatttcataaagataatacaaataatttttttggcataataatttccatattataatctaagcccaaattaagctccaatggaattgagtttgaagttctataaaaaaatataaaataaaggaaaaatatacaatacaacttcattt

SEQ ID NO: 306861 - DNA, 2576 bp, Cannabis indica
gtaatttttatcgattttttcggttcggtttgggcgggttattcggtttaggcggtttacaaatttttttgtacagccctaataccagggtgtgaagattggataaggacagaaaagatcaggcagccaagggttcgtaagaatatcaatactgcgccccgaccccacatgcacacgagcactggacttaactagagattgagattcgaaaatgctcttccaaatgaaactaggattatggcctagttggacattcaaaaaagaaccacaagagttatatctagccttataaattcgactaacaagagagatgtcactaatcaagagtcatcaaccttgcttacccaacaaaggaagattataaccacagagacttctaaatccaagtccaccagtacttttatgttaacacgatcggttctaactcattcagcttatcccaccagaactatttgagccaaaactccaccaatacttgaacatcagacgttccaactggctacacattttcacaaacaaaggaaatactgacataacatagtcaggcaatgcttgtgccacagtcttaagcataatttcttaccaaccttggataaaaagcgatcctcctaactctgaattttagtttgcatcttctctttaaagaatgctaaaatagcagatttattcttacccataatacaaggcaatcctaaatacacactattaacatcaacatgagcaatccctaaaagaggacatattctatctcgagtcccttgaggagtattagaactgaaaaatacaaatggctgaaaaactaaccttttgacctgaagcttcttcaaaaatactcagcaagcacagaacattatttgcatctttattattagcacgataataaatgtaactactatctgcaaacaacatatgagaaactacatgtgcgccattagccactttaatgcccttcagatcaccacacctttataaataatgaatcaaagaatagaagccttcaacaaataattagaacaaataaggtaaaaatggatcatcttgcctaagcccatatctaggaacaataggccccaaagaccgtccaccatgaacagcagtatactgaaccgaattaagagtggaaataatgaggtccacaaaaagttgggcaaaacccattcgaagcatcattgcgctaagaaaatcccactcaatacgatcataaggcttacttaaatcaagcttgagtgccatgaagctttcctcacctttacgcttccatttgatatagtgcataatttcaaatgaaaccataatgttgttaaagatcaaccggcttagaataaatacaatcttgttatctgagataatccaaagataaataaaattttaatcgattcgcaagaactttagagaccaccttataatagaattacatagagatataggtctaaggtcgcccatattaagcagattcttcttcttcggaatgagagaaatattagtacaattaaaatcagtcggcaaagtagacgaatcaaaaaatgatctgacttgagccactacattcgaacccaccacccctcaacacttctgataaaataatcctatttttttttaagtaaatcagtatttttataaataaaattttattttaatattagttaaaaaaattatttataaacaagaatttatttatttttaaacgaaataaataattaactaaaaataaaagaaacatttgcgacgaaacctctttaatattcataattgttatacatatgactttaataaaaaaaaaaaagtagcaaaagtatcttatcttacgattttgttgcagtcgtaaccttttttggccattaaatgtcaacttaaaaacacgtggcgacatattattagactatgtattaaataaactaaagaaatatatcgcaatgtatttttgagctgtcacttaagattggagatgctatgaaggatgcttgatgacataaatgtatttttaatatttttttaattgatgtttaccattggaatgaaaaggaatgccataccatatcataaaatcctttacatgttctctttttatttttttattattattttatcacaagtaagaaaatttatttatttaatatatattaaataataatataagattattttaataatatttagagatccttattattaaattattttagaataaaaagtgtcaaaaataacgtaaaaatgagataaaataaaataatatatttttaagtaatatgaaagtttttgatattcttaaaaaataactattagagatactctaataggcttaattaatacttaacaaccaaaactaacattcataaagttacaacatataatagaaggagatgacttgtattgtaactatgttgcctacaatgtggctaagtgggcgtttactcaccagatgtacggatcctttttggggaacctattttgtaatgaccgggaggtctaactattatctcttatttttttttttgaataaaatcatctaactttatttaactgcaatcattcatgattacaaaaagcaaatcggtagatacctcattgctcaaaag

SEQ ID NO: 306862 - DNA, 2659 bp, Cannabis indica
ggaaaaagattaagatgtcacctaaaattaaaagtacattgagatcatattaagatatttaagtgggtaatataataaaaaaaagtacatgaaataaataaaataaaataaatagaatacatataattttgataatatttacaaaatcaatgtaaatgtgtacagaccaagtaaaaaataaatgatcacaagtcataccaacttgattaattaactaaaacataagataaaaatatataatagtgcatggcaaaattttttttagtttcataggaataatttttttatacaaaaaaacttgatcgagtcagttacaattggtgatgatgaaagatatgacaactagtagaggcaagagataaaaaacagagttgagaaacatatcatgtcttgaaagtataagcttcttcaataataaaatatatgcttctaaatatggttggccaaatatatttgttgatgctcaaataatatatatgtataagatagatatatagtaaatattaaatatgagaatatgaagaaaatgtaataataatagatatttgatttgatatgtgagttataaaatgaaaagacatattatagaaataaatattaattatataattattataaaaattagagaaaatataaaataaaaagttaggctgccaaataacctttgtttgggcgattttaattaatatatattgttgtgtctcttaagaaaaaaaaaaagttaaatgttgtgtttgtatagtatacacactatacaaagccacatacaactgatctttcctcgttgcaaaggaaacacaagtaaaatgctaaaccttgcgagttctaaagctcgcaggcaatatgaatttttgaattcttaaaagcttcgtgtggtgaactgattactcaaaatttgtataattaaaaaataattttctatcatagagaggggatgaagattttactgtcaaaatagagtttgatatcatatttgtgaattaggtcaatttccaacccaaccacattaaagaaaaaagaaaattgcaatgctattgatatttatatttttaattaattaatctagtattattttgtcggttgaaaaaaatctccatcaatccttcataattataaattcatctctacaatatatgataatatatgatttttctaagttttcatatccgtgaaaattaatgttggtataatgtagcaattttaggcattaattggcaaatcacaactcaaattagcaatcttattagatgtgttgtctggtcttttctaatgatgatcatgcatatgtagttggcttaagcccatgtgttaattaaagcaactagctagtagaatattttcagggcaatttgctacaattaattgattaaatcatagcataactgtttgtcgatcattaaatttctcaatattacattggattcctcaaatgaatagatttgtgtctcaaatgagacaggctgcagattcagattgacattatatatatatatatatgtgcatgtctatatatttataatatttattatttggtagatcccttaaacaatgaataacataaatgatctcactcactatatgatggatctaaatagattattagccaatatataaaatatcatagatatatcaactagtttttttggatgaatgatgaattagatttgtttgtttctcggtgtatataattcacaagtacaaaattcacattcacaacgacatcttataattattttgtacgtagaaaaaaaaacagcagggcatggaacaaaactaccattactaataaaagtagactagctagattcgaaaaaaaaaaaaaaagattaataattgtatagtacagaactactactataatgtattttgaaaagaaagatattattatgtttttatgtggtataggcggcttcaaaaattggctaactaattaggtgagtggctttgatgatattattatttgataaaatgtgcctgaattggttatattcttaaacttaaaccacctgagcccgacactcgacagggttgggaagtgggtcaaagattcaaaggctcagactcaggctaaggcctcatcctggcccttcttggccaccacgtttagattaaaatctcctcttaattaatgcatatatttactaaccccagcactgctctatagtgaggcccttttggattgtgtgaaccctacaaattgaaaagaaaaaaaaaatcagtataatatcaagatgcgtggctcaaagtttttgagtactacagtttttattccccctaatagagaaaagattaattagtatatgaaaattactatttactggaaccaaatgaaccgtatattagtataatattggaatcattttgtcgtgtatatttttgggtactactgtctctggtgattaattaaggtatggtattaataaattcaaaagtcagcctctagtgctttataggtcaccaccagtactgatccaatctccaatggtaaaaaaaatgaggatgtttgtttaggtggatagatgatgtggcaaaatggtgagatgctatatcattagtgtaaaaagaatgtcattctacgattttgtggggatgctatatagtagcatcaatgctatcataattatttaataaaaaattaaaactaaaaatttattattgc

SEQ ID NO: 306863 - DNA, 1397 bp, Cannabis indica
acactatacaaccaaaaatgttaatttatttctttaacaaacacaggattcaactcaaggaaaaagagaatgaaccacttacatgtactctaattctacattctaaagtaggaaaccgatcccaaaactacataataataatagacagcatttcagcaaaaaaaaaaataataataataatagacacagccaacagagaataccactttctgtcataggaagaactcctgcccgtacaatgccattacgactcaggcatcttgaacccaaatcttaacagttttatcaccttcgaggtcagcagaggcaattttgttctcaatagggtgacatgaaacagagatgacagtatcagtgtgaccttcaagtctctgaaccacattcttacgagcgacatcccatatgtaaacacatttatcctctgacccactcacaatgtatttcccatttgtcacggaaaattgtagatgttatgcagtatgttttgttcacatgcccactgtaaattctcaaaaacttactggttgagtagttccacaccttctgcacccaggaataaaaaaacccagttaagattaaaaagaacccaacaagataagcatttcaaccacaagcaataacattgcaaagccatgtaaagaaatcaagttttatctggccttctatttagtagctaagcaattaaagatatcaaaaaaaacagaactaacaacacccaatatactactatgagcatgttaactaatcctaaatagaatcaatcttaaacaaaaatgatgagtgggataagatgactaaaaaactgtcatccttttctcaatattataaaactttttcggaaattagagtctcaaataggtaaacaaacacatcaacatataagaagggaaaacatttaccttattatcatgattttaaatttaaatgtaccttacaagttagtcataacaacgagatgttttacttgttaatcttatcattcattttcagattcagtcataagtaactgtagcatacaagattagaatgggctacttattactcagatcattcatttcaaaattcagtgattagcaaatgtagcttacaagctaaacataacaatatcaatatgtttcaaaaaaaaaaaatagctaaacactacttgttactctatgagtcgtcctaaaatattgtgcagtaattttttgctagtaatactgtaatagtataataccattatacgatgaataccaattgatgactcagctagtataattcaatttatttaaaatcatttgaagcaatatacaagatcaaattgagaagggatttaccagtgtgtcattagaagtggcaactagtatgaacttgccattgggggaaacttagcgaaagacacagcaaggaccttatca

SEQ ID NO: 306864 - DNA, 2455 bp, Cannabis indica
gtctaatataatgtcctttattctgttcatgattggtggctatacaatattctgtgtaaaaaaattaggctgaagtgcaaaaaatgagggtggaaatggctgccatgaagagggatgctgagcattattcacgtcaggtattcttattgattatccagattgtcactttctttttttgaatgtgccattagattttatgtttatctatttacaagtactgttcatattataccaacaatcttctgatgatatgcattatgactgttaatactatgcttctatcttttgtttacctcatattctaataaattgcaagagtgtattatgttcttctgtatgagaaacttatggacttaaaacagtatatatagcattaccttatttgtttggattcccaatttgcaggagcatatggaacttgagaaacgctaccgtgaactaactgatttattggtaagtcacattttcaaatgtttttaacaaaaaaaataagttctgcaacttgttataacatctagaaaatgtatgacaaactgtgtataattaataattgttgtctgccattcagtactacaagcaaacacaattggaaaccatggcaagtgaaaaggctgctgcagaatttcaattagagaaggaattgaagcgtcgtcatgaagcacaggtttgcttttaggttttctaagctgcttgaatcattaagttacatcatcaatgttatctctagtcttttctaatttaataaactcatgatgacattatacaggcagaggcagaaagaagtagagtttcacgaaggccctcatcttcttgggaggaagatacagaaataaagacactcgagtatgttgatgctttcaaagacctacacaaaaatatttttatggacatttgttgatgactgttacataatattgtcttgagactctcaaggtccatgaagaatgtttagattgatgagctttcttgaaatatgtttcttcaattggagaattttaatatgaaacataatgattgcaggacacttcccttgcatcatcgtcatatggctactgcaagtatgcaggtattaccacgtccctagttgctcaaactaaaataaagaacaaaattcatgtttttccttcagtttgattgtgtatacttctatttgctgctgacagttgcagaaggcagcaaagttattggactcgggggctgttagggcaacgagatttctctggagatatccaacagcacgaattatcctgcttttctatttggtaaaaatggtttgacacgttattaaaaagactgattataaactataacatgtttgctggtagaataatttaaattacatttcaatgatgagtaatctttctacaggtatttgttcatctcttcttgatgtatctattgcatcgacttcaggtttgatattaaaccatctttttaaaattgctgaagcataaatttaactctctatacaactctgaattgaacttgatgatacatggctgagtccaatgtttcttcatatgcaggaacaagcagatgatctttctgctagagatgttgcaaatgccatggggcttgccaaccctaccttaccatgattcagtagctgctgctgctctcgcgttattattttttggccatactagtttctcctaaaatagattcttaaatgtctctccttaaggtgcattttccattcattttgccagcctgaaatgccttggaggatgatgaagtaggtggcacaaatgaaaagtttatttctcattgtttccacactttattttcaagattggggaaattgctgcagattggtttggtttggaattgggaaaactggtttgcattaaagggtactcatttcttagtctaagggggcaatgtagcgatagtgtaattacttgaacattgctggctttgtatacctgtttggccctaaatatctactagctagccatctcaagtatttctcagggttggtactatttggtgtgcccacccaattctcattttgcattttcatcataattttgttcaaaagtgagagaaatgtggttacaaatacttgtaaattcaccattatcaatatttgtacccaaaatgaaatgggagatcttacactattagaaacatttgagctgactgaattctttcttaataagtttaagctttttcttttattttcttttgctggggtgtggtgcgcggagttctataactatggtactactcatataggtgggaatgtctttttcttttcttttttccttaaaaacagttataattttttgaaagtgttgtaaactttttttttaaaagcaatgaccaaaatcattgataattaaataagggttaatttcacaaatcacaaaaaacaaaccaaaaaacaacaaagatacggttttacggaattttaaacatttttacgatttttttgattttatttacataaaat

SEQ ID NO: 306865 - DNA, 1789 bp, Cannabis indica
taatattgagtatgattgatgattatatagtgtattaattttgtccaaataaaaagataatactttaattccttttgatgatagtttttagacattaaagaattttttctttgacagaaaaagaaaaaattatgaaagacaatgcttttattattattattttgagagggaattgtctctaaaactctttactggcaaaaaataatatagggagccaattaattggaaatttgtcaagtataatatttataaattaattttttaaaatttatataattatatgtaacagccaattattttgctgttgctcactttattctaataaatattttgcccctattttttcttgtacaattaatttatggattttataataagttgagggtctcttagcagcctcttttttggtcaaaatcataattttatttttctagattgatctcatttcactgagtaagacatacatatatattaaatacaaagtattgttattgagtactagcggtatttagcactttctagatatgttattttatgattgattggcgatattctttaaaaaattatcatatttatataagacctatcaataaacacatattaggcaccataattaccttttagtatttctcttaaataaatgtaattgatacatatcaatgataacgttacgctaaatggttatattatgcttctagttttggtttctttctataatgaagtggaaaaaatgtatttttttataccctaaacaatttcattaaaaataataataatactataatatataaaagtgggcaaaatatatgcataataaatttatatataactgctaaacagtgaaaaacacgctgatttttagtttttcatgaagatgaaaaaaagaaaaacaaaaaattatagtagttttatacatagtacatttatacatatatgttatatatgtatatgcttataccctttgagtatctgaaaggatagagagaagaattcaaactagtatacttctagatcttggcaaggatcgagatatatataaatatatatatatttatatattcatgttttttcttagtttgttttttaaaatagtatatatatatatatgtataactctatacgtaacattatgtagatatatgtgctctccactttgaatttgtttgtatgaaagtgacatgaattaatatataggcttttcaaacaattaaataattgatttaaatacaaatgaagtaagcaaattgtgtgttcttatagtaaaagtactatagaatatatatatatatataataattagcttatacgtttacgtaaagcgctaatgaaactaatttggttttctgcggctcttccattccatgtaaacagatacatataatttcgttataattaatttggctataagttttatatataaatatatataaatatatatatatatatcgatctttgtgtcctttctctctttcaatagctaacactgcaaattctcgataaaagtttctcaaaacataaataaaagtttaaactaattaaaagacgtacagatttttattttaattttttaaaaaaaaaacttgtttatgataattgatctttaataagggcaagtctcgtgctaaatgtattttattttgtggtgttgattcttgaacactaaattaatggtggaattttggcaccatttgtttattactatatatatatatatatatatatatatatatatctctttgtgagaaattttataatgcatccccttaaaagggatacaccgatacatctc

SEQ ID NO: 306866 - DNA, 1789 bp, Cannabis indica
aaacgaaatgggtaaccaaacttaccatttactttttttccaaaaataggaaagctagacaacttttcttccaagtttgaatacacaaaataggaaaccatattaaacacataccagccgaaattaataggaaataataaaatatttttgtcaattaaatatgctaaaaatggaattaacacaagatacaagaaaaatacctaacagatttttaacaaactaaaattaactactaactaacataaccgtttaactagctaattaattaataggtttatatacgtattgaaagtgttttcttatcaaatatcatgtaactgtttgagcggtttctgttgctttttattttttgattattaggacatatataggtaggttttgtagcttataggcttttaagaacatcactagtgaaagttgccctcgaaaggaagaaagaataaatttgactattatttttttggtgaatataaatttgactattattgatctaagaagttatgatgggtcggcagcaatatcctaagagttacgaaaatacaaacttccaatcatttggattttttgcatcatctgccagaaagagacaaaaacccaaattgcagccctttgttataaaacaaaaaatggacgccgtattatgaacccctgcttaaacacgtatgaaggtctagagatagccacattatgatcatgcaacaagcttatcaaagctcttctcctaccgccacgtgtcctttgacatgaaattatgccatctcaaatttttcaattactatttatccaccataaaagcactgccaaaacatagggtggctctccaattaagtccaacaactctttcattttcttgttcttttgtttttaattaaccctaaaatcacaaatgtgagactagaaaattaaaccacataattattgccaaaatcttttcttttggttataacaggaaaaaaaaaacagaagtgtgaggatctcctttttctctctccatatagtggaggaaaaaatagattgacactactacaaggttggcttttagaaattgttttttcacccacatttataaaaagagaagctaaaggtgtgaaaatacccgctttgttcgaaataaacatttagagactgttttttgataaaaaccgtaagtataaaaattaattacacttatgccgtcagttggaggttgagtattttcaaccttatttattacacatatagcgtcggttattatggaaataaccgacgccatgggtgggtacgtgtcaatagactgtgaacctatggcgtcggttattatgaaaataaccgacgcaataggtgggcacgtgtcaatagactgtgaacctatggcgtcggttatttcctaataaccgacgccgaaggtgttatataaacatcaccaggggcttcgtcttcctcattcactcagcagcaacacagaacccagaaaacccatctcaaaccctcgccaaccaccgtgaaaacccactctatctccctcatttcttcaccatttcatcccatttttgtcttaaaattttatattttcaatatctaatcccatacactaaaaaagttttattttttcacccattttcactgtacccgagctatttttgaaaaaggttgtggtataactccggccaccgattttagcagagaaaacattgaatctcaacatccattaaggtataaatatgctttaattcattttatttatgtacattagtattatttcgtttttgtaaatttttttaggattttttcattttattaatattatatt

SEQ ID NO: 306867 - DNA, 1251 bp, Cannabis indica
ataatgtattgtacatcacaccacctaattcattattattaatttcttcatattttttaatattaaaaaatcttttaatattttgtttatgtcggttttataatttctttcatgaaaaaggaccccatttgttcacgtcgagacaatcttcattgcttactaatttcaattcaaatactatctattgattaatactatatatatatatatatatatttactccttttgagtaaaatagtactatacacagagaacaaaaagaaaaagaagtaaacatacaaagtaacacatttataatattctttttcgttccttcttgcatatttgattccccggccggttcattaagtaataatgtcgctcaaactctaaggaacgaataatacaacaaatatttatatatgtcaaattgttataactatacatatatatttatataggttacttctgttggccactatctattttcatgttaaatgcttaaaaacaacattattacaaattaacaatcatatatatatatatatacatatatttattagaaggatatttttttctttttgaaaaggaatattagaaggatttgaataaataattttaataacaggctcctgattagcaatatatactccataaatatctctatacataatgatatatatatatatatagcagagcaaatcaaaatatacccgtatctagttatttaataatataattagttatgtaaacagatcatatatttataaaaacatagaaaaatatttaacttcttgggagttgtttgtaaaaatagcagcaattaacacatatatatatataggtactcgtttaaatcaacaacatgtaattacgatatatatatatatatatggaaactcattaatatataaggaatatatatatcatccaattatgaattgttcaggtttaggtgaacctgttcattgtacagcactaattaattaattaaagccttaattacttcataatactctgataactaataagattaatgtatgtttgcttttacaaacaattattaatatttgtcataagaataaaacttcatattatgtatttttcgtagccaaagtgtgttgtactgtactactactaatcagaagaatattagtttctacgtggtgattcgtgagattaggatacagccagaggagcatgtacgtaggtttgccttgagatttgaattatatgcctagaattaattaactcctctctctctctctctct

SEQ ID NO: 306868 - DNA, 1210 bp, Cannabis indica
tatatatatatatatagtcttttattagaccaattagagcgtgtgtaattatatatattcttctatattttcaaatatcttgacattaattatctttccattatgcgtataatatactattaatgatacgtcaattagtttcatgtcactattacaatttttagaattttatttcattaataataattatggttttttttttgcttgacttctactaatactatacatatatagtattgagtgcaactttccaggaaagaccatcacattcaaagtggattcaggatcgaacgctcaatattttgcatcattaatagaattcgaagatggaccaggtgaacttgggtccgttgatctgaaacaggcacttgaccaagactcatggcttccaatgcaacagtcttggggagctgtttggaaactcaacgccggctcgcccttaaaggctccattctccattcgtctcacctcaggaagccagaccattgtcgcaaacaatgtaatccctgctggttggaagcctggccagacatatagatcacttgttaattttgcaacttaattaatattaaactaaaataaataattaatattaatcttttcactactaagaatttaatgcagaagctagcttaattaattataagagtaccctaagtcaacttattctaacgagacttggaggtttgtcttcatgcattatagataatattaattaattttaattaaaaagtttatcaattatattgctctaagctctgctttgtggaattatatatgctatgattttatttttcttggccctaatctgtgtttggcatatatttacatcatcgtgagagatctctttagtagatcctgttaacaaaatcaaattcattctacacaaaatgtcaagcatatgacgtcgttttcctttttattttaactcccacgttattaaagcacttggtttttatgcatacgtttaaggtcttcacttatagtactttttgtaatttgtatacacttgattccgacttaccaccaaacgctaataaatatgtattttattatagcatgtattatatatatacatgggtatgcttttaatggatattacccatgtatatatgagtattttattcttgaccattggatcaaatatttaatggttgatatttataatcattaattaaatattaaaaaattaatatttcctattttgtta

SEQ ID NO: 306869 - DNA, 1334 bp, Cannabis indica
gagctacctttttgatgagccactagctttaggtttgatgatgagggtgaagatggttgtgttgagtaagaagatgatttgaagagcttagcaagtgatgatgaagaggatggaattaggagacattctacactagagtataatccactctctgaaaagaagtttgacaagggcatgatttttgctaatgtggtagtttttggaaaaacccttagggattactttcttgtggaaaataaggatttaaattacattagaaatgaccaaagaatcgttagatctatgtgtagaggagaggatgtaaatggttaatatatgcatctagggttagtttagatgagacaatattcaaggtcaatgactcaatacgtaccaacaagtatgaacacaattgtgcaattgtgttgaacaatagacttgcaaattcctcgtttttggccaaacactttctagaaacctttaggttgaatcccaacctacattataccatgtttaaagagatattttcaaaaacaaagtaatataaagtgagtaagtgtaccttctacaaagcaaaacaaaattgttatagatatattagtctgacgtgctatgaaccttctacaatatgagaaaataaatttatttaggtcttatgtgctttgttattttttaagctccttttcagaaaaactctatgtagtaattatttttaattttataggctgaaagtgcttcgtttggtttgactgttagagttttaggttagtaatttttaatatattgggtttcagcaagtagtgaatttatagtcttgtctactaaaatttttgggagaagtcatgaggaatgataaatctttcttttttttagaaaaaaataattatgaggggaatgatttgttcaattataatgtttatttaaaacaacatgaatttcagaaattctaccaaaggcaatcacaatcatagatagagccttagaaacaaagatacaaatataaaactagaaaagcatatctcaccataaggaatctacaaaacatgacattcaagaatagtggaaaaaaacactaatcctaaaattattttaggactcttaattttatttcaaatctaccctaaaattcattatattttgccttgaagttaaagtttaaaaatgatatttttctcatatatggtaacataccatgtttctctatatatctcttttaaattaataatatattaatgtcctttcacatgtatttttgtctcacacccatctattgtatcatcatcacatataattatatggaagagatttcaatggttacatttttattgtaaccatcatggttacatttttttaag

SEQ ID NO: 306870 - DNA, 1095 bp, Cannabis indica
tccaatctcttctgtccttcctcagtggacaacccagctttggtacattgcaattgaacaaaaaacctcctcaattggtattcgttcctgtgtcacatcccaattttgttacaaataaaaataaaattaagaaaaaaagggtcaaaatttattaattgtaattcactacaaaaactacataaaataaacaatgatttcccaaattttgattataacacaacgaacagaatatacataattataaaaacaagaactttgattaaaaagaaaaaagaaaagaagtatttttgcatggtaaatgaagaaagacaaaaataatagtacttacaagatcgacagtctcattcttaatttcttcgaagttattggctgccatgtttaatgtaatttttgtttttctttgtacacaaactctagtctatcaaaaattgtgtattgctagggctatgttgtgttgtgttgcatggtgatgaatgtaataggagactcataatgtttataggtatttatatttaaattaattttatttatttatttatttattaataaatcttttagaatctgtttcatttgaattggaataagtcgaccatgtatttaggatcttagttcaggttcaatttccctttttattttttttctaatatatatacgtatgtttttttattggagtgtattaggtttgattgtttattgtggagtatgtttacctatttaaaaggcaaatattttctttcttattccattgccataatttcaaaatagtcatcgaaaagtaataccctcttacctcgctctaccaagttatttgtaaaaaaaaaaaagagagagaaaaggcaagtaattaattgattgatttaattgacaaaaatataaaatatagtagcttgattgaccatgagaattaccattataatcgttcaatgtaaaaatatatgattttaatggcatgtattgaaaactagtatattctcttcgaagaaaattttatattattcttccccaagaaatttatataaatgattcttaatagtttgtttgcttaaattttataaagggaaatttgaatttctatgcttacattaaggaataatt

SEQ ID NO: 306871 - DNA, 3174 bp, Cannabis indica
ctcaaagaagggccgaaagagagagagagtttgagagaaaaaaaattgaattttgcttttctttgatttttcaataaaatgaataactaacatactaatccattattttagccaatttaattcaaaataactcaaataatcacataacaccaagtacactaaaggacaaaagcttatggggcaaaatgattattttgcccctcccatactaaaggattaaaaagcattaaagggtagtttgggaaaactctaaattcccgactaatctcgacattcccaatgtctaacaacaccgccctgctaatctaaaaatactaaattgtgattctactaagccatacacctcgttccatgttgctgggcaccgaaaaggcaaaattatgaaatttcactatatgacacaaaaatacattctaaattcaaatataacaacataaataattatttaaatatctataaataattttcataattaaatcttaattatctgctaatttccaaatttaaactaagcgatctttacagactatatgttctggacttaacagatttgtacatatattaaaccataaacataaaaacaacatgtaaatataaatgacttctaatcttttatgataacaaatcagattagattgtaatgggttttatttagggcataaaatcccaacatagagtgccctacactttcgtttatgcacctccaataatgaagtcgaacatgaagctatactagcaggcttaaagtttgcttaggaagtaggagcccagcacattgaggtgcatagtgattcccagttggtggtaaagcaaatatcaagtgaggaccagaaaaaaggtgaaaaaatggtcacttatgtcatgatgtctcaagatttgcttcaagggtttaaaggatacaacattccccacgttttaagggacccaaattcattcgcagatatgcttgccaaacttgcaactgatcttgagatcattttgcagagagtagtgccagtttgtcacctagaaaatccaagcgtcatggttcagggggtaaattccattatcggcaattctcattcttagatggcacccatttacaattttctaagttttggaaagcttcccatagacaaattgcctccaggaaggtccaatcctacgctccttgatatatgatcatggatggaaagttttaccgctgggcactatcaatgccatacttaagatgcatcgttgaaatcaaaatcagtgctctaatccatgatattcatgttggcttctatggtgatcacacatcaagtccaaactaatcaacgaaaatcctttgacaagggtatttttggccgaaaatgaagaaggatttaatagaatatgttcggaaatgtgaacaatgccagatgtatgctaagattccatgtgcaccacaaactaaaatcacacttatgagcagcccttggccttttacagttttgggtattgatttagtaggagccctccccactggaaaaggagaagtcaaatacatgatagtcgcggttgattacttcactatgtaggttgaggcagagccgatgaacaccgtcacctcaaagaaggccttggactatgtcatcaagaagcaaaagcgattcctgtagtagcggcgagcaaaatgggagcagcctaaaccgcgaaaacggggttgtgggagagcaatacaagtgtcgtactgctaggcgaagcggtggacatcgtgcgtcgtttaggacttccatacaagattttttctgataatgtgaaccagtttgatagcaaaaatttcaccaacttctatgcccaacatggaatcgtaaaaaatttctcagctgtagcccggccacaggccaatggacaaatagaattcgtaaacaaaattatggaaacaacattgaagaagaagctccgggcatgcaaagctcattggctagaagagcttctgcgaattcttttggcctatagcactacagagagaactttaacaggacacatgccatatgcgatggcttacaggtatgaagcaataatcctaatggagacaacgatcccctctcaccgatgagaaaactatgatccttcccaaaaccactccttactccaggaattgtctgatctaattgagaaactcggggaatagtcataggtcaatctcaaaatgtaccaaggcaagatttcctggcacattaactctaaagtcaagaatagtacatttgaatttggggaccttgtcctgagaagagtattcccaactttgcaagaacaaggagtggggctactcaggccaaactagaaaggcccatacgaaatacttcaaaaatgtgggcaaggaatgtttcaacttaaaggccaagaaaagtcgcctgagtgttaccatggttttagcccaataacaagggaaaacacctaaaacaaataacatcctcaaccacctttccaaaagcaaacctttgtaaaaagtagtggtcaggaaatgcttaaaacgcgaaagcctaaccttccatgaaaaaaaaaccatccctatcaaagcatccttcgaaaacactatgtgtgggtagttaagtactcaatgcacttaaaaggcactatgccttgtgatagcttgatgctctgagagaaagttaatagaccatttaccttgttagactatttagctaacttaaatttgcaactaccaaaagggttttgacgagagtaatcctacctgaggataggacacaagtgtgtggaccccaaatacttcctaaatcagcagagggattaaaagttaggcaaagtttaaggtttgacgttttggctattggaaccaaaattctctaaacaacctaagataagaacccctaaaatggtctagcaagcaagtaaagcagaataaaagcttagaagaaaacaagtaaatgaaactaaaacgcctatatctattataatgccctacaaactagccttgcttagtcatgaacattattccttgctttgaacatgaacatcatttcttgctttgaacatgctttgattcttacgttaatctggttaatttttccatttagtcatgaacattattccttgctttgaacatgctttgaatcttacgttagattgttgtcctttaagtattttgttccgcatgatagacttaggatacataatgtgtgatttctagacaaaaaagatttgaat

SEQ ID NO: 306872 - DNA, 3009 bp, Cannabis indica
attttataaaaaagtttaaaaaagcaaacaggaaaaaaattgtaaaataatattaaatttaatatctagtgtaaaaattcctataaataaaaaactaagaccattatatattttaagttaaatttagctcaaaatgtaatataaaacttatatttggttcagtttttatatttgtgctctaatacaagatgtgcaaattagttataaaagtcaatactactattaatcttcattaaaaatatacaaaataattaatttcatttatattttttttattatcttacaaatataaaatccatttttattaatgaatgagaaataattaattaaaaacatatgctatttattgttggcataatttttagctttggttaattttagtacacattaaatattattattgaagttaaattttaacaaaatattataaaaaatgataatagactattatagctctccattcaagatagacaatttttttttttttgtacaatattcaagatagacaattgatgaactttatctcccatttttctttaaatactagaaagattcaggtcaatcttttattaaatcaaggactagaaagatttatttaattttttatttgaaaggactagagagattggcctgcaattagtagtaaactatactctgatttaaaattaagaaagaaataagatttggtacatagagttgtataaaaaaagctcataaaagatgccaaagcctccaccaatacaaattagttaatttagctttgtatatacaatccttgtctttcaacaaaaaccattatttgctaatctacacaaagtaatccactaatacaataaatatttcttttaatatatatatatatttgtgtactaaaaatttgattgtatacattaatgtatagagaataacataatactagttatgaacaagtgaccaaaccatcttgtgaaagcaagttagaaccttgttgatccaatgtcttcctaacttccctatagaattccagccatgaagatgagtgcatttcgaccggggcggcccacaagaacgtcgggttaggactcgccggacaggcgccgaccaaatccaacacagatgctgctggtttgagtggctgtgggaaattgaatgccaagttgtctactttgtgttcatatattttgccatttctatccaatttgtatcttgaagtgccttgaaattggcctttggcttcccatggaactctaggcacacctttcaagttccatctgattaaaatcacattctctgagggttgccatatcctgaaaacctcaagataaatctctctgaacaaaattctgccatggaatcttagtgcccagaatatcaatttgtagttttctataccactgaatgtgtttaaagggtctttaaacgttatatcatccctacaaaattcatttcacaaaatacagttttattgaaaatccaatacatatatgaaagaaaattcaagtacccaattgagaaaattacctgtaaatgtcataattgaggtctttggtgaagattagaggaaggtcttcacggagagtacgaacagcaaggccgaggttgacaaagaagtcatctttgggctgcttatcgtgtgcacctcttggggtgttaagctgcgcactcttgtctgctaaaggggtctggagagttgggagggaagagggaagagaggaagggttgttgggttttgtgtggaggagtgtttggtgtacggatttctccttggatttcgattgaagaagcagagaaggagagagattgggaagaagaaaagccatttcagcttttcatgtgaagaggagttttttcagagagttttgtttttttatttttgactaattttgtctgtttgggtcatcgaaacacacacacacagagttatttcgatttatttgagtggttttgaaggttgccacccaacccaagaccatgagggcttcaccattgattggtagtgattcaatgtggaccaaactcaaaattccctttgcttttgtttcattttgctttataatatcaatctaccattcatattatagaaaaaaaattgattttacttgggctaaacgccaacggtaaaatctgtggaagaaacaaaagtgaaagaaatatgtagtgtaataatggagagaagggggtagggatgcacatgggcggaaaattggcagagagtaattcccgttcccgccttgtttcttatttagacggggaattcccgctccattaggggtaagtccccacggggctatccccatgaagaaaatatgcatggctttaagactatttccaataagagatttaaaagttgagctattttaacacaaataatagttttatgatatttttacattcactttcattattatgctctaacacataattattaatcttgatacaaaatttgatatgttatttaatgttcatttattaatttattaaaaatataaaataatgcattgtcaaaaaaaaaatatatataaaataataattacataaaattaaatataaaatataataataaaataataataataagagcattgttattggacaccagtagtgtctagcaccttctataggtagcactctacgattggttgacgatattccctaaaaaaattattttcttaagttatatgtgacgttatacttaattataccaatagcagtataacatcgaggaaaataataggtaccaataatgtattaactaaaatttaataataaaatattaaaaatagtataatagtaaatataaaagcataatatttattataatgtatattttacatcatgttatattgtgattcacatttggattattttttgttatatatgtgataaatttacattaaaatttagcacactactaaaatggaatttttataaagtaaactatattttatatttctatcacttatttacatctccctccggtagagttactcttatatatgtaaaaagaaacacaacataatatatatttca

SEQ ID NO: 306873 - DNA, 914 bp, Cannabis indica
gtttactcaaacacaaaatggttgcatgtgtacagattagtttgtgtcggttatgaatttgtggtacacagctaattataaatatattggttagaaactttttactagatttattttgaaattagaaggaaattgatttgtacattaatgtcgtgcagagatatagacgagatagtattggcatgctccattttttttgttgtttatactcatttcatgcttttctctttctttttaattttaccttaatctcatttttgatttccctgggtggtcttcttgtctaagtggctgtactttttgaacccatttgtgttttgtcttattgtcattgttaaaaaattattataagatgtacttatctattgttgttcatttgtcaagttagaaaatgcaaaccttatcagaacgctaattttgtaattgctcataatagtttcacactatatgatcttgtatcgtacaattttaaggtacttaaaaattctttccaatttatttgtatgctcatctaaaatttatcatgttctctaatttttggttttgtagcataataatgctaataaagaaggtggtaatgatggaagcaatgataacttgagcttcaattatggttatgaaggtaagttcagtgctgcttcttagctgaattctttggtgattcatttatcatgttgctttaaacatgagagtctgctgacaattcattacaacacttgatagaattagcggcggacaactccgccgctaatactctctctcttggccgctatagggtattagcgacggaattcggccgctattggtccgtcgttaatgcgtgcccgctattaatagtattagcggccgaaaatagggtccgccgctattaatattattagcggcgggaccccgccgctaatgctccgtcgcta

SEQ ID NO: 306874 - DNA, 879 bp, Cannabis indica
aaagttacccacatatactttgtgtattgtgtttctataatcattttctccctagacaataatatgattctgggattattgtggaaaaaagagtctcatcttcgcaaagcataattttattaccacaaatagaataagccaagaaatgtcagatccactctgtctagcaactattgttatagagccacccaatgatggaatccaaaagaaaccttccttcaacacttcctaaataaaataatggaatgcaaaaatttagccaagttggaatttcaacatttaaataacaagtacatcaacatcacttaaaaataggtggtaactcattcgctacattgcaaagagcttggcaaagaccaatccaggctagtatagtggccaaagtcggcaagcaaactatgataaagtatgactaaagtggttaaaattttggtaagcataagcagtgtaccaatttttgaagatgcaataagttcagcaaacagaatgagggtgacagttagaaaatttctgatagaaacagaagactctttgaatttcagttaaaataaggagacaatggttcttttgaattggcaacaaacttacacaagaagactcaaaccattttcgacataagcaatggcccctatacattgcaacttaaatagaaactagctccctgatgatatccattttttatgattgagaatgaaactaaacatgcgaaaatacatatacaccagtataaattaacaaattgagtacctactaatgggttaaccccaacctgcctgctaggagttagcataaatcattcaatctaacgacaatcgacagccaaatattagatattcaattgtgatcgagttggtttttatttttgaatatccaattgaa

SEQ ID NO: 306875 - DNA, 2898 bp, Cannabis indica
actaatttgtttaattgaatttggtcttagtctcacatttgtgattaaaacaaaattaggagtaatttatatttaaatattacattttagtaacaaactgatttttattgtcactaaaacttatattttgtaattaaaaaattatcactagtaactttttttatggtgacagtccggttggagtacataaaccattccaaatcaaaattaaacatcaattaatagatcgatctataattatataacttcaataacttgacctttataagaactataatcactactactattaattgattagcaccaaacagagacaagtagatctgttctatacatatttagttaataaaagactaaatatttattaagacatggaataaggaagctgcattaacaagcaaaagttaatacaaaagtgacaatcataacaccccaacaaaacccaaaaataaaaatagaaaatcaaaacaacacacatacatctaacacacctagtaaaaccatggcacataaaaagccaattttactatgtttattgtcatattcaaataaaggctaggtagtgttgtttttaattaattaattaacattttagcaatgtttagtgcagaaacaacggcggcgaaagccacggcagtggccgctgggaaagccctcggttcggcaaacattggcgcagttgctcttcctcacacatggccccttgaagtgatggctttgtgcctcacatgtccttccttccgccactcttggccccatttctgtatgttcaaatgtatttatttattattaatctaagagcgcactcagatcagatgttttaaaataaaaattattttttaaaatatttataaaattaaattaaaaacacgctatatcagatactctaaactcgcattctaccgtatcaggtcctctaagtactaaaaatgttccattaattaattttctaaaacaattaataatcttttatgggatataataataataatctattcatagactttcattgatttttttgttgtgttaataattaatataggtatgtttgtttaattaaaaaagattgtaagagaagaaagagagtaagtagtataccagtagccaacaggaggaggaggaggacaaaaagagttgaaagagagcgcatgaagagccccatattatattaaagagagaaagagaatgttttggtgatgaggagaatggatgtggaaaacaataagaaaataagggcccttatatagagatagagacttaataatgtctcaatattattcaatagcaaaaagtaaaggtaaattggatcaaaaagaaaaaaagaaaaagtaaagattttggatataaaattatttcgttcaattttactctatgtactaaattgtatcttctaaactttgataaaaatacataaatctaacaatctcaatataaaaaaactttaacaacctgaaaaaagttcaaaaattatactataatacatgttaaagtttgagaacaaatattctaattaatcaaaaagtaaaaaaaaaaaaattctatttgcatcccacaaaatgataaataaactttaattttttaaaaagttaacctttaaataatttttaaaaatcatttttaattattttttttaaaaaaatctcacattgttttgtgttaattttaattattattttcttttttttaataaaatttcatatattttttatttaattttttttgttatcgtattaaaattataatttatttttgttttaaaaatatattttttaagaatataaattggaagaaaaaaaaattaatacaattaaaaataaatattttatataaaataaaaaatattaaattaatgtgtatttataaatttgtagggttaataaaatttatgaaagtaaaattatggagtaaaactacattattgatattaataaattaattacgtgtaagatataaagattaaagatagatggatggagccacaaaaagtcatttgaaaatacacactactaataaagctgaagattatatgtctatattatgtgcatgagattggtgtctaatattttggtcagtacaattatattataggtataattaaatatgagattgtatatgatttaaaaaataattttttaaaaatattacaaattaatcataagtaatatttataaaaagtattggatacaaagagattgctattagatactaacggtgtgcctagcaagacgtgtcgtcttgcaattggctaacgatactctttaaaaattattatattaaattaaatggcacccgatacttaattagacctacaacaatattatacgtaaaaagaaaaagtaggtaacaccgtaccaaacatgtatatgtatatgcatatgatatgagtcattacaactcagtgtcagacgatgatgatctgcaattgtgacaatagtcacattactactcatcacttacttttgctttttctgtatacttttgtcgctttccttttccattcaaatctcatttatcatatttattatccaactttcactttgtttggtacagtaaatgaaacaaagcatagaaaactagggattcatttttttcataattaaccaaaaaaattataaaaaatactaccttttttccttcctatttagtggattgatgaaaaaaattgagaaattgttttatttttttaaaaaaataattgaaatgactaatttttttatactttttttttaaaaaaaaattgcagcttgaattgttctggtaatttctatgtgggttgttatacgaattttagttacaatttaagttgattgttaattgctacagaaatttttatgtaaaatttcgtaaaaatataaaacaaaatatatttttaattgtaaaagtaaaaaaaaaaaaccc

SEQ ID NO: 306876 - DNA, 1243 bp, Cannabis indica
ggtcctggtcctggtccagttgcagtaccggttgcgattatgggtcagggttagtccagatccaagtcggggttcgagtactagtctgagttcgggtctaggtccaggtctgactcttcgttcggctcctcgtctgggtttggattcgagtttgaatttcaggttttgatcccaattcgggttacggtttggttccaagttcgagtcccaggaaccgatcccagaagggagccaggtttgggttcaggtccagttttaggtctaggtccgggttcaggtcttgttactggttcgggtccgggtccaagtttggtctcggtctaggtccgagttcttatccttatttgggtccggggtagggacttggtcgggtttttggtcccgatttgggtccgtggccgggtccgggtcctagtcctggtcccgttctgaaatccaagtctagtttctgttcaggtttttgttttgagtcctgactgtgggtctgggtccaggtacgggtccaggtcctagtttgagttcgggttcaggtttaggtcctggttcgagtcccatatccagacaccgactgcgggtctggtataatcctcgagtctcgaatctcgagtgttgatcataatcccagttatggtcccaggtcccaagcatggtcctaggtcttgtttcgggtctgggtttgcgtcctcgatcccgatcccagttctaaggcccataatctggtcccagttcaggggcccaagtctcgggtcttggtcacatatctatgttcgggtctaggtctcggttggggtccaagttagcgttcaagtttgggttcgggtcccgaggcctggtttaggtttggatcaagtccgagtccaggtcctagtctgggttttggtccgagtggcggtcgtagtctaggtctcgggttcggtctcgagcttggtcccggtctggatttgggtctgggtcccggtctggggtccaaagtcctggtatgagttctaatctaagtttgggtttgggtttaggctctgctcctcttctgatcacaggtctgggtcctagtcccggtcctggtctaattctgattccagatctgaatttattctgggttcgggtcggagtctgagtcctggtctgagtctagttttggttcaggtctggatctcggtctgggttcgggtcctagccaagtccgagtacggatctgggtctgggttatagatctagacactgactacgggtctgttggaattta

SEQ ID NO: 306877 - DNA, 1137 bp, Cannabis indica
aaaaaaaaggaaaaaaaaaaaatccaaacattatcatgaaaaattacacttccaaaaataaaactcaaatatttgccggattgtaagctaatagaaattttataaaaaattacaagtgatcttaaaaatgatttcgtacaatcttgaaaaaacatatattgttggattaaaaaattatcatggatggtgaaacaaataatcaatttgggaagtttaccaaacatttctccaaaaatatttacaatcattttccaaaaacacgtgtttaaaatctaagttattacctctaattagactataagatccaattttttaatgattttttatactaaattttaacataacatcatattaatcgattattaatattatacaagagatatgttatatttttaggtagtgtatgtcttccagtagttaatatttatttacatattttctattaaatttataataggtagtatatttttgtgaaattactccatataatatttttaatttttttaaaaatttacgttttgggttgctccggtagtttctatgtggattaatatgtagattttagttgtgatttaagtagcttcgttagttgctataaaaatttctatatagaatttcgtaaaaatacaaaaatatatatatatatatatattttgaagttattttttattgtataattatttgccaacaattaacatatttaatgacatgaaatccattagacttgaatccaatccaattctttgaacaaaaggatttggattaaatttggtgtatctttagcggttgcagtgtcttctgtaaatacaaattattataacatttcacaatttcttttatggatatttaatcataccaaatacattatttttttaattacctattaaaatttgtgataagctgaatggggtttattttttgttggggttagatagtcattagaaggtttttttgtttgtttttgctctgattgttagaaaaattaataattaacccaagatcaatttgtatataatatagaacacaataataatatataataataggtatgtatacctgattgatccattgcaattatctcaattcgatccacaacaattgcttcaattcgatagtgcaatactatcaactaagtct

SEQ ID NO: 306878 - DNA, 1529 bp, Cannabis indica
cacacctataattgaggaattgcgagaatcaggggaaattggaggattttgtgagattgaatcattcaaatattaactgctttattctataattaatgtaaatatactacatctttttccctataaataagggatcatattcactattgaatgaccgaattctgtattctcaagaaatttattatgctggcaaattatttgtaacttttacagaagaattagcaagaaactcacttgaccaagttcatgtgatcctgatgtttctcatataaatacaactaaaaaggcaataggccattaccaatctaggggcagaacctccataaaattctctgtcgtttatttgctcttgcatgtttcaattattcaaacactgatatttttgttttattaactcagggttgttgactaaaaaatgagtcaacactttaaatcatataatcacaactatattctactatgatgacatcactataaatgtgaataactatatgatcaatatttaatagaatgtaagtattaaacatataattaagtaaaataaaatgtgtgaaccaagtaattgattacgtcataaatgattttctatttgctttattgaattaataaatgagattacaaagaaaatgttttatttaggacataacatccaacaatttgaaggtctattatctctctctcaccctctctgtgtagctctcgctctctctgtctctctctttctctctccttttattttcttcttcctctttttgtctaatatcagccacacctagtaacttagtttctttcttcgtgcacatcaactacaccagccaaacaacttaattctggaggccagcagcccaaacgggtatcaaatttgagatctcccctacctctctcaacctctctcttagcatcacctgctccaaccagatgagttttttcaagtgaccgacggcccaaatgaatatcgaatttgagatcaccgccaatcaaaatccaaggttcgttatctctctctttttatctatctatctatcttttcttttctttttttttttgttttatatcaaatgtacctagtagcttaggtttctttctttgtgtgcatgaactactctagctagacagcttgtttttggtgaccggtggcccaaatgagtattagatttgagatctcccccctctgtctctctgtctctcgacacctccccatccttttgtctctctctcaacctctcgacctcttaaccacataacctctctctctctcgacctatcttaaactctctctctcttgacctctttctctcaacctcttctctcaacatcagctgctcaagccagacagttttgttttctgtaaccaatgaccccgaacgatatcaaatttgagattgctaaccatcaaaattcaaggtgatcatctctctattatctttttctttctgtctgaattcagttgcacctagtagactttaggtttctctcttcattcgcatcagttcctctatccaaatggtcttatttctgatgagtggcag

SEQ ID NO: 306879 - DNA, 1372 bp, Cannabis indica
ttttggtgtcttgttggagtttttttttttttttttatttcttgtattttatttttataataatgttgttttttcaccgccattctagattaatagggattgatattggcctggtgcaagatgcaagccttgtctcctattggttttttgtctcattgcaaattcaaatcgttttggcaagaacatctctgtctccctccttggtcgtcagatttggagaatcaatctatattggtcatttattatgtgctccaatcttttgtgattaaccatatcacaacatgattggtcgtgttatttctcttatttataatttaaataatgaggttattatgtctctaatttttattgaaagattattggctaataatttttgataggtgaattcttttatatgtttatttgatttggaagcctaatatactccaccctttcttgatgtttgacaactagtggcttattggttcccaaattgaggttccatgcaccacttgtctccatgtggtcccacatcgtcagtactcgtccaatcaacatcaaccgcgtggctccgttagtcttcccttccaagagcgtgccaagcggcctgtgagaaggaaattaaaagaagaaaagaaaatgggttgtttttttttttttttggataaattcccatccgaaaattacacccacaagcttacaaaaattaaaataaatgggacactttatattaatacccataatactcttcttttttctattctcttctaacttcacttacttcatattctcatccgtaccgatggtggtccgatagtagcccaatgtttttttattttatgtttttgtacataaaaaaatggtaaaatcaggctaccatcgaaccatattctacatttatatttatattaagctccatacattaagctcgtcaggaaggtatcaaaccactatcaaactatcatcggaccttcatcttgaacctttactcattttaacaacaggaagacatcgaaccaccattgggcctggcaaaaagaccaattttctacccaaaactcaaattcgaccgttttcaactataaatctaacatcaactcacatagaacaaacattaattatacaatttattctcaaattaataaacatataattaaaatcatacatttcaatcctaaatcacgcagaatacaataaaatgaaatggaaaacttacattcaaggcgcggtggtcgtggtttggagatcctaggtcttgagttggtaatcgtgggttgttagggtcttcgtgtatgtaagaagagaagaagaaagagagagagagagagagagagagagagagagagagagagagagagagagagagagagagagagtagtagtagtagtagta

SEQ ID NO: 306880 - DNA, 2680 bp, Cannabis indica
ccccttacggatcacgagactactgactgtcacatatttatatatatatatatattttaaatatatgaatattgtttacaatactaaaaataacgtttatatattttattgtatgcaaaatttatttttttatatgtttagtaagtaattatttaaactttattttaatattattattcaaaaaatttaaaaatttataaataatcttaaattttttttttttgaacataaaataatcttaaatttataatatatgcaattgtaaaaaaaaatttaaactaaaacatttttatgaataccaagtctacacacaattttgatatgtatataatggttttaataataatgtatacattcatttatgagtgaatttttgttgtcttctttagtcggtgcaaagacttatggtcctctttcttaccaaacatatatccaattggtctcatcatattcatgcacaattatattattattattattattattattattattattagatcttatatatattatatatgtatacttctaaattcttattaattaatattaatttgactggttggatttagagccatattcaaattatataccttttcttaataaaatatacatatatagctagtgagatttcaactcttaatttttattttagatgtaatttaatttaataattataatatggagaaatattacatataatatataagtggggaaaaattctaccatatatccaaattcattggttaattacatgcattatttgattttaagaaaaaaataagaattatttttctttatgaaaataataaaaaaaaacttaagtttaatataattttatgaaatttagaactgtttactgattttttttggaaaccgaattaataaaagttaagataagaaaagatgatgacgatttttatgtgttcggagtgttaatgagtcttagttcatgagtcaatattattaagctcaatgactattgaatattttacacaagagttgttcttgcaaaagtttgtaaactaagtctcgaacaaaatcgtaaccctttgcatgaagggataaaatcctatttataggctagagtgaagttattcgatgaacccggactcgttagggtttaaatgaataaactaagcccactgatggggttactttgtgagaaaagtccgttaatagggtaaaatacattattatattgattttgggccaggtaagtaagacccaatttgagaaataattgttgtccgtacagagtagtaccattcgatagtgataggtaggcatgcgctgtcgatcgtgcacagtaaatatcagagtagtagaagttggacaatatgagtattggttctgatgttatgcgcattttctgtctgacataaggaacaaacccttaattttgtgagattcagtgtcaaaagagtgccatgtaagacgacacccgaacacatctttgactgtctgttctgaatacctcgtaatggcacccagatatgttgcgttaagttttttcttctctgggcaagttgccctttcgggaccaatatgttcgaccttatcgagattaaagttagattgcggttaaatttagagttgtggtccgactctatagtgggctgatccattagctttattgggtttgcgaatgggcctgtcttaattaattttgaatctcaaaattacatgtatcacctatctagaaacacgaataaaaaaaatatgtattagtaaataagaaaagtttctcatcaaatttgtagccaacaatttcctttcatacaaattttggatagtgaaattcaaggtttaattttaattgcatgagtcttgagtttaattaataaagcacctataaataatcattgagatacatatgatatcaactaacaaagctcattatttgctaaataaaatatataattaaaatattagttattttttaaggatgtaattaatgtttgttgcatcatatttacaaatgtctagagcccataatttaataatttaattaattaattagttgttaactattgcaattgcaatcaaattaatcaaattgatatactttgtcaacattagttgaataagaataaatgcatgcatgagcttctctacacaaaattcatagagttgataggatacacatgcatcacagtgcttcaaatataggctatatagctacctatgtacatatagatacacatatatagctatagatatcattttcatgacaaaattaaatatatccaaggctatatgcttgaattatggatcacaaattaaggaatataattcaataataatgatcatagctattaattaaggtgtttatataaaatagtcaatttaatctaatttatacattcaatattccaattcgtaaagtgtgaatatttatacttatgcgaattagatattaactgacatataaaaataactgatccaatttaattcacacatttatataaatttttaaaaattatatatagaattaatattttaatgtaaaacaattgtaatttaaaaatttaatacatataatacaaatacatttcaaaacttaatagatcaaatcaggctcggccctgggcataggtgggctaggtctgtgcctaagacccacccagcccaggggcccaaattttttttttctcttttaaaattatatatttctttt

SEQ ID NO: 306881 - DNA, 2497 bp, Cannabis indica
attctttatttttatttaatttccaaattaatcactaccatttaatatttaatagtaatccaataacttaaaaaaatgtaaccacgatggttacaataaaaatgtaaacattgaaaccccttccccaaacaataagtatttaaccttcacgaatgagactacataaatagtcccgtctttgaaacatcaaacctactacttgattgcctttaactcttgtcttcaagatagcctcaatattattctataaatagtttttttcattgaaaaatataaatattttctttaatttttatatacaaataattctgggaaaacataaaggtatttagttttttaaattattaaatctattcctttatggattaaaatattagttatacatttataattacttaaatatataagttgtagattatacaacattcaatctaatctattgcggacaatggttatcctcaatttgataattggatcagacattttttggacatttaagcctttcttttttctgcaacccaattttttgtgcaatatgttctcagtttcgaaacaacaacattttgtttatctctatttaagttcaaatagtagcagtaggctttattggtaataaacagtacaacgcatatagaaccatagaggtttgccactgcaggtacttgaagaagtagtacaattaaaaagcttagattatttctactctagtgcttaaaaagtaggctttggaaccaagcaaattcttctcactaaaccccaagacttgccactacactccttagataatgcttcttctcctttctcatctgtttgctagccctacaatatgaccaaaacccaagttagttcaacaacattttctttcttgtgaatggttgagacttgagagaattggttgctcaccagtactggttgtgtagcacaaaggcatcggtgggtaacttcttgccattgtcattgcggttccaatggtacagtgcgtgtgtgcgattaaaaatctccaacgttgaatgcccataactcatttcacggaaagcagagtactctggttgtgggtctaggaaactacattttccacataatcgaacactcaattcattttaatcccacttcataacttgtcaataaataaacataaaatatttttcataattttttaaaatgtaaccattgaaaaatttggcattaattccatacctatccaaggttgtagtagacatgaatattgctaagagggtcacaagtagaattcaatactaaattgcaagcccctttggacataatatataaagggaactaatttacattttaaaaactgttatatgtagataaattcataaggaaattaattaaaaaaaaaagaaaagtaaacagttcttacggtccggcgaggccttcttgatttccgccatctccgacggtgatgtaaagtggagctgattcgtcgggtacaggataaggataaccatttgaaacattgaactttatatttgagattctattctgaaaaaataacgtacccacaaaaaaagtattagtcaaatgaattaatatatattaaattatatatatatatttatatattaatgtttggaaaagcatatatatatataccgatctttcatatgcatgaacatgtccagcaaagacgacatcgactttgtaatcaacaaaccaactctcaaacgtacttctcatgccttctccttccatgaagtgagcactgttactgttatagaatggaatgtgcataagaacaatcagccatggcgtcttttctctgtccacgtttttcagttcttgttttagccatatgtattgaggtgtgtattttactgtattcatcaaaaatcaaatattaattaacaagaccaaacaaataatttgacacaaaataatcaaatagttctgaccatatggagaatagcttgagaggacgattatgtgagcagaggctcgtctgattgagtaccaaagtgggtcactactgttgcacgccttataaggtgtagtgtatcgattcaaatagttcttgaaagttgtcatttctccctacacaagttttccaatatatatatatatatattagtcttaattaaagtgtttcagaagagaaatttaattacatgagtatcttaattaccagttgaggcaaaaagtcgacttcatggtttccagtgttccaaatccatggttgataggcagtgcttggttcaacgaagcgaccccaggtgtcccaacgtaacccaatttgatcatactcatacgaagaagcataccgatcagcataacttagatctcccagaaataacactgcctttgctttactctccatgtaatgctccaaagtcgaaagagaattgtatgtttgccccaaatctcctgtacacacaaacaccatacactactactcaattaataatttgtaatgttataattcacaattgacatttcttggtttaagagaatatacttaatattatgttaaatttaacga

SEQ ID NO: 306882 - DNA, 2049 bp, Cannabis indica
tagtgttcttctctcaaaatgttcttctaagttttctttaagagatttcttaaatagtgatagtgtgcattatgggtcgtactgaatagatattactgttatgagttaggtatcactcaggtgtaaaggtaactaagcaatctatccttcataatcgtaagtcacgctgcagagtcgtaagtcgtgctgattcttgtgagaacatagcttaagttgtctttatatttgatgatgcttagcttatagcaggaaccctaatatccttagagccccactatttcgggtctgctagtgtctattacatctgctagaaatcttatgcattcgtcttgtaataggtctctaccctttattatcgagatgattgggatttgggaacccagaatcgacccacaaagacaaatggctcttcacccttaggctaaaaagtcaccatcattctcttgcaatcaatactgatcgcatacttagataagaagtccattcccaaaataatatcaaagtctgctacgactagctcaataagattagcactcaactctttatcatccactgtgactgacataaacttaacccaccttttggagatagctgactctctgccaggcaatagggttttgattagcaaaggctacatagtagttagaaaatcaatgtagcagtcctaagcaagtagggcattacaacgtgggactccttatacccttcgatgcatcttcaacatggtgattactttggctttgatccctgtgcccttattctttctcttcatggctccactgagcacaatagctagtgtcccccacaattccactttgatagaacttggattattgaagatggctttaaagattgtatctgtgatgcttagacttcagttcccacaatgccaacccatgatccaatttccaatatcacctctaaattccattagtgtgaatccccactcaagaatcggaaaagaactttgggcccccattgctcagtaaataaaagacgcccaagctcagttgcatcttgctcaaaatgtctcccaacccaatgatcaaagcttcaacacatgtcacaattttcaaaacactcttaattgccttctttacaaggaagaacttttttggtagcaaagatcccaggttgattggctcaaacttagtgataaaaacacttgttactttcatcatgtggcttcttctcaatgctcaatgaataaaattcactcccttactcgtccagatggctatgttgccttcgataatcaatccatcatggctattgtagaatattattttcccaacttttcactagccttaacctagattattcactcattaacaaagtcatcgtcgagatcatagtgaccctaacacatgataagtatcaatcttttaatgccccttacacctcagatgaggtcaagcaggctgcctttcaattagctagcgacaaagatctaggcatagatggttttaatggcactttttacaaggccaattggcatattgttggggttgatgtcattcatgtcgctcttagcttccaaaatggtattgctagtatcaactccatcaaaaacaccattattatccttattcctaagaaggcccacccccaatgtctcccagaatatcgacccattagtctctcttcaaccttgtataaaatcatttcttgggctcttgttaattgccttaaacctattctttcttgagtcacatctcttgcacatagtgctttcttgcctaacatgttgatctatgataacataattatttgccaagaggttacccattctttggctcacagaactttgggataggttggctagatggtagtcaagcttgatatagctaaaccttttgatagagttgagtggccatttctttgcaaggtgatgaaaaaataacctatccctacacgctttaattactttatcatgtcttgtgtgtccacgacctctttctccttttctgtcaacaaccaagattgtgttggaaattattttaccaagatcttagatctactcacaagtatgttgattaacaccctaaa

SEQ ID NO: 306883 - DNA, 3327 bp, Cannabis indica
aattggaaaatatgacatttgtgaaataatagataaatggttgaaaaatagcaaaaatataattagtagggcccactatcattgtcggccactctaggcttattttagctattattttatcattttttattctatataattcaatcctaaccctaagtaaattagtataaaaataaaataatagtctcataatccaactaatgactctaaacctagtttatatcttgttagacagctagagagttttgagacttcttcttcttctttctaatatcaaattctttaagtgttcatcacataaaaagttcgagccttagtgattgagtgcatgcccacacatagcaacttagtcctcaatcatagtgtgtaacactgtgaagaatccaaacaactgaaggagtgtcgggctcagatcttgattatactcggcaacagaaaggaacaagggttagagatctgagtggaaggagacattatattctgctgcaaccaatgtaaggtttcacatactttatatgcgcttaagtttcattgttttagaaatgcatatttagaatgttaaaaacatacttattagtaaatttaggtcttggtattccaacagttccttcctcgctggagggtcatccatgggctacccgacaggcgcaggccctagatgaggaggatgaagagatgatccagcaacatctctagaatgagtggtctgagccaccttggcccttggatgacccgaaggctcctcagaaggtccactagctagacctctcaacctggaagacatatccgtaaaaagaaagtagcaaaatcagaatacacgttacaaatattcaatgcaagacaagaatataaaggatggtgtaataaactatcaaataccgtcatcctcgaaagaggaatcatctgaatcctcaacaacttccttgcccttacctctagatgaaggcgaggggcgagtaggtcttggagacctctgtcctccaggcctaatatgaagagtagtatcctcgactgtgcccccatgagccaagcattggcggagggccctctctctcctctccagatctcgagctattcgaaacagcggcatatcaacatccctgatgggatcttgtccatcaccggaatagacgtcctcagtagctggggctttatccataccaactgatgggtccttggcctccacaactccaaaagcaggagggtacatgccgtacttctgaaagctagctacactggccaacttgataatgttcctcgtctccatagggaaggataggatgtgattcaacctatccctcatctgtaaagtagggatggagcgcttgtatgacggcactcattgaaagcgactatgtcgaatcccatgaacatctcaagcgataaagtagttctgggcatacccaccaacttttgacatagctgtgttgttggtgtcatccaaccattagtggccaacctgactaaattagaagtacccaatctggttctgctttggagcagactttgaatcaaagtagtatccaatctcatacggagtaggctgaggccagcctagctctgggtataaaaaaaatcattgatgagaggtattttatacttttcgaggtgctttttgttggacacaccccaaagtaagtagcaatatctctgaagtatgggtgtaacggcaacaccgctccctgctcaatatggcgctttaaccatgtcatccaattgagagcaagccaatgtgctctctgatccctcatgggtatctcactctggacacccctcactagtccactagcaagtatcctatcaaaagtctcggtaggaatgacagatgtgggagagacccatgtgtctccctttgatctaacgtccagaacttgaggctctgaagattgattcaagacatgatccagggctaacactgaaggctggcctagcctgttcagagctaacccatcatcatcatatccacccaaattgcagttggagaggacaacacaagtcctgtatctcttcctcctaattggcacagcctcctcaacctcaaacttagtgtcacaactcttagcccctggttaatcttaagcacctccacccggctgacctctggatctacatcatcataaggctatgacgcctcctctacaattctgactctgcccatcgttgcaacactagcaacatgaggatcatatggaggcaccctacaatacgattatttcattttggccatgactattagtccagaatcacacaaaaggagcacggggacagactaaaatgctatttctcaaaagcaaagttgacaagacctatgatacagtagttgtcaccaccccaaatcaacactcaaaatcacctgcatagaagagacaaagggaggtgagcaacttgataaagctacagaaaaagttctagttaattgtacccaagggtacttaccaggtaaattacactgtacaaggttgggtatcagggaagtaccgtcctaagtacatgtacttagacaaatagtgagtgctaagttgtgcacttgactataatggactcactaccaagtcttatacaaagttctcaaggggaaccatgcataagactacagttgtacatacctcaaaggccatcacgagaccctagccgaggtcaaaagaagacaaaagaatggctgcccacttggaaccttagccttggccaaccagggttctctagccttagagggtcgaccaagtcccatgacccagcctagggccggccaggagtttaacttccaggcataggctgaccagttttaaagttatacgcctatgatcagcagaattccatggtgaacatccatggccagccaagtcttgaacaagacttccaaccagacaggatgtataaaggattcgaacatgtgtttttttaagaactcaaacacgttcttcatgttcttcgtgactcaaggagccaagaatcgcaacgaaggtcagaataagatcttcttcatctagaaatcacacattacatatcctaagactgccgtgcagatcaaaatactaaaaggattataatctaacgtgggaatcaagaatattcaaagcaaagaaagcttcatgaaatcatggcaacattgaataaatcaagtaaatagtgagaatagaaagcttacccactataagaaattcttgactaagaaaatgggaagcttagattgtcaaaacaacacaaaaatctcgggagatggagtaatatgggtttgacctctagagagaaggagaagcttcttcaaaagttactttctagtgagagtgaaaagtgaaaagtgaagaggagtttccctctaagaggctt

SEQ ID NO: 306884 - DNA, 992 bp, Cannabis indica
taattaataatctttaatttttttgacaaaattaatgatatctaattaaataaagtagaataaaatttaattattgatctcttagaataaaaaaaataaaaataaaaaagagaaaaagtagaataaaaaaacttagaaaataaaaaaattaaggacagaataaatagaaatatttgaaacacactatcatgtcaatatatagatagataaatatttaaccataattttttaaaaaataaataaatcttttaaaattatatatatgaactatattttaataaacaataaaattaagaatataattatttagatagttcaggaaaaataattaagtaaatattaaaaataaaaattaaatgatgtaacgttgttaattttaactggaaactttaacagaaaaacaatataagaaaaaattattttttccctccaaaatacatatttttctgtatcaataaaatattatatttctaatcgggcattaatatttcacatgaaagctcacactttgtacctaacactccaatgaattatatattgtagtcaaaaataaattaaaaaatgttttactttacttatgatataatgtatggaacccctttttaagtcctattctctaatctccacttaattttgtgataatgattttgtgtttttgtcttctttgcatagcaccatgccattcaactcacgtgtaaaccctattttgttgggtaagcctacaacttgttaatgaagagaaccacacaatgatattataaaattatatgtctgtttcaaaaaaataaataaattaaattatatgtcgtgcaatagttgatacatattttattataagtaattatacacaaatttgatatatgtatacatttctaacaaatataattcatcttaaataaatcattcaaaatgattgtttgaaatttattttttaccacaggtatttttcaaatttatgtgtagttactcttttatctatatatatatatata

SEQ ID NO: 306885 - DNA, 977 bp, Cannabis indica
tattttattttatttcttttttattccaccaaactaaatgggatgaattctcatttttgtggtcttagttttcccacaatagtcatatttatgttgatgcttttcttttctatatgtattttgagtagagtattggtttgttgtcatagtcactatattcctcatgataggaatataaaagtggtctatttattagaattagcacgttcttctttaaattttatggattccctttacatggagtggatcaagatttgtcctttgcttattttgtgttatatttctttacctcttttgaaaaagttttggttaaatagtatttttaatacaaaatgatgtatgtttggtaaattttcttgttcttatttgtaccttgctagtatgtttggtacatttatgatcatgatattataaattgatattttactcgtttgtatagagactgtattttaaaaaatcaaaacttgtatattttatattcaatatacaatatattgtggaacaaaatgcatttcgtaaaataagagtaaaaagttacatttaaaaaaaataccatcttttgagcatatatatatatatatattaaagaataatattgtatacctatatacaaattaaattattctacaaacattataattaattttaactacacaattcacaattatttgattcacttttaaataaaaaaatagtgactaaatataatgtatacgaatttcatatgtatctagctagctagtataattatcccttaaaacaagaagttaatttgtaattaaatattgaaatatatatatttgtaattagaaaatagaggcttaatttcacaaatgcacaaaaacaacaaaaaaaaaaacaacaaaaatacgggttcacggaattttaaacatttttacgattttttttttattttatttacataaaatacggtctttttatattgaaattttgttcatttgttgttaattttttgt

SEQ ID NO: 306886 - DNA, 1730 bp, Cannabis indica
aaagaacataaaaatacaaaatagcatatattctcacataatagaaggaaaagaactaaatacaagtaaaatacacacacaaattaagctaaaaaaacataacaaataactctttattcaagagttatcaataatcttcatttactcacactcactgctgcttagccttagctttccccatacctacacatacaaacaataactgtgagtcgacagactcagtaaaaaaagcataatcataatcataaatataactcggattataattaggcgtccatacacccaaccataaccctatccccgcatcctacgcggtactgagtctagaacgttcgtatgacagtactactgaccataatatcagcctatactcggtactctagtcgtactgatgtaatagcaccaattagtacttgagccaaacatacatttactggtatctaatacaactatacgtatattgataccctatcaatgtaatctactaggctttataaacatgcacgttaaacatgtaatcacatatgcatatcattataataatcttacctcatttctaaatttaggtgtgctagtcaactagagtggaacagctgctcaacgatttataggcccttaagtcacaatattcataaaactggtgagtgacacgctaaataacttttcggggacttaaaatcaaaaccaaaagtttctctatcgatggataacatggcaataccctaaatatcatgaaaatgggaaaatctaaggtgccttaaaatgccccaatcagtagaccgattcccaactagaaaactggttctatgggggtctgctagggaaggaactagaattctagttcctataggtccatactaaaccagtcgacgggttcagtgcaggttccccaaaaaactttctaaacaaatcaaatcaaccccaaatgaagccaaatcttccaaaccacctatttaaaccacaacaagtattactcaagcaataaaacctaataacacccactgaaatacaaatcaccattgaagagcaaagtttgagctctaaaaatcaaaccttgttcaaacacaacaccaagtatcaattgtaacttaaatcagctcaataaacctcaatttaacttcagaatacacaaataattccaaacaatacctacaacaaccttaaactcaatttcatgcacaaaacccaactccaaacatgaaaattaaaggagaagagaataaagaggcttaccttgagttgaatccctaaagttccaagtaaatttctacttaaactctcaacaatctgagctgaaacccctacttgctactggtcttcctaagggatcaagagagagagtgttttggagagagaaagtttatttctaactttaattatgtaaaatgataaatcttacgttttatctaatactaaacctaataaatcagattattatctaatactaatcttctaagtcactaaaagataaagaacaattcaaggcaaaagaccaaattaccttgcctaagccaaaaagcatccttgccacctaagggtatttttgtcaaatctaatacctcgaatattcctacattcctaatatctatttaaatttccccgctgttactaaaatactaaaccataaaaaaaatgtgactctatcggccaaacgcgcgcttcattgttaccaggcataaaatatgaaaaacatgaaatttcatatataacataaataacacacctagaat

SEQ ID NO: 306887 - DNA, 3829 bp, Cannabis indica
ttacagatatattttggtgataaaagcttcagatgcaagtggtgaagcttatgtttctgcattcaatgatgaagcagaaagaatcatcggctgttcagcagacgagcttaatacactgaaacaagaggtatttcgtgttctgaaaatttctacttagtttataagccttaatatgaaaaaatgagctgatttaatattttaatcttaccattttaggtgggagaggacaacatgtttgaacaaaaattaaaacaagctacctgggttcctcatcttttccgggtcagtgtttctcaaaacgagtacaacaatgagaagaggcaaaggttaacagtcagggccatagctccagttgattatgctgctgaatcaaaatttttgttagaggagatatcaaagatgagagcttgatgataatgttaatttggttatctaatgaagacaccggtctttaggctttagcttatatactttccccgtaagattatggctccattttgcacatttaggggaagtctattttatcataggattttgttgtgtacctttgcacagtttctgtctaatattcagatcaaaacaaatggttagcgggtttggattctagttatgtaaaaattaattgattttcttatattatctatctttggtaaagatattgcacatgaaatgataattttgtttcccctgagagaataaaggtagtaaagagataataatttctatgcgacaaatctaatgatgtacaaatcacttcaagatattacataacatatccgtatttgggaagatattaaaaatagctaacgcaattccgaactataaactatcctctcttggagataattatttacttatttttattcaatcacaatattaattttttttataagaacttgtgcttcattagttttgtggtgagtacaaagccaacaacttacatggaaggtagatgactattctaagctaattcattatctagttctaaacctagcttagcaactttgtgagccaactcatttgactccctaccaacatgactaatagttaagttaggattgaacgataacaagttcttaacacaaattaatatatcatcaagtggactactattccagctacaagatttaagtttatccacaatagttttacaatcttttttaataacatctatgggaagaagatgaacatttgagcccatggcataaagaattgcctttgcttcagccactgtaggaggaacacttccaacaaagggtcttgagaatcctactttaacctggttcaactcatccaaaacaatcctaatgctatgtttcctgctttggagatcaattgctgcatcagtaaaaacttgaaaaattatccttagaagagcatgttaagggcctggtatgcacaggagtagaaacacttgactgtttgttatgttgttgtgcatccaaatacttgaagaaaaagctaacacaccagtcaaaaacctcatcagcaagcatgtcactatgtctataaaaaaatattgtttctctgattccatatagcccaaaaaaagcagtataaaatacaaacataatcattgtcaagaacatctgtaatactcattaaaaacatattaatatcaaggtgtttataattatagtagtaagtcacaaaccttgaagatttccaagctttcctcgatctagagcattccaacaaagcatgctgaatagtttcagggcaaagcttgtaaaggggacaaatgggagagtcaataacatgtttctgaaaaagggaagaggcaacaagaatatcatttgatacaactctccagacaaagtgttttatttttgggggaacttaagaattccaaatcttactccaaaatattttagaatcattaaaagatgaagaagaggggatatcttatttagagagagccaaatgataggaagacttaacactaaaaagactagaactctccctagacgaaataagatcatcttttccatggtgtccagtaacaggtacctcaaggatatcattaacaagagcatcatcaaaatgtctcttaagtttaggcagatcccaagatccagaatcatctatgaaataagaaagcatacatgaatcaggagaaccattatccttatacagcagaaatttattattaggtatccaataatcctcaaaagtcctaatctattccccatccccattcttccaaatgataccagaagccatcagatctcttccccaaagaatacttctccaagagtaggaagggttatgatcaagagtagcctcaaaaatagaggaattgggaaagtagctagctttaagaaccagaccgagcaaagagttagggttttagcaagcatggcttggtaaattgaattaaagaaagaaaaccaagttctcccaaaaatttggactgacaaaaaaatttctaagatttccaacaaatttttatagaatccctagaagaaccccaccagaatctggccatcgcagcctcaattcctctgcacagcttgacagacaacctaaaacaagccatcacatatgcaggtatagcttgtatgacagccttgagaagaatcttcttaccagccttggaaaatcacttagcagaccacttcgtgagaatagagagaactttatctttaagaaaagaaaatgagtgatatttagatctagaaagacattgaggaaacctaagtatttactaatgaaagttctgtcttcaagcatgtacttggttattatactttctttctttctaataaacagaatatctgctttttgatccaactatgacgacaacctttagtaattttattaataaatatgtttgatcacctttgctttgtagaggtcctcatcatacatggtgtgttattacttattaataacaaatggcatgtcttttttcttatggcgattttgtctcatttaggtttttatggttaagatcataggacagttaaagttgatctcgattttagtaataactggtgtcaagcgttttatgttgcatttggaaaattatggtgtaattgaaagtaattacacaatttgatagtttatttgactatgtaagagaaatttgtagccaaacctctttaagtttcaattaaatttcaatgttaaatgccaactaagatgccaagtgggattgctattgtgtacatttattttttaattgcttccttataagttattttagaatacaatttaattattattatttttttttttgagtgtaacagtttaattatttttatttattgaataacaaaataatttttagtaaaccataaaatgtggttggtatatttaattttttagtaaagtttctttttatttttttatttttaatgtaactcatagatactatttggtttacaagttattttatgaactattaaaattattatataaaataagattatttagaatatatattgtaaaatttaatggtagataagaaaatactttttaataacttataaggtttttttttctttgaaaagtaaacctataaagttgattgatatattaaattttgtttaagttcaaaaattaattacttgctttactaaatataaaagaaattaaaatgttacttttacttcttgtctttcttttgtgatggctaaaaacatatgcttctcacatattaacttagtcacttcaaagtgtagatcataattgtacaactcttgataccaaataattactaattaagccaaaaatatttcttaaaaggttaaaaaataaatataaaatataggtagaaaaagggaaaaagaggaagatatctcatgcgtggacttttttttttttt

SEQ ID NO: 306888 - DNA, 2879 bp, Cannabis indica
gggaaaagatgaaatatgctttgcctggtaatgataatggaagcagggttattatcacaacacgcaatgaagtagtagtcccatgtgattttgtccaaaagttggaaacttggtctcatgatatggcttatgagttgtttctaaaagacactttgtcctgtagaggtggagaaattatctcataagattaaaaaatgtcaaggcttgccacttgcaataagggctattgctggtttattatcaagaaaaaatgtccaatttgagtggcaaaaagttcttgataatatcgattttgaattcaaaacaaatcctcaactcacaagaatttttgaaattctttcccttagttatcatgatttgccttaccaccttaaaccttgcttattgtattttggtatttttcccgaagattatttgattgagaaagaaagactatgtggattatggatttatgagggttttgttcaagcaagagaaggcaaaacagttgaggaagaagctgaaggatacttgaatgagcttgttgaaagaaatttagtttcgcttgagtttttatatggaacagtgaaaggttgcaaggtgcatgatttgatgcatgagttcatcatatcaaaggtcaatgatttatgcttttgtcaaattctgagccaaaaaacttcagaatttgatgaaaacaaacatcgtcgcttgtcaatccttggaaccataccaacatctataactagaaaaatccaacattacacaactattcgctcgattttacttttaaacgtcaatgagattgagtgtattgacaagtcctttatggttgccttgtttcaaaatttaaagctattgaaagttttggactttgaaaatgcacctctagattatcttccaaaagaagtggggaatttgtttcaattgaggtatttgaatttgaaagatacaaatatcaaagctcttcctgagtctatatgtaaccttcatgatctacaatatttgagtcttgagaatactcaagtggataagcttccaaaatccattggcaagcttcataatctacgtgttttgaatattttgcaagcttttgtacgggagcttccaaaggagattaataagctttccaatctccaacaaatttttgcttcatgtaaagaggattctctagccaatttgtctgcggtaaagatacaagaaggatttagttttttaaagaatttagaaattcttttgcatgtggaagtgtatcaagatgtggttggtttcacaaatgagttgaagaatttgagcaatttgaagatgttgggtgtttcaaatttgactaaagaaacttccaaagctatatgtgatgtctctaagaggttgaatcatctccacactttgcttctgagtgttggtgatgttgatgagattctagatttggaaccgatttcatcatctcctcctccattgttgcatacactttacttgtcaggtcgattaaacaagttccctcactggttattagatattaataatttggtggtgttgattctacgccattcaaaattgacagagaatccactgaaatatctaaaggacttgcccaatctgacatgccttcttttgatggacaactcatatgaaggagtgcaactacactttgaggaaggcagttttccaaaactcaacgagattcgcttaaaatatttgcctgagttgaagtctatgaagatagataaaggggcgttgccactccttaaagtgttgatcatcgaatcatgtccacttattgaggaggttccttctggcattcagtatctaacaaagttgaagaaatttggtatttggaacatgcccaagaattttgtggatcgagtgcagtcgaatgagggccccgactattccaaaattcaacatttaccaatagtggacattatgtaaattcaactataacaaaacagatcacagatttgaggtctttccgttttcttctttgtattgttctttgaaattttgttcttgttttattgtaggtgtatcttctcttatgataattcttgattctaattagatacaaccatttatatattgatcaagaacaatgctaacagttttatttgcaactcaaattgattcaaaaaccagagaacaacaatgtataaaccagcaacaataaaccagaaatgaacaattgtagacaagaatgtaggaagaaaaaatcaaacacaaccagaattacgaggtccgaacaagtgatgatgaatcacttgcctactcctcggccagaacagccctaaaggcttgaatctttattgaactagaagagagaattacaaagttgatattcaatgtgttcttgacacaatcactcaagaagcatagcttcaattacaaaacaactctactcacaaactctctttccttttgcacatgaactagctctcagggactactaaaaacttcccaagattgctcatgtaatgctgcagcagttggctatttatagccttgatattttgaacccgatcctaactgtcataactgacagttaggtaaaaccgtcggaggttagatggatttagccaataatgtctatttcctctattagtgaccaatcacaacaatatatatatgtatatatatatttctatataatattaccttattattctttgttagctgatgctagtttttctttttttaattaaatgtagtcgccagacactttttactctagggatgaaaaataagcatatatgcatcgatcactaattaaattggagcagtttaaaaaatgttggattttcttaaaatgaaataaatggaattataatataaacagggtaggatacttggttagctagctgatggcctaggctcatggcatataactaaatgtaaattagagtaaatct

SEQ ID NO: 306889 - DNA, 3646 bp, Cannabis indica
gggggcttgcatgtgagttgtgtgtgttaagtgcaagtgtgtgcaagtggggtgctcgcatgcaagaccatggggcgctcacatgagaaccatgtgtgtgtgttgtgtttcgtgtgtgtgttgtacatttgcgggctcgcatgtgagctcgggtgggggcctctcatgcgagtcgttatgtgtgtttgttttgggggttgtaagtgtaaggtgagaggtgaatgcatattgacgagaattaaattagaggaggaatcaaaagacaaggcatgtaagggaaaagcatacaaccacgcctcttgaagactccaaaagttaaaaggtacgagtagtggtgacaatggacctgtgaagtccaaggacccgaccaagggtatgctgcaaccaccctcatgaaacctataaccggggaccacatgcctgttactagggatcacctgcatgcaattggggaccaccctcctataacccgtaaccggtgctcacatgcctgtaattatggatcacctgcctccaaccaaggatcaccctcctgcaacctgtaactagggaccacatgcctataatcaaggatcacatgcctgtaattggggatcacctgcctgcaaccagggaacaccttcttgtaacctgtaactagggaccacaatgcttgtaactaggcatcagatgcctacaatcggagactatcctcttgcaaccgagtaaccacttgacaccagacaagggtacgaggtgcaaggccacctcttgtacctatggcatgcaccgtaaaagtgacattttgtccccttgggaccattttgtacctcaagccattagagcctatacatacccctttctcagatgttagaggggattgggaaatcatacttttaaaacagtatcaaaagcaatagaaatttctccatttcaaaagagcaatttgagtttatatttcatctttctcttcatttcatttcaaaacttgaagcataagtttgttttttggacagaagtttgttgacgagttctcactattaatagtttggcgccatctatgggaatgaaaagctaaagccaagtcgtttctttacacataatagatacaaaattcctagacgctctcgccaccttaacgacgtggagatttgcctggaagataacatgttggttacttcagggcaatacctccctcacccgtcatcagagtagaaggtgctaatggtcacaaccctcaagtaagaggagaaaatgagaacgttgttcagctacaataggaggagagggcgcgagcaggtcagaatctcaagcaaagcaaggagaatatcaccgtgtaaagcccctagtggacgagcagcgtaatagagttaccacctctatcacaaccgaaggtaaaggcatgaaacaaaggaaggaggtcccattatcaccaaggcaccctttaccaccaacactacgagatcctggtaccttacaataatgctcaagaaaggagaagtgagctaaatctatgagcccaaaatcctgaactcacaactatgaagaaaaaataaatgatctttgctggaagaaccaaaggctagaaactatagtggtaggcatgcaaaaagtactaagcatcattcttgaaggcaaaactcaaactttgaactttttgtacaaagtttgccaacaagagtgtgggatcttaatcgcacacggtgatagggagaactcgatgtcatcaacagatgacaccccaaaggatgcgagcgaaatgggcctattacataatgagaacccaagaggttgctcagagtaacatgaatgtacctgctggggtaagaccataatgggagaaacatcatgtagtcttatgaaggaattttggccaaagaatctcgtgctaggggataccgtgcttgcacctcttgttcaagagcaaagcaagtacaaggcgtcacacctcaatcatgatggagagtcacacaatgatgggatgagtggagtactacttgtaggctccatgtgaactgtagggaaaacccaagttctattctccaactctcgagcaaggatgaaaaagggaatgaaagtgctaaaagtaaagatgcaagatctacatcaaaggatgcctacaacatcaaaagggagatttagaggatgatgaattcacgaggaagcccctttctcaaggaaaattcaaatggaaacacttccacccaattttaaggagtctcgcatgacgccatatgatggtacaactaatcgaaagtaccatttatgagctattaatgagctaatgaagatggaaaaggtgtcatgaaaggcaaggtgtcaatgctttgtgattacacttaaaggggtagcatataaatggttcaagaggcttggaccaagagcaattacatcttgaaaacaacattttgaggaattccttcaacatcatcaagctgcttaaggagtatcaccaatgtaaggaaaggggagaaaggaggcttaaggaggtatatccagcactttaatgttgaagtctccaaggtaggaagaatgaccaacaataacataagttttccatagatgatggaatacgccctgggagtaaactatggagtaatatgttgaaaaagcaattcgatggcattgaagacttctataagaaagcagaaaaatacatctgtgtcgatgaaggaaatggagtcttggagacgaacacaagcaagggtactttcaaaatctcgccagacccctacagggtctattagatagaagccccaatgcccgtaagatgatacatccaagttaagtctcctctatacaacccaaaaaattaaatgtccaagatattcctctaattaaagtcctactatacgagaaaaagctcttggcgataactagtttgcttttagtgtgttgtaataaattaaagaaggcattcatgtgggcctccaattcaaactgaatgatgctacacacttgggggccacacataaaaaaaagagagagagggaaattttttgaattgacaaggattagctacccttagtcgacaagagaaatgcacctacctctccccacaacagttgctgaatgagagggacacctcttaagagtaagcatatgattgtaagttaagaaggaagcatagtcaagtacaataagctcccttccatctgagtaaaaggatgaagaaataaggaagaggatcagactgctcaaggagccatactccctcaaaataaaatcctacttatcacaatggggaaagttaattggccacagagtaacactcaaagtcactaagccaatgttagtaaaaaatctcactcagccccaagagtcactcaaagtaacttgacctcgtagtgactagagtcactcaacccaagagcgactcagagtcacttgacctcacagtgaccacagtcactcggccccaagagcgactaaaagtcactcagcctcacagtgactattgtcactcgaccccaagagtgactcaaagtcactcgacctcgcagtgaccaaagccacacgaccaaagagtaaaaaaatttcactcaacctcatgataaccaagatcatttgactgaatgatgacttaggtcacttggctaataataagagaaaagataaaaaaggggttagacgaagttcatatttcacaaaacatcgttttaattca

SEQ ID NO: 306890 - DNA, 1233 bp, Cannabis indica
acataaacaatcactgaaatagtaaaaattgaaatgaaattaaagcaaaaagtctttaaaatctaataatctcaatagttgagggaaattttcaacatccaaaaaagtttaaggagtatgacttagtacatgttaaaatctaagaggtaaaatttctaattaagcttttcaatattttcggtgctctacctattttgtaataattattatagtagtataccaacttattttgaagcactcttagtaattttgtaattaatttcctccttaatttttttaagatatcataaatgtttttgtactaattaattttctctttattttttaaggatgctcgtaggatataatatgtaaatgattttagaataatgaatatagtgctgaactaacttgttgtttatatcccaatattattaataatattagtgatatataattattatattatatcgtaaaatataatatatattaaacaattatttacgttgttgtcgattaggtagccgcgggattgtttgacaaaattatcgaagaaaaagtgaacacaaaaagcccaatcttcttcttctttttttttttttttttaacttaattatttatataattaattttattgttattaaaaccaaaactaattaataaattactatctcaggaaaacgtgtgacccacacgctttcttaaattaattatagatttttctatatattcaacctaatcttcttattatctacttacatatttaataacactcgtaggattatgaaaataattagaattttttagctttgagttgattttttgagataatttattatgttgccaacctataggatatcaagaattcggtctcgaatcgaactcgaatcagatccaagatttgaactcgaactaagactcgggacccgaacttgaatcgagacttgagacccgaacctgacttgtagtcggtgtttgggtcgagcttattgaaaatatattataatcttgtacaaaagtgaatacgaaacatagtattgtattaaataatactatacaatacaatataatacaattcaacataatacaatacggcgtgccaaacaagcttaagaacatctatttaactaaaggtaagctgtaaaaaattgtatagtgatcaccttaaacattcaaattaacattaattctaaaattatatttaggcagagtctcaaattttcacattaattatagtactatttataatatatc

SEQ ID NO: 306891 - DNA, 1802 bp, Cannabis indica
ttatagctaatatacatctaatatctaacacaaaatatattttatgtatgaaagttgtctcaaatttagaacttctcttaagatatggattgagttaatatagactttgagtatgtccaacctatggccaactcataactatatgacctattatttttcagcctaatgagccatgacctactcttatcataaccttttactacaaaaaataggttgggttggcgaggttgaatatcactataacaaattgctacctttagtgacaactatttagtcataacataattttttgtaattaaataagacatttagttacaacaaaatgttccttgtaactaacacatagtatttagttacaagttgtccctaatttagttttaatcacaataaatattgtaattaaaacataattataacagcaaattatattttttgtgactaatacttttagccaccgactttttagtcacaataacacaataataatttataattagccacaatttttttatatttagtaacaaattttattgtcactaaaagtaagattttttgtagtgtggcttggctcatattttgtgcacccgtacaaaaagcctcacttctaaccctccaaatgtggtagatggtgattatgaaggtggaagatgtgccttctaaaacaactccatttacttctcaaaatccattttagtaaacctgggatagtggcatgctaggtttgtataccaaacatattttcaaccttaaccagacaacttttactaaaagtacaaaggaaaaagagacgagataataagattcatcatgatctcaaaccacaaatcaaataagtagactcatagtagataccaaattgagcaagtctgtctctagtttggagttagtctctccaacaatgctagccaaaatatgaatgtgttttggaactgtaagtctatttcaaacaataacatcccaatattgatagaatgagaaggagttaccttatcacaaatatgacttatattgaacttcaacaacatatgcaagtgaccacataagaataagaactctcgagttgatctttaactaccacaatctcccactagtaccaactattatcaattggggctgaataatccaaccaatgtgtagatttaatgtacatagcatgaactatcatttggtttacaagttatcgtatttatgagccacaactcaaatatatttccaatggttgcagtattccaattttctttatccctcaagcccaacccaccatatttttttacttgcaaacatctttccaagtaatgtgtcttgggagcttgatagtaaaggactcttccattagaaagctcgacagatcttgttgattttcctataatgttcttggggaggatcatgatttgtgtccataaaaagaataaatagataacaagatagagtatataaaaactctacctgcaaattacagattcctagtactgaaactcctacaagatgcaacataccacttttcaactagacaaccacaatcattcctttagagcaaattggaataccaagacaacagaaaggcaaaggacaaagcccaaaagatcaagaaatatttgcacctcctcatcattcatgttacaggctacaacatgataacaagtttatttatcctcattagcaactaaacatgtatccgaaaacacattgaaaattttaatataaattgattttaaattgtaaaaaagaagtaaaatttatagaaaatacataaaaataaggggcttttttatttttacatttctaaacagtttttttttttt

SEQ ID NO: 306892 - DNA, 1177 bp, Cannabis indica
taataaataaaaaatggcatataataactcacatgtataaaattatatatttatttatatataaatattagagtgattgcttaatgctacgtattatgatcattatgtatatattaattctttttttcttcctacgtgattggcacttttcaagtgatccaccaatatattcaaaattgaaatttttaggttgctcaacagaattataagcttgatcctcaaataaggtcagtgttacgttcatccaagtagtctactggggaaaacatattaattatattaaaccgatgggtctcctaactaactttaattttattttatttgaagaaataataaagtgattgcatacaaagtatatgctttttttcatccactctccaaaagattttaattcacaaattaataattgaataaaaaaatctaaagtgtactgcagtcagtcttatcaatagtatcaaatattaaaccaaccatcttgactgatttttcagttttcttactcatcaaaacatacacttttataaaattgaaaaactaataataaagaaaaagaaaaaatgaaagacgcattaattaacgttgtggatgacaatgtcgctcaaaatattcttacaccccttttgatctgttccgatcccatcaatttagtatgtgcttccttcaaaatattctcaagcaaattaagcatcaatcgtacttggtttttaatgttaattctatcaaaagtgactatgtataaattgaaagaagtaaaatagataaataccatcaaatgttgagtatataatgtagaccgttagattggtgtggtcctaaataatgacttttaattttaagtacatttggaatcccatggtggtggacctcacaatttggttcggctcaagcttttttttttctggtcctgttctggacagtcaacatctattactattttgtattatttattttcttttaagaagaactctcttttaattaacgtggtttttgataacactttttgaatcagttttctgtttttataagtagaaaagtgaattttatttttcaaaaacatgttatataaaactgtttttacttttctattttataattaaaaatcaaaatttaaaaaaaaaaaaatacactttcaaaattttcttaaacaattttttttcttaatcaatcttttagatta

SEQ ID NO: 306893 - DNA, 2288 bp, Cannabis indica
gagagttcaaactttaattgaggagcaacgccctgagacatcagagcacagggattaaagtgagtttaaaaaatgaagtacacattttctttatgacaaaatttgtttgcattctctcgtttcagtctactttcatgagcccctttatcatagtttaaaagcactacaacaaacatcatcaaatgtggcttaaaaaaaatcagtattacataggaattcatgaaattagtgacatttgttagatccctaaaagtcttaatgacataattatctgaaatgtcactatatattatcttttaatgtatgatttatagtgacattttaaaaacgtgagtatggcttattactaatttaatatggtttggtattaacatttgattttaatatttgtatccaaccaaatgataatagttactattataataagtaatagtttttattatttaaatatgaattttatttttgtaaaggataaatatatataacaatactttatatcccattctaaagtaaaccatctgtactttatactaatgaactgtttgatacaatataggagtacagtaaaattatttgatacaataattgaccaaaatttgaatgggtatatatttatttgtcttcattacagtttcatctttcgttgattccactattcctccacttcttcatagtggagtgaagaatattcttgtatgtatagattatagtgtatgaaatgagtagatatgtatacacgtattctatgaaaggaaaaaaagaagtttgatggtggaattgtacatgaaaaatttaagtcattgatgaacttggagaagatataaggaagttaatgaaaaggagataaagaaaacgttttcaaaatttaaattgagaaatcacaactatttgttttccttcttaaatttcaggtagctagtctaaatctttttgaaaatttaaactcatgatttaaatgttgaacttgacttattacataattgtttattattaaaaataattaaaataaacgatggtgtcgtggcattatatctattccacagtgacattttttgttttattactgatatttgtttgtgtactctaagcaggatgtagaagataagatataatatccattcaagactacaatttcatcctagattttgtttttgttcttggcttgtcatttatttttcatgtattttattactaccaataaaatattttcatataaatgtaaatttcgtaatgtagccatggtgttcttcttaaaaaaaatggtagtattgtgaatccaaacgctactcactcatagtcatatatgatggtgttctatgataaactttatgaaatgggattatattttttgaatttaaaaaggggtttggttgaattgaacctgtggaaaacttgcctcgttaagatcgaatacgtaatccatagaaggagataaactagtggcacgcaatggaaacccaatattgagatttgagagtacactgctaaaagtgggtcctcctctgtagtttctttttggctcaaactaatatataacttatgaaattaaaagtggtcctatatatatatatttatagctataaaacctcagttttaaggagtttgaaacattctataacgatgatgatgatgatgatgaattgatttctatccactcatgtaccattctaacaaatctttcaagactttttttagagtcattggtaataacgaagtcgaatactttttgtgactttaagaatatgaaatgaaagggacttaattgttctcccactcctagacttgtagtacgtactactcatcaccctcctattcctaattcctaatctcaatataaaataatgattcatatataaattgggttggggattatgtgcttcataaagtacaatttacattatataaatgcaattatatcacatctataagaaaatctcttacatcaatttattttatatataaaaattagttacatctaaaagctttgcacgtgtatataactagtaccctctcgggtcattggtagaggatataataaattcgtttttcagttttttaaggagtgttccttatttatgtttgttggtcaaccactaggcatgctcttaatttggatagatgagaatatctcaaaaattgatctttagtttttcaagattgtatgtcattttgattattatgaatgaagctttcattgtttcaaaagaaaattgtcccataaaaaatcatttaatggtggatgtttattttggttgggcagggcagtaaaggatgtctaattggatata

SEQ ID NO: 306894 - DNA, 2138 bp, Cannabis indica
aaattaaaattaaaaattaaaatgatctggactaatcacgtagtgacacgtggacactaacctgacacataacggagaggtacctacggaagtttcagagtagtgacggaaggtatttttactgcccaaaataggacttaagtatttatctgctaatcgacataaaacttaagtatttatgccgcaaattactcttatagttaataatttttattgtatttggatattgaagttgaagtttaaaatctatactatattattactttattttattattattttattcatttattttatgtttactcaattatatttatcttatattaaagttattgaaattaatttaaactattgtattttttagcttgaaatatgaataatatatatatatttttttaaaatctaattatttgaatagtagaaactaacaattataattataaaaaaaatgaagaacggtttgggcaggttaacccgaccaaaccgacgaaatcattggacaggttgagctttttctaatttttaattgagcgggttataatgaaatatttgcaacccgatatctattttgggttagtaaaaatatgctataacccgactaaaccgaccgacgtacaccccttgttaccattcctagatactttgagccatatcctaccatggctagcatgaagcaaacatgtcgtagggcacctcttaaggaccctcatattactgagttgatgacgagaggatgggtccgacatgttgaggaggctgaacaacctcaagttgcacaacttgaggttgaccaggctgaggagcctttggctgggcaacctatggctggccagggtgagtaacccttggctagtcaggatagtgagtctgaggctgagcaggctaaatctgttgttgggcaaagtactacttggaggcagtataagacctgtacggtgatccaaggcaatccactgggtacttatgatgaggctgggcgacctttaaatgttaggggtcaactgtcagaggttggggttgaccatgttgaggaagaggctctcgagccatgggtccttgagtatggagatcaacagcgctagatatctcctccatcttccctgtcggctcataagctcaaggagatcaaagaatgagggctcgttggaagaattcgatgtgatagacccactagggttcaattggtgcatcgtctgccaaccatctagaaggcatggtctggtcctcatgttgagcaaggggtgctcttgccattgcatccctatctcagggacatagccaacttctttaggctgtgtctgactcaaagaagaatgcaagaaagaagatgaggatctagatcccagagtccaagacgagaataaccagcttaaacctattgaagaattagaagaggttattatagttccaaatagtcccacatgtgtgtacattgggaagaattcggatgaaaaactaaaatagcagttaattgattttttgaaggcgaactaggaccaatttgcctggagccattcagacatgatagggatagatcctaatataatttgccatcatttaaacattgaccccaactacccagcaaaaagacataaaacgacgacccttagacttcgagagacaagggacacttaaagaagaggtcaataaattattgaccaatgactttatacgcaagaccttttatcactcgtggatgtcaaacccagttcttgtaccaaaaccaaataacacttggaggacttgtattgactttttagacttgaataaggcatgtcctaacgaactgttttccactacctaggattgaccagttaatagatgcaacaacacgacacgagctgatgacttttttggatgcatattctagatataacccgattaaaatgcatatcctgatcaagaatatgcaagttttgtaacaaatatgagactttattgctacaaagtcatgccatttggtttaaacatattggagcaacatatcaacgactagtgaatggaatgttcaagaacaaaattggatgaattatggaagtctatgtcaatgatatgctggtgaagtcggtggaataaagatcacacaaaggatctcgtggaatgctttgatatacttaaaaagtataatatgaagctta

SEQ ID NO: 306895 - DNA, 888 bp, Cannabis indica
accctgtgcaaaaattgggataacaattttaattaattatgggggctttgattttgttttattttttaggttttcaattaattaagggttttattaatgagggttttggagttttagttttcacgtggcaccaaatagctggtatggattgtgatttggcttgccacataggacggtttggggtcaaacgagagtagggtgacgaaatagtgtcgagcaaaataaaacaggagtagagggagtgtaactagatgtgtagtttgagtagtttagccaccaatatcccgaaacaatttacatgtctcaacctgaaggattcaaggtggaatccaagaaaggagagctagttttccttttgaaaaaaatccctacatggacttaagtagtacaccaggtcaaatataacacttgcctatactttacagaattggacaaggaaagttcaattttcttactcatacatgtagttgacatgctaacaatgggcaaggacatgagccagatcactaaattaaagaatattctcaaggaacagtttaaaatgaaagatatgggagctgttagaaaaatcatgggcattgtcatcattaaaaatagaaaggaaaggaatttgatggtgtcacaaagcatctatgttgaaaagatcttacagaaattcaacatgacaaattcaaaggatgtaaatgtgcctctaacaagccatttcattctcactacagatcaatcaccaaaagtgatcaagagaagaaagacatggaagacataccctatgcagaagctattggaagtgttatgtacaccatgattaccacaaggcctgacattgcctatgttgttagtctactcaacaggtttatgttgggttttatgccctaaataaaactcttt

SEQ ID NO: 306896 - DNA, 713 bp, Cannabis indica
caatttgaggtctgtctctttgctaccgcactcacaagaacttgataaaccaagataatattgacatccacaatctggaactcctgcattgctttcataccattaagcatagcctggatcttacttgcaagagagtctcccacctcaatcttcattgcatagattgtaatgagttgatcttgatcatccttgaggcctctccaccgattgatgagattcgatggaaggatccctcacaaaaaatctccaatgaccctgaaaatcttgggctataatattaaacatagactctacaagaaaaactttctgctagtggacacatttcgatactgccacaccctataattaaaacatggaacgaaaaacagaattcttgtatatgctccatatcagtgtttatctcaaaaaaaaggaggttggcatatccaaatgactaaatgccttccaaaagacaggttgaaattttccaaacgaataccacatttagacatgaaccaaattatttttgtcatctggcaaatagatggggaatgaagtgaccatctacctggttgcataacatacacggaccaagcacactattaaagatatcaagaagtcttctccaggctgaagggaatcgagataaagcttcacaaaataattttaatcgatcatgaagcttcgatctccacaaaaaattacatatcgagatagaacacttttggaatcaa

SEQ ID NO: 306897 - DNA, 1124 bp, Cannabis indica
atttttttttttcaaatggggtatatatataaaatgcaaggcttttaccaacgatgtataacagtcgctaacgaataaccgacagttataaaccatcagctattccttagctgactgagacccaccgacacgtataaacatcaaaacacacacataattgttttaaatagacgggaatactttacgagtgataaaaattgacggtaattctaaactatatatagccatcggttatcaactgatacataatttttttcctgccggtcctccaagaaaactaatttctaaccgatgagaatttcttattttgtagtagtggtagtgtacaactcgttaataataccccttaaaatataaattttacagtaatgtggtcctctcatcatatactattttattttattatgaaattagtgacacaataaataatagttgataatttgatacaaattaaatatttttcctgccttttttactttagattagaaaattaaaaaaaaaattattctattatttattgacataaaaataatgaaagatagttaatttgcatctatttatcaattatcattcactattttactcattttacaataaaattgaataaaatgtgatggaaagacaataatactgtaaaacttatatttcgagagttattattaacgagtcatatactatcactactacaaaataggaaattcctgtcaattagaaatttgattttttcaaggacctacgagagaaaaactatgtaactaattaaaactggcggctttagtttagaattgtcgtatgtttttaacactcgcaaattattcccatctgcttaaaatagttacgtgtgtgtgtgttttgttgtttatatgtgtcggtgggtcctattttataacagtcagttattcgttatttttatgttgtgactaaaatatatgtggctaaatgttacacaacctttatatagaatatattttattttttttgagttaacgtcattaaaaagtatcattaaaatgtattgttaactttaacaaaaaaaaaaaaaaaaaaaagttaaaaaaaagtcatctaataattgtttataaattaaaaattgtgttatataggcacattttatatagaataga

SEQ ID NO: 306898 - DNA, 1586 bp, Cannabis indica
agccatgatatcgatgatgattggttactggttaataatatttgtttaattactttgggctagaggccaagtaattaccaagctgctcaaccaacacatctacatcttcctcatcttcttctacactcaaaacattatcatttatattccctgattcttccatgctctcattcaataaatttatccaaaaaccttcatcaattaacagctctttattattatgatcatgatcagcactactgcttattccttgtaactcatcaatctgatcattactagtactatcatcaattaccatgttttgaaaacttataaccccatcatcagcagcagcagtagtactagtagtcatcatgtcaatagcaagctcatcatgatcatcatcacccaactgatcatcctcaacaacttcaaaagactcatcagctgacaacatgatattgttattgatgctataatcttcatcatggcgtggttccattttcacaaaaattccacttttagctatataatcatgatcatcaagctgtacttggtggccttgttccatggcaatatggcgccttcttttagttcgaatcgcctcctcgagcttctttctcttgtccttgtgttgaatcaactgttgtacaaattcaggattcttcattgctttggccaagaaactcaccatttgttgttgtttacgctcagtcctcttcagtctgtcttccattgtttgaagataagtcttagtgttttgttgttgttgtctaagtttgacaagttccaccattaacacctgtttgtcacgctttaatcgatccacttcaccatccaaaccaaatcttccaacttcaacacaaggagggtccaaattagaacaagaagaagaagaagaagctggttgatgtgagtattgatgatgaggtggtggtacttgatgagctcctttccttcttctaatcttctttagaagatgcttttgtcctcttagaaaaccttcatttgcaaactcccatctatctggatcaactttcttaaatccctacacacccacatatatattcatttgatttcattcattgataatatatacattaattcatatcatcatcatatccaatttggcttgtctacatatataaagttaattataatgtttattggaaaaaattatctcaaattaaatgtaaaagtattgagtcatatataaaaacatgagttactccatttattaccaattaattttgagataaccacatgattctcaacatggtattagagccatattcttagtaggctttcgatccacacttatctattgtgataagttgattcatatttctagcaggtttttgaatgattcatgattggtgattcaagatggaaccctttgattctcaacaatgttatatcactaaataaagatttaattaaatgaacttttggattttttttttctttctatcttttcaagaaaattggagtactagagagtaacggccttttaactaaaaattaatcaacaaaagaagcagttaaaaatctcttcatattccattaatatatatacatacatatatatatagtagcccaaagtgggt

SEQ ID NO: 306899 - DNA, 1735 bp, Cannabis indica
aagtttttacactcattaataaccatcccaaataaagcaaccatagataaaggactctgtaaagcttgtattacacataaacagtcagcttccacttaacactgttgaatgaaagcttgatttctttatccaactaagggcttcccgaatgccaatggcttcgacaaagacaggttccacttgggcgtgagctaagatggtacatccttcaatcagcatgtcgttgctttctctaacaaccatacccaaaccatagctccgtctccggtcaaatatagcataaatataatataacatatatattttgatcatttcctttagtatatatattatattattaatctatataatgattaatatatatatatacagttattttacacacacaaaatacacattaaaacttaatgattataacacattattattaattaggagacctagcttgcactgcgaaattgcttctcatcccacagtctttagcaacctgcagcaaattaatatatatatttgtataattattattattcattgtaagcaactcatcaaataattaaattatatataattaatacaatcaaaataattaaatataattacgtactaattaatcattcatcgatcaacgatcatactttttaatattttttaattaatatttaatatgtcatatatattggccaatttttgattatttacatgtgtagtattctgcctatatatcgtcaataattagaccataacatattgtaaaaaattatatgattttgcatagaagtgtagtgtgtttagtgctataaatacaggtttaactttttgacataaaactaattcaaaaggtacaacaaccatagcataccttacaagagcctgctcattagtctcgtggctacaaatttcgtagtggcaagtctccaaattaactctacacattggctttttcaataattcttctccaactttgacaagatcttccaaatttttcgttgtggcaatatctaccgatgatacatcgttctcgagagtatcatcctatcacaaaatatacatatatatttcattatttatatttatatattctcaaataattaatataattaaatatagtatatataacctgaattcgaagatattgatgttctgatttgaaggctttgaaaagcacagagagatgaagatcgaccatatcagaacttgcatgagaaaatacatcaataattggggccgaaccgcctttgtttaaccaacttaccaaaccccatttcgcaacatcttgagcattatatttcttttcaatttttggagatccagttcctaatgaaatcaccaaaaatcgaccgcaatctaatattggatcattattattatctattgttggagacaaagtagctattattttatccttccacacttcaccaattgccaccagagtctataaattaaatcaatacacataatatatgatcagtaccatatttaacatgtgaataatataaatatatacttaagaaaatcagtggaaaaaattgccaataaagttatgtttatctaagttgtcaataaaatatttgtggataaaaatattattagtcatttactagtagtaatgatagatacatcacttctaatttgtatgcttaaattatattactataaaaaatcttacttttaatcacaacaaaatttataattaaaaataaaaaaatcgtgattaattgtaaattattatttttat

SEQ ID NO: 306900 - DNA, 1742 bp, Cannabis indica
actaaactgtcacaaaataatgacacttacataagcagatatcacttactataccatgagttgaggttgtcttcatagtaattgaatatatccagctagtcttcaggacctttaaaactgtaactgctctgataccatgttgtaatactctaacccataggaacgctacgtgtgtgcctttataaattagtttataataataaactaacaatttaaagaaaaattgtgatttaattaaaaatttatttaattaactgaaatatgaaaccaatttttggcactatacagtaattggaatcgaggcaccgcttttaaaaatatttacaaatattttgatcaaaagttacaaccaaatacttatacttttcaaagttgccacaaaccaaaaatctcactactcgacactgctgggtggataagctactgtgtacatttgcttggaaagtcctctaactcatggctgacctagctcaatcctttctttacctgtactacaaagtacccgtgagtcacaaaaatccaacaaaaaaaagtaaaatcatacatagggtacatccaagtacaaatataatcaaacacaatcattaaatcataaccagatactcacatactaaactcacaagcaagacatcacattttctaataaaataatcactattagcaaatatttatcttataaggcaaactaaattgttacttaataaattaaccatttcttacctttgcataatgaggtagtccaatgtcattatcattgtttaatgagacaaccgataagtaagaaacctaccaacagtttcaattagagtagtactcttttttttattattgcctaatctaataatacaaccaaatagagtaataactctcttttatagatggtagttactaaatcacgtattgacatgctatgtggtacaattatatttttcttacctcaaatccaagttcatacttatcgagaaacttgagcggaagacagtcgatgatcttggccctatctcacaacagtggtaatcttgtaaacaatctcaatctagtctattctaggacttaaactcagaaccggaagtttccctatcgataaataacgtgacaataccctaaaaacaataaaaaaaaacaaaaatataggtgctcaaaaataccccaaatggttcaccattttagaaaatggttcattgtttctttgggttttgccttgaaaaaacggtccaccattttaccaaaaatggttaactgtttttccctactgaaatggcaaaacctggtttaacactacaaacctaaccaaaactcctccaaagcctaccaaaattgacagagtactttaaatatcatatctaaacatagtccatagctcaattaacataatatcccatgattacaaaaatcattgttaaagctttaagctttagtttgaagaactcaatcttgaagctttcaccaacagtagccacaaccactaaaatcaaacataaacaatctaaaaatgaacttgaaacagattctaacccaaccctatccatattgaaccaaaatcatacaaactcaacataacactaaaccttctaccaagaattttgaagaaaataaagaggttagggttaccttaatccgtaaccaccaactcctactttgattcctactgattttcttgataaattgctaaagaaaagggtcagaattcaggttgggctgttggtctcttctagggctgaacaaagagagagagagagaga

SEQ ID NO: 306901 - DNA, 2333 bp, Cannabis indica
cttgcgttgaaaataccacaacaataggtccaaatgtattagttgtaaaggtttagtgtactatgtttcaaagttaggaaaatataatttgtgaattttaccttgacagcaagcaatgtaaaaatcgaacacgattttattagcactgggaagattacattggtgtaatacattcttaacaacttttggagatggatgacccaatctaccatgccaaagagaaaatgtgaaaacattagaagtaggataagctacatttgaagacaaatatactattattaatagtaaatgcaaatgggagagaagtgtcttttgaatggcaaggagacacataattagagttgaaggcatacatgccattcttaagtttgccttccatcagaacttggtgagagacctgatccttcacaagacaaaaatctagatgaaactcaaaggaaacatgattatcttttgcgaattgagatagactgaggagatttcgagtgatttggtggacatgaaaaagattattaagaataagaatttgaggattacgagaggtttcaaagaaagtcttaccaacattattgatagggagtccagcaccatcaccaacatgaatttgatttgtatcatagtattcctgcttttgcatcaggtttcgctcattgaatgtaaaatggttagtggcaccaaactctgggtaccaagctggatcagtcactgtggtagctgaggcaggcatagtctgcatttgttagggacttttgtccatatttctagcaccaagacttggaaagtccatgttgaatcgctggtagcatttggaggagacatgaccaactttgccacatagctgacaaataggtctggaggtggattgagcaagagaaggtccacgaggattactgaaggatgttgtagatggtgaacaaaaattaccaatagttgaactccgaggactagtagcatagagatttcagtaaggagctcgtggggactgagagaaatttccacgattcgtactagtatttgattgatgagactgatctgagaaggaagtgcaattctcaaatgcatctcaattgtaagcaggattagtagagggagcagaatccagatcttgactgtgtttctcaatcagatgtcttgagccaaaagtagcgactatatttttccaatggtgtaatcttcatcgcataattgatcgaaatgatgaagatatcgtaatcttgtggtagaccattgaagattgcacagatgtgttctttaggcgtcaaagattggccatcaaatccaagaagattaaccagagacttgacaccaaggagataatcgttgatttggatcctttcttaaagttgtgaacctgagtttgatactgattgatcttggctgcagactgagatgcaaagtattgatcgagaatgttccaaacaacataataggtttcacagtcaaaaatgcgcatgagtattgtatcaggcatggatgatgacagtcaagcataaagtaaatgatcttgtttaatccatacaagataagtagcattgagagtaccaatttgttcatcggcttcagtgagaaatcgccgaggaacaagaggcattgccgaaataaaatcaatgagatcgtaaccttgaatggcagcaataacttgaggttgctagagaagaaagttttgattgtcaagtttgactgacaatttaggagaaacttgaataggtgccgccattggagaagcttgaggaagagaagtgatcaccaagtgaaaaaaaaactagggacaaaatagagagaaaaatagatttgataccatttttgaacaaaagatctgatgaatgaaattacttctcactagttgaattgcttagcatttgtacagagtatatataagataagttagttacaatcaggtataagttagttacaaatgacagctgtactaactaaataaataacaagattaactaacactaacacacaaggttattgttgaacggaatacagattaatcaatggacaaggtcatttgaagggatggaggcagtagtgttgttcgtaaaatttgaggtagaaacaagattagcagatggtaaggatggcctaaaatgagtttgttgtctttcaatagttgttgcccgtgcaaaaggaaacacattttcatcgcataagacatccctagatttgtataggcacccatctttagccaaacacttgtaacctttgtaaaataagctacagcctaataacacacaaggtataacatctacattgaagtttgactttattgtaaggcctaagattagataacacaagcaaccaaacacacgaagagttgtgtaatctga

SEQ ID NO: 306902 - DNA, 1511 bp, Cannabis indica
atttgggttctggtgattgtttattaataattgcttgtaatctgtgatttaatcattgcagagttgcagattgagatttgattgaactaagcctgctgtagattccttccttccatatgctatgctgctttaatggctgctggttcaaggttttccacaatgaagtcaattcgtaattgtaccaatttctatccgatacctcaatcgctttgctcatgtaacattacaagaacatcatatgcctctgtaaatctccattaccaagtgaaaggaaaacaaagccttgaaaacactggaagtagtcgtgaaaatgtattgggtttgaagtctcctattggtgtcagatgttatacaatcctacccaattgtacatcttcatccacattctcaaactcccactttaggaaggctgttcctcttttttctgcaatccctcttttgaagtactgttcgtattcctcctcctctggtagtagcaatgctggtaaaggtgtagaccaaatagtgtcagcctcatctggtgccagtggagttaatgtttctgacagtggtgttggaaatgaatggcttgataaggttaaagatctttggcaaagtgtagttgagggagcaacttataccggccagaaagctaaggaagtttctgatgagctttctcctcatgttgaacgattgttggattcacagccgtatctcaaaaatgtagttgttccagctagttttatgctcactggtactctactggcttggtttgtgatgcctagggtcttgagaagatttcacaagtactcttcacaaggtcctgttggtatattgtctagaagtatgtctggggaagaaattccttatgagaaaagttttttgggtgctttggaggacccagtacgatatttagttaccttcatagcatttacacaaatgttagttgttctatgttttgcaaatgcctctttataatcatttatttgattagtgtacatatgatcttcttttaattgcataatagtctggataaatttgttttgcagtggcatgatggtagcaccatctactattgcatcacagtaccttttaccagcatggaggggtgctgttatcgtgtcacttgtgtggttcctgaatcggtggaaaacaaatgtttttactcgtgcattggccggtcctgttgtggcgggtcttgatcgcgagaaattgctagctcttgacaaagtttcatctgttggtctttttgtaattgctgtaatggctttagcagaagcatgtggggtggctgttcaatctattctcacagttggtggcataggaggtcagtatctgcttctagttatctatatgtttacatctcttttgttaagtataaattttttgggttctccatttctccctttgcatatatttctggtttactgactacctaagttataggcttacagttcctagtcattagcatattatttgccatttttttatagcttaaagaaaaaatgttcttgatatctaatatatatata

SEQ ID NO: 306903 - DNA, 830 bp, Cannabis indica
aaggggaagcatataaaatagggtatactaaacttcagttcaacttcaaggttaagtacttgaagaacgaccagagagaataatgtaataatcatctagttgatgagctagatattctcaagtattttgataaaatatattacttatagtgatgtgcatattttgaaattgttaggcatctttcttggcttattgaaagcttccacaaaataagatttgtcacaacacataagaatatgtaatgttatctctaatttttagcaaatgatgtcgtggcatgtatacgatgatatgatttgtttgacttaaatagttaatctcttttttagctctagaattacaaaaatcttataaaggtgtgaggtgactggagcaccaacatctaagaaaccctctaaaaatactcaaggtgatgtttagtttaatagaataagaatcaataggaattgattaagatgtttagtttgttattgtaataaatattaaaataagtgataaattgataaaattattctcactattttttttttaatttgtataacaattatacccctaggctcttacaatgtgagcacctttgactcaagcacacaacaaattagaaatgcaaatgtgttgggatgatgactatcatgccattttttttcaagtaaataaacgacataataacatcacaatttggcccaaaaccgatgtagtgttgatgttagtttaaaaaggtatttcaaattataaaaagtaaaattaaacgatttcttttgggaattttgattatttatgcatactaattgagggaaattaattccctaaatttatgtattttaaaattt

SEQ ID NO: 306904 - DNA, 1648 bp, Cannabis indica
ttgaatttttctctttcattgccttattcttatgtgttttacaatctgttgacaggttgaacagtatgaacaaccagcagctgtttgtatcgtatgctgtcgtgtggagccagtggatcttcttgtcatgtgcaatgtgtgtcaaaatcgacgcattcattcctactgcctggaccctcctatcgatccatggacgtgcatggactgcaaagatctacaaagacactacctttacaaccgtcgataaaaagcatcaagttgtttcaagtttatgagatagttttaactgcggaagtgtactagtgtaggaacaaatacatattttagttggatgaatatttttcttaggttcaactttgcttcacgcaaacttgttattggcaaaatcaaaagaaagatgagtaccaatatttctcacttaatgcttatcattttattgtatcacattagctttaagtcaaagcatgaaattaatcatgaaagtggcttttatataattgaaaggggaacataacaaaatagaaagcggcgtttcttcatgggatctttttcactattatataaaaatatcatataaatgcatgtcatgcagtaaaggacaacgttagggcttagagatatgtagtgggtgagaacgttgggtttctttctagagaaattataatgggaaaaattccaaaagctgaaaccaccatgttcactactactagtgtctcatttttgtgtccaaacaatggccacatcatcacaaactgtgctcttctctttgtcttattatacccctcaccataatttataatcttttgttaatattagtattctttctctaatactttacacatgaaaattaatagtcatgactcacaacatttcctgcttttacacccttctactgtaataacttatcttatctagttatcttctttatggttaacttttcaaaagtaaacgaactgcttttgaagaatatgtacgaaccaagtacttttcatattctagtaaaacttttattgccatatattaagctatgcaacattgacaattgaaaagtatcggttacaagtcttcatgggtgtaaatgaataatttaagttcttaatttgggagtgtatctggagtcaaaagttaaaacttgcctactcagaactagctagaaatgattgaagactgcactacattactctaagaaaagtttcagcaaaatgaaacaagggcctttgcttaaagtgaccaaaaaactttcaaatctatgattctttttagactaaaaaaaggaatttatttggtacacaatagaatttcaatttgcatcatgtttttatttcacaggctcacatcacccccttcaaatatgtttgtagacccactttcaatgtgggtgagtaaacaagactaaacattagttcaagacttgaactactattactaccatagcttaagctcaatatataaccccaaattacttgcaatgtttcttccaatagttattatatatacttctctttcgaatatgccgaaaattcattcaataaaaaaacaaattatatatgtcataggaattcctcatcctgaactaatacacaccattggttattgatatcagaatttcaagttgtgtgtgtgtgtgacagagagagagagagagaga

SEQ ID NO: 306905 - DNA, 1219 bp, Cannabis indica
ttgtgtttgataaatgtgcaacaatcaagaaatttaactacctatgcagttttagtttgtggtaaacagtttttttttttctgtttaggtggaggaagttctctgagtcgaaaagaacgtgaggaagttcgggctgaagtggatgcccagtttgaggtggaagagcaggagctgaagacaaagaagaagaggaagaatttgccgaagattagtcaggaagaggatgatttggggtccttatttggtgcggtattactggcaaactgcctcgatttgctaataagatcactttgaaggtataaagctggatgcagttgtcacttttaaagaaaaaaaggaaaaacaacattacattgtcttaaatttttccttacaaatttgatactgttggagttacatattgacttagtttgactgttttcttctaaaaattatagaatgtagtgcatctttatataagatacatacagggaaggaaaacttcaatgactgattgcgtatattggtttagcttgtataattctccttctgtgataagaaacgagaattttttgaattagtgtcacatttctggccttttgtgggttaccctggtaccattacatgtactttttcttccatttttctttggtatccgtttttcgtggaacataataatttaacgccacctttattggtagtcactaactcaatactattgagcaagaattcgcacaacataccaatggttaagaagtgaagagttatgccaactacgggaaagaaggatttcatgtgaaaatgaaataattatcgaatttgatcattgttttatgtcatatgcatcatactatcatccccatccaaaaattgatgtgtttttgtttgttgtcacagaatatatcccccggaatgaagctttggggagttattgctgaagtaaatgagagagacctcgtaataagtctaccagggggtttaagaggtttagttcgagcctccgatgctttggatcctatttcagataccgaagttgaggtaatactaatagtaagcatgtagttaagatatgtaatctgttactgttgtcatgactcgtggctataatggctctcactcatcaaaactgttatctttgtgttttttttttttaattactttttttttcctcttctctttccttcaacgttgagtgttttgtataatgactactgttgtttaattggtggttttttttttt

SEQ ID NO: 306906 - DNA, 3171 bp, Cannabis indica
tagtttttaaaaaattaaactactatgggttttgttgtgtttacctctattcttggaaagaagatgctataaatgttgttgttcgttcttggattgtcttttgatttagcaaggttttttcttcgccgaatttaatggttttttcctagttttctgcgattttggtccgtccccaaccaggaaggaggtgttgtttttgtgttttgttactattcacagtataaaagtaaagttattgggcctaggcagtataaaagaaataaaaacgagcttggacagtaaaaatgtaaagtttgccgtgtcccagtatttttgaaaacatttggtaaaaaagtagtatttttgtaagtttcccaaatatacgggaaataaatgatattttcaagggaaacttacaaaaatactggaatttaggttaacttttacaaaaatactgtcacacggaaatcttttcaaaaatactgtatttttataaaacaccagtagaatacaaaacaaaacaactcaaaacaacagtagaacaactaaaaaacaacagtagaacaatagtgaaaacttaacacagtatactaccagtatgaaacttatgaaaaaacatagtaaaaaagtaaaaccgcctggcagtatttttgtgaaaaaatagtaaaagttagtataccatgtatatttccttattttttatccaatggccaaaaacgatttggtcaaagttaccaaaatgtattttaaattataatctaccataatataatttaaaataactaattagttagtaagatgaatacaaataagtttttagagagtaactaaaatgtatctcaaataacttaaaaatatttttaaagaatatttaaatgcatgggagaggtcttgtcgttttgacatagttgtgagttttttcctgtaatcttttttgtcgttcttatttttttttttctgatcttggccatggcttcctcaagtaatccttctatccaggatttagagactgactgtgctaatttgataatagaagaagaggccaatggtggttttgagtttgatgttggggaggaggagaatgatagttttgattctcgatggagtttggtgggcaaatttctctctaatagggcgatggatcttgactttgtcgagaatcagttggctaatttatggaaaccaaacatgggcatgtatgtgaagcaattggaaagtaatctttttatttttcatttcttccatgaattagatattcaaagagttatagaaggcatcccatggacgtgtaatagacaacaattgatctttgaaagactaaaagcaggggataatccacgacttgtgatgttgaataagcttgatatatgggtccaggttcacgatatcctacctgggctcatgtcggtgacagttttaaaagaagtttgatagtatatcggtaagtgtgttaaatcggacccgaataactttatgggagtctggagggactactttcgtgttccggttgctttgaatataaacgttcctctaaaacgtaagatgaggcttcatctgaaggatagtgactggacttttgttcagtttatatatgaaagaattccccccttttgtttcatttgtggcatcattggccacacgaatagattctgttcaaaacctttccttacccctcttgcccaaattgtaaaaccatatggagcctggatgaaagcaacaccaaagagaatgaattttcttgatggtcgaaatggctacacaatccttctgcttcatcgtttctggtctactcaagcagcggaaactcggcgacagtgattggtcaaagattctctatctcagtgaacattcccagtagaaattaaggtgttagtggaccagaaattacgggcaaggaagatttgattaccaagaataaaggtattgatggtggctcaaatgttatctcagatttggagggagttatagcttcacacaattccagctgtaatggtattgacctaactaatagcgggcaatatattcaaaatggaggagttattatttctgaccaaaagagaagacgtgtgggtgttaattctcttgttgggcctactcttatgaatgtagaagtactgatggtggataatattgggcctcagagtactgaacaagaattagaccaaagtttggctattggacctaaagaagcaactatgagtattcaaattcaagatgaaagtggcaataatactttttcgggtaggcaaaatgaacaggaggaggtaggaagtccaaaaaacttgatccaggcgggccaacatgtgggggctcacctatcattatgagttgtttaagttggaattgtcatgggcttgggaacccattgacattaaaattccttaaagagatgatttctcaaaagcagcccaaatttgtatttctttgtgagactctgtgtaataaagaacgtgttgaatgggtgaaacagagtttgaagtttgaatgtgctttctcgattgatgctcaagggagaagtgggggactcgctatgttgtggaagtttaaagaagaagctaatgttattggcttttctacaaatcacattgatattattaccaaagttcctggcttgattgagtggaggttaactagtatttatggcgaacctaaacgttctcttcgtgctcagatctgggacttacttcgatccttgaagtaggagtcttctttaccatggtgcatgttgggtgattttaataatgtggtgtctcaagctgacaagagaggtggcagaccatacccttcttggcttgtagaaggctttcaaaaggctcttgcagactgcaatttagtggatatagacctatgtgggtatcaatttacatgggagagaggccgtggcacggagcgatgggtagaggtaaggttggactgtggcctagcttctatggcttggctgaatacatttaactttgtaaaattatttaatctagattactcctcctctgatcatagtgctctatttctggatcctattactcgtgctggtaacaccgtaaccacattataaacaacactatactaacactctataaaccacattcatactagtgctagtagtgcaaacatccaaaacaaacatatattcatatatatattcatatgctatcttacctcgcttcgtgctcaagtgtgccggtcagcctgagt

SEQ ID NO: 306907 - DNA, 1528 bp, Cannabis indica
aagaaaaaaaaagttcgtaaaaatattaaaaaagaaaacaagatcaaaattccgtacagtaaattttttgttattattgcgcattcttaaaataattttcaggtgctaggagaaattggagaatgttctagttaagttttggaagtggagaatactaagggaggggagggccttctttaggggatggatagaattcttagttagaatatcactgcaatcagaaaaagcttcacaaacaagaagagatcaagagattgatccatacaataaatgtagcgatcagaaaaagattcacaaacaagaagagatcaagagactgatccatacaatgtatgtaggcttagttggtcttcttgaaattaaagcatagactaagaactttggggtctgtatatgttaatatgtttactgaatggtgttttaccacgaataatgcatggcacaataagaaagaataatggttagttggaatctgagcaaatttcggtcaatatcggaagtgctttagttgactaatgcatatggaggttactttcatggctgtaaaagaaaggtttttattgccttttgtgtatgctagaaggtcgttgaatcgaatttattcgattaaagacatggagggggtactagttcatgagcccaagcaagttacatcagccttcttgagattttattatgaattgttgagttcaaccaatagagaataaatgacaggttctactgggagttgtctgaaaaggtcctctgatatctaattaatgttcatatcaggagactacaggaggattgtacaaatgaataggtaaaagctaccaattttataattctcggtaacaaaactccaggatcggatagttacataactacttttttcaagaaattacattaggaattcgtaggaggagagtcgtgcgtgtgccaagcgatcaaatcattccttatttctggtaagctttctcaaggaaattaattcaacattcccaaaagtaagtgtcctgtcttatttactcaagattgaggatgagatttctgaatatcattgcgcccagaattaaagtggttttgttcaaggtcgatatattgcctataatataatagtttgctaggatttggtgtgctatcatagggggaagaatacaaagccacaatatatgatatatcaagttagacttgaggaaagcatatgacacaatagaacaaaattttattgaggaaaaatgttatatgcattcaaattcccaggggactttattcgtttagtcatgatctgtgttcgaatactgagacttagtatcatatttaatggtacgttacatgggtgctttgaaattaaactaggtttgagcaaagggatcctatgcatgtctccattattatttgaacttggaaaggaatatcattctagataatgatgagaattgatttgaaaaaggacttcatattccatgatagatgtgagaagctccactaaattacatgtgctttgcatagatgatgttttactattctgtcattttcaagtctatat

SEQ ID NO: 306908 - DNA, 1405 bp, Cannabis indica
aaattaaactaatattccattcgtagtttttacgttcttcctttcattcaagtattctatatcacataaaaataatataccataaaaaatataaatatacgaaaaaaaaactaaactaatgtactttatttttttcctttccttcatgatatactgtgtcgagagagaaaaaagaaatcatatggtctagacacgatagtagaaagctagggtcaattatccaagattataattgtaatttcatcatcaaaattttaactaaagggacattttgttcatttttttataaaaagagacatttattaacttaattgttagatttaggaccattttgcattttagccctgacaaaaatttaattcatttgtaaaaatcaattagcattagggtattaacccaaatttcacattggaaaaattaagaatagccctcaatataagtgtgatggctactttatttgttcaaaacctcttaagaaggtaataaaaaataaaattggtagtggtggtccaacaaagtggcatatatataattcaaagttattgtctgattattgaaattaagttaggaactgaagttgtctaattaatctcattgttagggaaaactaccttaatatacaaacattattattgaaataatatgacattgggacaatatggttcatatgacattttgttgtgatgagatcccattttgatcgtgtacatatttctagtactataatatgatgtttttactcaagcgttgagtgcagccagcgaagaatggaatgtctgatcaaaggtgaatgtacctttacgtttaaaacattaagaccggaatctccattggaacaagaaaaggtagttttaaatatgtgttatattagttaatgtatctctgaagaaatcaaatgtactctctctctctcaaaaatcaagcaaattttagcatcattggtaataatttataatattgaataattcccgtcgaaaacctcattcacatctacaaaatattgcaactataaacacgataacaccgatttaaatgtgattatttgaccattttttttaattattttttttagcagttaaaattaataccggtaacataattaattaattattttttaaatatttaaatttaatttaaaagtatcaacaattattgtttttaaagattagattttatgttttcatgattatttaaattaataattaaccaataacaattataagcaaacatattctaatatttagtatatatatatcattatatctttaatataaaatgtggctaattattaagaatataggagtattgatctattaattaatttaatggtgttagtaggtttaattttataaatatataaatattaatattaattttttacactaatttaaatatatataaatat

SEQ ID NO: 306909 - DNA, 1649 bp, Cannabis indica
ttttttttttctttctaaaattttagacattttggaaagtttctcttcattgtatgtcaaagttaattaatataaatatgttatctgaatatttttaagaaagtttgggatgcctcctttacttatattatacataatcatataaaaaaaaaataaacttatccacatgtatcaaaaatatatatttaatttttgatacaattatgtctatataagagaatggatttaattcacagagttttggtagtcaaacatgggatactagtttcatcattcaagctttgattgctactgatctcactggtgaaattggagaaaccctagcaagaggttacaattttctaaaggaatctcaggttaaagataacccatctggtgactttaagaagatgtaccgccatatttctaaggggtcatggacattttcagatcaggatcaaggatggcaaatttctgatggaactgctgaaagtttgaaggtatattaattaattattttatttaattaatatatatttatgtatgtaaatactatattatggtcactaattaataaagtaatgaatattatatatacataattaatcatacagtgttgtctgctgctgtcattgatgccaccagatgtagttggtgaaaatattgatgttgaaagaatttatgattctattaatattattctctctttacaggtaaaaattttctttacatgaaaaatgtatgtacaatttgttaagctttctaattaaaattataaaactgtataaggataatatattattattgttattagaatttgggagtgtgtttagaaagtaggatatatagtgtgaaatttttgataagaagtatgatcctctttattaatattccttcaaaatactatccctaaatcgcaagtgataatcgcgataccatgatagaacataactttggtttataaattaggatgtggtgaggtgaatgcattaatatataagtatgaaattttatttcaaaaccaattagcaatgaaatagcacatataaaagtatatactcttatgtatgtgtatgtggtaataagtttgagactccttaaaaattaccacttctatggatttattcataattcaattaatctcattataattaagattcataattgcagagtaagaatggtggtgtaacaggttgggagccagcaagaggacaaaaatggatggaagtaaggactttaataaattatcttaaaaattataaatttaaattaaattaacattattttaaatatatgatttaaaattcagatatttaatccaactgaatttttcggggacattgtgattgagcatgaatatgtagaatgcacttcatcagccatccaggttttggttttgttcaaaacattgtatcctcaacatagaaaaaaagaaattgataatttcataattaaagctactaaattccttgaagacacacaaaggcatgatggttcatggtaattatataatctttcttttttcattctacattactattaatatacagatgatattttagggtaaatattgttagggtttataaaacacttaagaaatatatatcacagatctaattatattcctaaaagtgctttaatatagaaaccctaaatcataaatctataaa

SEQ ID NO: 306910 - DNA, 1355 bp, Cannabis indica
ataaaaatactgtcacacaaattattttttttttcaaaaatactgtgtttttgtataacaacagttgaacacaaaatagaacaactaaaaaacaaccgtagaacaacagtaaaaatttaacacatataatataaaatttacacgacatttttgaaaaaaattctatcccacagtataaacgtaagaaaattagaaatttcagtggtataattattcctgacagagttatatttatgcattggctgacttcaaatctagcttcaaagtttattttgaaacccaataattgagtagtttttcaacgaatcattatgcagcaaaaaaaaaaaaaagaagaaaatgaaaaaaagcccccaacttattacacgtgggtataatacatgtatacatctccactgcttattgctaaactccaaaatccaatatgaaagttggttggaaattgggaattattagggcgatgaacatttaataaaatataaagtttgggctatattaaaacgcgtaatgactaatgatgatagcttagctttcattactatgtaaacatgaatataaatatatatatatttatataatataaagaagtgaaaagataggattgaaaagaataattctcttcttatcttaaaacacccaaagcttctaagcaagcatatgtcggtgcatttaatcctttaatttcccatctcaacagaagccaaacactacatgtgacatttttaaatgagttttatttctcttttcttccatttacataatttgtacaagaaagaaactaatctccatgtgaccctttcatatcaaaataagattattaattatataaaaaaaatgtacatggtcctcttcattattcacactatggaccaagctacagtttgattgattaaatgaaacaatgaatcaaaataattagccaacttgaaaacttatggtgatcaactatagaattattgcactagattttgaattttgatatattattattattattattaaatgaataataaaggatcgatggggagtaatgtttgtgaggattgttttcgcatgcaattgaatagaactgtggtactgggagagaaattcatcaattaatgcagctgattcataaatttagtatatgggaactagagatggaaatttataccgcggggatgggtaaccgcggggatccgcccctaatggggtggggattccccatcttgatggttaatggggcggtggtgggggacaatttcaatacccgaagcggggatggggcgggggcggggataatactatccgcaccatatccgaccccgatatagatatatataatttttttgtttttttttcaaactttgacacat

SEQ ID NO: 306911 - DNA, 760 bp, Cannabis indica
ttaataaacttatatagtttaatattttttcatgattcatattgtagctaaactatacatgttttagtttaatattaaactgaaaaactctcttgaatgacgaaacatagtgcacttattacttaccctataattttttataatggttacaaattgttataaactgtaatttttcttggcagcaatgatggcctacagaaccgtcccagctgagatgagagtaaaaaagatcatacacatgctattacatataatagccatagttatgggaattattggcttatgtgccgtttttaggtaccataacatgatcaacttaggcgatatgtatagtttgcactcttggattggcttgaccactttcattttatattgcctacaggtaaattcatttaatttacaaaattaccacaaaattataatttgtttagaaaaataacataactgtttttttttgggcagtggttggttgggtttttggtgttcatggtgggtcgttcttcagttactaaagaaagaatgattgggtggcacatggtagctggaagagcacttctattcatgtcaatttgtgcagctcttacgggcctaatggagaaagcccagtttcttgggcttaaatatcaacacgaggcccgtttggttaacttccttgggctttcaatccttctctttggggttttcgtagatctttctatcgtttatggtcgttacatttaaaatgatttttatgtatcttatatcttatatatatatatat

SEQ ID NO: 306912 - DNA, 1818 bp, Cannabis indica
cacccatccaacagcagtcaattttatcacagaacctacttcactaacatgcatatacatataaactaatatcaaaaactactacgtactaagcgaaagcaaaaaaatatacctgaatcgagtgcaaaaataacaacttgtggcagcttgcggtaatcccgagcggttgaacacggacctaattccataaatagtaaaatcaaattaaaaatttaatacctaaatacatatcaacacatacaaccacaaccacatacactcacatacactcacatacacttatacacacacacatacacacatatatacatatatattcacatacatatatacacatatacacatatatacacatatataaaagcctttaataacattgagcagcttaataatagtagttatatttttatatattgatatatatggtatatatatatatgaaataatatttggatttatttgtgcatacatgaattgtcaagatcatgaataagaagcaggctggcttattgtaaaagttggaatatatatttgtactttaaatatacataatagacaaagactactcgatactcacacactgcatgtgtaccacgatgagataaagagaagttcgtagaccctttttctttctttggtttaatttcttcttttattttatataaatttaaaacaaaatggattttgtgttgttttgttatttattttattcacgtctgtatcgaaattcgagatgtttatatatgtatcatgatgataggaaaaacaatgaacatagagatattaattttcttttcactctaggatgaaattagacaaagtaattcttcgcaaaaaataaaaactaattcttttttcacattaaaatatattattaactgttaagggatcttagtaatacccaatattactatatacccaacattactatatagatatgttatattgttattattagttcaatttaatataataatttgtatattttaattaataatttttataaaaaattactaacatgcgccactttataagtgtcacctcaataatgacgtctagctactaaaaaaggaatttaggcgattgttttaacaattagattaccctcaattcgtaagactgatgattatgctcctgacgcaaaaagaaatggtataataagcatcggttataagtagtcggcattgagtatttttgattgttcctacgtcaaaaaggagagagaataaataattgttttaaatattcgataaggaataggcgaccatttataatggttgctaatacattacttgttgatttaacaccgagaacaaaatacaaaataaaaaaaaataaccaaattagattttccttcatctccacaacatcgaaaataataataataataataaaagagtccacgattttcttgcaccatataatatatacatatcgaaaaatatatacaaaaaattcactaccacaactctttcctcgtcgaactaaccaatcgccacagccctatctttactaaacgatccacaaccaactttttctcgtcgaatgaaccaccactaaccttccctcgcaacaaaaaataatacttagatcagaaaaacaaatcacatgagagagacagagagagacctgagaggcaagcatctttgggattaaggttggtgcgatgggcaaggggtcaagcctctcgcggttcgtgctggctggtgcaagaagaagttatgggcaagggatcaaacaaagggatctgaaagtttttaccatgtgtattgagagagagagagagagagagagagagagagagaggagagagagaga

SEQ ID NO: 306913 - DNA, 2291 bp, Cannabis indica
aaaatattttctaaaatcatattatataaaattgtttttactttttaatttttttaattaaaactctaaattttaaatacaaaaatcactttcaaaacatttttaaatagttttttaattaatattttagactccgaccctaacttagatcttggaaatcgaattcgaacccggccccagacttagacccaccccaatcccagtctccctagacccggcttagataaaattaacaaataaaaatgaaaattatatttacagaacacatttttattttttgtttttaaatattaaaaaataaaagtggttataaaacatatttttatttttcaaaaacaaaattttaaaaaataaaaatttcacttttatttttgtgattaaaaaatttaaaaataaaagtgttattaaacgccaccttaaataatcaattttcatatataaagatatatttaaaaggttgccgtttttttttttttaactaaatacttctagtaaaatgtttacaattaattgaaaagtttcagataatataaatgacatcattatcacaattaaacaaattaattttatttatttagtaaaaaacaaataaaaataaataattataagaaaaaaaaaaagagcatgcattaattatatagataatatctaatccaaatcacatggtgttatatgtacatatgcatataaggagccaaaagaagtaaaaaatgaagcagaggcacatgttagagagggaggttagggtacattgatgatgtacaatcatgtacaagtgtacacttagtccttagacaacttttccaaaccttgtctccaatggccaaattgggtccccatctaataattattattaactacttattattaacacatatatctatatatatatatatagtttgaagatgatggatgatgatataataaagccagctataaagcttatctcatctaagcatggcatatacatatatgtgtggcatgtctttgtgaaactaggggccggttcatatctatatctatatctatatatgtataactttgacaaaaggttttgcatggcattgggaataggtggttttagttagcttaatagctatattagttgtataattaggacacatgggtagttttgttttttagaaagggacatggggtagtgtttttttatttttatttatttcgataatataggtattggtagaagaattaatattaattagggagagctaggtccacttcgttggtgtaactttattatggataattgagggttgacacgagtatagcattttacactttcaattattttaggtatgccaaaaaaattgtaattatctatcccatgtacaaggtaattaattaaaagaaactcactttctagatatttttagggcattaatctcctattgtcctcccttgtacaataatagagtgactactcaatagttaaatcaatgatcagtggtggattcaagatttaagttgaggaggcgatatttttttttttttttataaatgagggtgcgcctctttttttttttctacattgcataacatgttaaaaatgaatgcaaatttatattttagtattaaatatagtataaagtaacacttttttttataagtgaggggtgcgtctttttttttttacattgcataacatgttaaaaattaatgcaaatttatattttagtattaaatatagtataaagtaaaaaaaaaagtaacaataaaatatatttggttaaataattaagatattaaatataagtattattggtagaggttcaaaaagtaaaaaaaaataaccgaaaaagtaaaaaaaataccaaagtaaacatgcttgtattgggattagaacttatgacctccttttgatgcatgaaatgactttaccattataccaaagcttattttatgtctaaagatatcacttttatttatcatcaatatatgttgtaactaactaaaatgcatatatattttttttaccgatttttttttttcagagtgggcgactgccccacctcgcctctatgtgggtctgcccctgatcatgatgattatattttttttacctataataacatgttaacaacatttaaattttttttaaaactaaattaacttataataaattattttcttaaaataattaatacttttcatttaaatatttaataagtaccctttttaaaagttaatattaataatttaatttttatatttaagtctttatatttttttaacaaattacctatttaattataatatttacaataaaactc

SEQ ID NO: 306914 - DNA, 1717 bp, Cannabis indica
tgtatgtacctagatgtataacttttatctagttatgaaagtaataagaaataacttattatacgtaagaaaaatttagaaatttttttctaaatttagaaaaattctctccgtacaatgaaaattccctttccgtacacgtggtgcttgtagggtttttgtattaccctaaccccaaattgatcctctgagagtgatcctggacattcttgcatcctgtagcagtgttgctaccttataccttgagttttatgccttgttctgcgttgctaaggtgttgaaggtttttttttaatggcttcttcaaaaggaaaagaggtgatggaaacggtggaatggatttccaaagaggaactaaccctctccttagagctgggggacgatggcgaagtagggaaagactacattgatagaactctggttggcagggttttctccagaagagagattttcaaggggctgctccgaaatgtactcactcaaaaatggaggtttgttaagggctggagcttgatggaggtggataccaatgtttacatgctgaaattccaaaaaaagagtgaagcggagttggttttgctgaagagcccctgggcggtttgtgggggacatctttcactgcaacctttggctgaagatggaagatggcagtcttcaaactcggcacgatccctatctgggtgcgggtttacgatgttccccctagattctttacaaagaggaatgctacggctatagctaataagatgggaggggttattagcattgacagagtgtggcgcaatggatttccgacggcagaatacattcgtctaagggtgtctctgaatacgaaaaaacccattttggttggcctacatatccctatggaggaaggcgtttgcctatggtgctacttcaaatacgagaacctcccacgaatctgttttaagtgtgggatggtgggtcatgaagagatggaatgcaaaagaagacgacgagtaattatggatgactttaaccacaccgtctcgatgtacgagccatgggtgcggtttggatcccgaatgaaacattgctttgaaagcattctggcggctaaggcggcgagagagttggaaggattgaacttgggcggcgggaatcttggggataactgcctcccaccggaccaagatgaacagagagatgtggtgacctttgaaccagggctgtttggttctgaaatccaccaggaagcgattcgagagcggagggaggccacggggaatgatggaatgataactcaaagcgatattccggccgaccaccgtgacgaggcggtcactgtgacagctaaggaaggggacgtagaggtggtggacaccctggccatgcagaaggacggtacgaagagtacgataattgatagtggagaaacgttggacactcctgtggggccctctgaaattcaaattggccacctggccatggtcttcaaaggagtcttagaccctaaagactttaaggagaaataggcccaaagagtgagggctaaacaggtgtcaaagaaggaactcccgggccttatgtcccctagtgggcttacaatttcgggccctggcccaggaaagaaaaggaggatggaagacatggacccaattctgttgttgttggatcgaggtgaagactcgggttccctataccctgagacagttaagaaatcatgcattgagccttctgttggaaatttatttta

SEQ ID NO: 306915 - DNA, 659 bp, Cannabis indica
actcataagaaaattaactaagaaaagcaataaactaacacggactactttgagcattttctctaattttttttggtctaaaactgtattgaattgtaataaaacttattacaaattgtattgggtaaaaaatataaatatctaattgttaataccggagtgtcacatgtcattctctcattggttgcatgtcacacgtggcgactgcaaaacaaaggagaaaattccactttggtggcttggggaccacgggtgaaacgaggcccagtcgcaggccagagaagtggcgtgcacgcacgaccagcagaagctggtgagctgcacgcgcgcgtggagacggagtggggacaaagccctggtgcgcctatcgtgcttctgccgagccaatggaagtgcgccacgtggtgctgatgtttgctggagagggaaaatgagctgaatttgggccttgtttttttggacttctcagcttgaaaaaatgcaaattttcaaagttttagactatatttttaccactttctattttctttcccttttgtttatcaaatactacttcatctataaaacacaaacaaaattaaatccaaacaaaatattttcaacataaaatatatcacaataattttaataaaaatatttatttaaaatctaattaattt

SEQ ID NO: 306916 - DNA, 1126 bp, Cannabis indica
aaaaaaaaaaaaaaagttacaaccagaccacataaatctcaaaccactttgtatataagttagaataaagattttataagtagctaatgatgtcttttcaaaaatgttggttaagcgtttcgacccctacaaaagataaaatatatattgattaggaggaccatttttttgggttcaagataatcaaattatatacatatatagttggcctacattctcaataatctaatgatatgatcaattaaagtgattgaaatagtaatctattgaaacttcacttacacacagcaggaaagacatggtacgatgatgcagatcagattagatgagtaagacttacaacaaatataacaagaatagatgatttatatacatatatacatattcatatatgatgtaggattgaaataaattgccacgttcaagagagaacaagctttaagtgggcagaaaagacctctatatataaaatttacacgcaacttttacttaatatataatatataattatatatatatacatatgaatctctaatgagggaaatatccattgaaatttcaaaatccatacagattacagagcatcacgattaaaaggaataataattaatcactaataatatcattggttctcaaacaaaactaccttttcagccacgagtgaggtagatctgcgttgcgtccttgcggttttcgaaggagaagctacgttgttgtcgtctgcgattaatagaagacctgcgccgttgtcgtctgcgaggggggcagttgccgtcgtcgtcgactcgtctggtctgttggtcagagttggagatgggaggacgagcgagcatggctgttggttggcagcaccgacggctacaatttactgtgaaagagaagagacaataccatagagagagaaagagtctaaaagatggtatactttagggttttacttttttttaatatttccataataaaataataacctattttaaaattataatgcatgttttatgtatacataaattgaaaattctaaaaagacaacgtaaaaacgaaaaaaagataaataaagtaatttaaaaagattttttttttaattcaatcgttttcctataataataataaatatattaaaaat

SEQ ID NO: 306917 - DNA, 1182 bp, Cannabis indica
ttattttttatttttgtaaatatatttatattttaaaaaattaaatagaataattacaatttcatttatagatttcttataaaaactttatttattagaataggtgaaaatgtataattctttatcaccatacataaatttttaaaatttgaaataatattaaataatagatacttaatttgattctaagataaataatattgtactagaattatatattatgtttaataatattttaccaagtttaatattagtcagtttagtcaacattgatatgtttcgatgcaacaacaaaatgttatttgtaacaagtagttttgttagttacttaattattcatagtttatttataaaatgagttgcattggtattagtctgaaaaagtaatatttgtattaagttaatgattagtttaaatgattcccttttttgaaagagaataggaatatccatttaatataaatcagtagttcagaatacagagtgcaacaatggttcatattagaaaatagacttctgatataagcctgacatgtttagctaaacgatgagcggtatcattagcctttcatggagcatagctaaccgaagcttgaggaaatgaagacaggaagctattgatttgtgtaatgaattcttgtaaatgaagattgttggaataaccacaaataatagcatctagaagtgttttacagtcagactctatttggtgaatcaaaagtgattgctcttggcaccattttagagcatattgcagagagtgcgcttccatgatacgttgttggtggattcctttccgaggggtagccaagaccttgatagtttcatggttgtgggtttgaactatcatgcgaaagcccatctttttcctttgagtatcttgggctgcatcaatgttgagcttgaggaggtttggaggtggtggctgccattgatgggaggaatttgtagcttcatgagtactatacgttgttgatttggcattgtgttgcttgtattagagcaaatagtcttttgtccattagatggccgtataggtatctgtgacttgctttttgtggagcatttcattcctgtaatgccatattttcctgagtaaataagcaaaaaattaaaagtctttggtagccataatgtcagcacatatatgtaatgtaacgccctaatgctaaggcacgctac

SEQ ID NO: 306918 - DNA, 2753 bp, Cannabis indica
ggttgaatttttctctgatttctttgttttgaaggacatggtaacaaggaaggtgctcctccaagggaagcttaaggaagggctgtatcagtttgaggagttgctgtcaaagaaatcaaaacttccagccaccagtgcctcttcatcaaagaaaaagtcccatgtttcaaagtctgctttaatttctactgttaaatctgtgtcaatcaaggataagtggcacaagagacttggccacccatccaatagagtcctaaatgttgtcttgagtcatgttaatgttaaatctaatttcaatgaaaagcatagcttctgtgaagcatgccaatttggcaaatctcatgctctcccttttaatcttaaccatgaacgtgctaattttcctttagatttgatacataccgaccctttgggggccggctccagttttatccaacacaaattatcaattctacatacactttgtagacgattatagtcgtttcacttggatttatccacttaaacacaaatctgaagctatttcagctttcattaagttcaaggctttagtagaaaatcattttgaaaggaaaattaaagcactaaaaactgattggggaggggagtttcaggcttttgctgatattgtcactgaaaatggaataaatttccaacattcatgtcctcacacctcagcccaaaatggaagggctgagagaaaacataggcacatcgtagaaatgggtctaacactccttgctcaagcctacatgccacttaaatattggtgggacgcttttcaaacagctgtatatttgataaatcggctccccacaccaattctcaaagatcagtctcctttccaagttgtttactccaaacaacctgattataaattccttaaggtattcggatcagcatgttatccatgtatcaggccttaccaatctcataagttccaatttcactccactaaatgtgtgaacttaggctatagtgatgctcacaaaggctacaaatgccttagttcaactggcaggttgtatatctctcgcaatgttatctttaatgaatctgattttccatttaaaaatggtttcctgaacacacaccaggttgaacaacaagttcaagttcatgtgccttcatggtctgcatcctttaatcctatacgttatactgctgaacaccacaggatgactcaaactgatacaatacctactgcaaattcccttggagatgcacctgatcctgcatcaagttcacacaatgaaagtcaggttagagacacttcttactcatcctctactgatatacactgccctgttatacaacctgctgttgagactgctacagatcacttcaaagaatccattctgcagcaacccgacactgaaaaaattgctcctcttgctcccacgcataccatgataaccagatcaaaggcagtcatttttaaaccaaaacttacctcggacagtaagcttggcctctcgaaagtgaagaacctgcaacagtagaggaagcacttaaacatcaaggttggaacaatgctatgggagttgaaatggttgcattaaaaaggaacaaaacatggatccttgtacctagaatgccatggatgaacatagttggaaacaagtgggtttatagagttaaaagaaatcaagatggaatcagttgagagactcaaggctagacttgtagccaaaggtttccatcaaagaccaggaattgattttggagaaactttcagtcccgttgtaaaagcctctaccattcggattgtctaaccattgcagttgcaaaatcatgggatatcaggcagttggacatcaacaatgcctttctaaatggccaacttgaagaagatgtgttcatggaacagccacaaggttttgttgataaggaaatgcccgattttgtatgcaaattgtccaaatcactctacgggctgaagcaggcacctagagcctggtttgatagcttgaaaacaactctcttgaagtggaaatttcaaaattcaagggccgactcctcattgttcttttacaaaacacctcagatcataatattggtgttgatctacgttgatgatattattgtcacaggaaacaacagctccgaactcaagaacttcactgtcaaattgaatgatcattttgcactaaaagatctcggttctctcagtttctttctaggaatcgaagtgcaccgagatgatactggaatctatctgagtcaagcaaaatacataaaggagctattgataaggacaggaatggagcatctcaagccgtgctcaacacctatgacagttggtaaaatgctgtcaaaatctgatggtgagttactggacaacccgactgcctatcgaagtgtcattggaggtttgcaatacctcactcacacaagacctgacttgtcttttgccataaacaagttgagccaattcctacaagctcctacaacaactcattggagtgccatgaaacgagttctcaggtatttgaaaggaacactttaccatgggttgcacatcaaatattcagaaaaattggccttaaccgggtattcagatgctgattgggcatgctgtcctgatgatcgaagaagtgtagcaggttattgtgtataccttggtgacacacttgtgtcttggtcttcgaagaagcaggctgtggtttcgagatctagcaccgaatctgaatacagagccttagctcatgttgcagccgagatatctgttgggaattattttaccaggatct

SEQ ID NO: 306919 - DNA, 1807 bp, Cannabis indica
ttttcagattttaaatttaatttaaataaataaaataacaaaatttaaaagttagcaaaatatcttatattgaactgtgaacaacatgtagaacttgggcttcactaagatttgaataaaggaagaaatcagagatggatgatctaagttttcccaacaaagatgtaaaggaaccttaagttttcttggttgctaaacatcttagtttgtctttccttgttcacatggctcatattgttgttgggttccaaccaggatagttctttctctttttctttttacattggtatgttgctaaatatttgactattgcacatcaaattggatgccaagtaaattaactttagaataactgagaactgtagttggatgccaagtaaattttgttccaaattattaagcgtgaacaaagcatgtctgagcaatttatatatggtgtcccatcttggaaaatgttctccctttaaaaatcgtagggaaatgttcttcctttataaccatagggagatcagagcccttttataattttaaaccttacccaatctccttttctttatcaggtcagtttacattgtttacacagtacttggtgatgtcagcatctttgttgttggcaaggatgagtatgatgaacttgcttgtaagtaactgtaattttagtttttcacaaaggcaaacaaatgacagatttatctgtttgagattaaggatttctaaccttggatggtatctttccagtgtcagaagttatctttgtaattacatcagctgtgaaggatgtttgtggaaagcctcctaccgaacgcctctttctagacaagtatggaaggatttgcttgtgtttggatgaaattgtttggaaggtgaggccatcaataattatatttatatatcttaaagcaaaactagtaattcatgccagtatcctgaatataatacattcctaataatatgcaccttttgtttctattaacgtcatatgagcttttcaaaactgcattaaatcatgctaataattctctattaaaagcaacttaattgcataaagttagtggaggtatatttttgtgagcttttatatgacatattgtggtactatgctggttttctccgttttgcttttgtttgtttcttactttgcttgatacaaattaatttttgtatttccaaagggatatctggagaatacagaaaaagatagaatcagaagactgataaggttaaaacctccctctgagttctaaccaacgtagcctctctcgtgatcagtgattaagataaaattgacgttgaaattatgtcgcctgcatgtttcaagacaatggcattgtgtgatttgaaagcatttaggtagctatgttgtattgatttcccagacaggaagcgttgaatgttgatgtctttgaatttaagagtagccggtcttgttgaactttgaatatacagttcagtaatattttaaaatgattgagaatctcagcaatgaaatgaaaatggtcttagtattgcttattttgtttcacagctgaagatgtgtcattcaatttttagtattgcttaggactattcaattaaatgggctgggaatattggaatgggaaatgggataagtttacaattgtcttgtgtatgatgtgttctggaatttggtgttgtttttaatgggataagataaatgcagtgtatatgtattttttagctaattttatataattgaactttaatgtggtctaatttaacataagccaaaaattgtattaaatttaactcaaatatattaggagtcaaatgttacactataataaat

SEQ ID NO: 306920 - DNA, 1096 bp, Cannabis indica
attcggtgaacaatggtgaggcgctatttataccctaaaagcaatgttggaagaagttcataatattggtattcaaagcaaattacatgctagctcgatagctagctagatcctctctttatagatatactaataatatactattactacgtcgtactaattcattaatttcctccattaattaataatatattcttgtatatatgtttgttaattattagtttatataaataaagagaaaggagatgagagagatcatcacgtggttcactacatatgaatgtgtgaattgcacgtgcatggatgcgtgacaaaatatagacaatagtattctgtgtgatcacgtgggacggtgcatatatatatgcatgggggcaaaacacaatatatttatatatattatatataactcctctcttggaattggatggtctatatatagacttaatttagcgatattggccaattaattaatatcactctcattaattactctaattaatatatatggagatgaggaaagtaagagggtttaatattggagtagtgttgttagtagtgttgttgatgattttttggtgtgttcttgggcggaaggaagagtgtgtgaatctaagagtcatcatttcaaagggttatgcgtcattgatcataactgtgccaccatttgtagaaccgaaggcttctccggtggaaattgtcagggatttcgtcaacgatgtttctgcacaaggcattgttaattaattaattatagctatgatcgtatcctaccatgtttttctcttatttccttatgtcgttttttataactgttgtcgttttatgacacttgctcgtcctcaatgttgtttaatgtttctatgaatattaatgtcgttttatgaaattgttgtcgtttttatcgtaattatgaatgtccttttcgtacaaataatgtggttttcattgttctttgctttctaaacatattgtcgtcgttttcacttgcgttgtcgtttgtagaaaatgttgtcgttttcctcaaaacgttgcgcacaatctcactggagaaaagatattatgggcccgtttggcacagcttttggaaaagcta

SEQ ID NO: 306921 - DNA, 1814 bp, Cannabis indica
ttaattattgggtttatttgttaatcgttaaatttaacatacattctgttaaaccaagaaatgccgttaaatagtcacttttaatatataaagatataaatatgctcacttcaattatattacttatcaaatttttgatgtaaataattgcaagtatgaagtatacactatttaccattatataaacaaaatataatcacaaccatacatgtattaaaaatattaaatatattgcatcacatgattttaatttttacaaaattaatttaataaccatataatatataaaatcgatttatcgattaatttgtgtttttttttttaattcaatattgcttcaaatatatttacaacttaaacaacactttaaggtaggcatgcaatttttttattaattttaaaacatactatatttccttcaaaataaggataattttttttttttttcttaaagctcattatatttcagaatcaactctcctcaaagacctaattatatttcatctatatattttataaatctttacaatattgttcaaactattctatatccatttgtttcatcttttgtggcaaaattgttaaaattctcgtcttcacgcacctcattacaaatttcaaatatgttagtatcgtcttgttccaaaaaaaaaactatttctactcctccaaatatcattgtaggctctgtatactaatgttgtggcaaacacctgctaccgaaacttgaacatttatacccttttaatagaccctaggagctatcgaagaactggtcgttccagtggttttctagcctaactgctactataaaaataattatctttagtgataacttttttgtcacaacatatttttttgtaactaaatgtgatttttaagcacaataaaaagttacttgtgactaaaatataatatttagatacaaattatcactaatttacttttagtcacaataagtgttgtgacttataataacacatttagtcacaacaaaatatgatttttataactaatatttttaacccacgaacttttttatcataacgtgtgaatgataatttataattagctagtcatattttttttatttttagtcacaactcaagatatctccatgaagtaacacggtcaataatttcatcagcttgatcataaatcatgtacatgtttcatctgaaacaatgtcgaaatgtagctttctatttattatttgtaactaaaagtaagattttaatctgtcttttgtttattcataaaatttatgatagatgaatgagtgaccgaaatagctacgtacaaagaaacaagaaacatcattttgatcatgtccgttaattcaaaaaaaaattgaacattataattctccattatatagatatacgtgtgtaatactttatttttgaaagctatatatgtgtaatattaatcatgagaatacattgtgtttaatttattcaggctagcttttaagatgaagcaaaatattactttgattaatataatactatatatatgcgtgtgtataatatcaaagtcaaaccctataataactatgaaattcaagttctcattgataagaacttcttttaacagtgttcacattaccctttagtttaccaaacttaattaacttggatatatattgaccaattaggattgatttggtacagtgtattatattacattaaatttatattgtgttgttgtgacagtcagtagtcccgtgatccgtaacgggaaatatcggttaagctgtgcaatctcacaccgcctggggaaggtcaagtgggatgattctgagactgtgtagg

SEQ ID NO: 306922 - DNA, 2546 bp, Cannabis indica
tcactatatattattagctccatagggtattggttgcctttttatatatatacgtgcaaagaaagagtgtatatagtacggtttagtgtttaatatataacatgatatatgtggttgaaaaaataataataattaataacatgatttatatatatatatatatatgaatttttttgaataatgataaattttattaaattaaatcatccaaaactaaagatgtaactaccataagtaaaacatcagacaaagtacaatcaatgaaagatcgtataaatatatatatatatatatatatttatatgagtttttgggtaggagagatcatatacataaaaatatatatttatatgtatatcattaatatgcatgcgaagtttggggtggcagcacatgaatatatgcacatatatatatggaaatacgaagaataatataatcgatccatatcatagattggtgtgtatatatatatagtggggctttgctgtagagatctgtacaggtgcattgcacatcgaaacaaatattccttttccttgtgttctaattaataaatgcataataatatagccagtatatatatgcacgtgcttcttatattaatatattaatattatctactataattaattaattaattaatttcttacttcaattatgtatactatagctattagctacattaatcacttcacttatccatctaatctaataattgatagcagtaccataactgtgtctgtgtgcttcttaaatatctttcataataataatatttatatgtgatgatttttttttaattagatgaaaacgacattactatatatatttgctatatgtatattgaaagaagagaaagtgaaagcattttttccaattatgtgtttacgtacattgcattatataatatttatattctatatacatgatacatattaattattatttctatagtactattattctcatcaattattttagtgagttgactattccagcaattaatcagttgatatagatccaaaaataagtaattaattaaatagttacaactcccttaaaggaattaattaagagatcatccttttaagacatgcactagtatgatgcattgcctattgcctagttaagttaaatattataattagatgtaaatataatgcaattctcaagcatgctccctaaggcaattggatgtgaataatagatttgtcaatggatattcacataaagaaatttatatggtggggttttcttacaaagtttggaagttgcaaaaggtcatttatagtctcaagccaaccctaagaatatggtttgaaaagctctcctcaatattgcctctccttggtttcgcaagcaccaaaagtatggtttgaaaagctctttttaatattacctcttcttggtttctcctctgccaaaatagatcgctcactgctcattaaagtcacttctactagctgcttatatgttctcatttatattgatatgaaattgaagtaatttctctcattacatctctcaacatcacatttgctctcatagatctaggacaataactcaattatttttgagaattcaagtgttgtaacatacaaatggtggtacgctctctcaaaagaaatacctccaaagttaattgtgcaaggcacaactacaaggggctaaaactaacaacacaccaatgaatggtggccttagattgtctagttatgtcagtgatgttgtggttgatctaactcactattggtcaatatttggtgctttgcagtatgctaccataacttgaccaaacatagcattcagtgtcaacaaagtatgtcaattcctgcacaatcgacttcaagcacactgggttgctattaaaagaatattaaggtatctggctgacacattagattttggtttgcaccttcaagcaactccttcttttcatttataagaatactatgatgctgatcgggtagttgatcaagatgatcaaaggtctacaactagtttctgtgttttcctcagaccaaatttgatctcttggcaatccaagaagcaaccaacactcaaaatcctcaattgaagcataatttagaagtatagcagttgtaggctctaaaattacttggatttagtcacttcttttttaattaaaaaaagtccctcaaccggctattcttcatatggcgtgacaacataagttcagtaatgttggcagctaattcgatttcattctcgcacaaagcatatcgagatcgatctttactttattagggacaaggtcatgaacaaaaaggtctgtaacatccccacttcaagcctctattggaggcttatacccacagaatgatgactcttgtacacgagtacgtcactatatattatagttatttcttagaatgacgactaaccctacaaaccaaaataagtatttctatcgtgttttgtcctcactcgcacatttcttggaaaaacttcccaagatgtcacctatcttgaaattaccccagttcaagcacgcttaactgtggagttctttcatgatgggc

SEQ ID NO: 306923 - DNA, 1545 bp, Cannabis indica
acattaaattctaaaataaaataagatatatatgtaaatagtacatcatcaatctataaataggatatacatgtcattatgtaaatggtacatcatcaatcaaagggtatatatgtcaataaaactatcacttcattaagacacttttataatagtatgatatatagcaaccaaaatacaaatgacaaagagtttggttgtttgtcctaagagtaacattaatgagtgtcatgtaatttttttaattggttgatattttacacaaagttatatatgtttggtttgggttagcctaaaaaaagctaactaatcataaattatcacgtgcatgtacacatttttacatgtattttgaaagttatttccattataaaattttcatattttaaggacttcttactaatccattgtaaattgtaattatttatttttttggtaggatggaaaaaatctaaaatctactctaaagtatatagtcacaataatataatttttttttaattaaaaataacttttaatcacaatataaaaattactagtgactaacttaaatatagttattagatacaaatcattactaatttagttttaattacaataaatattataatacatttagtcaaaataatttgtaatttttgtgactaatacatttaattacggattttttaatcataactagaaatgataatttattattagtcacacaatttttacttttagacacaataaaagtaaaaaaaaattaacaataattttttaagctacatacttcaaaatttgattgatctttgtattcagttttattgtatgaatcaaagattctttttccttttggtattgttcctttaacttttccactaacaaaaaaaaaaaaaaacattagagcatacatctctaattgatgggtaaattttttatggtatatttgatcttaatattttcataacaaattaaaaatatcacaagatgtgtgatatcacttatcactatattttacacaaatcttgcactactatattaaagttctatattatctaaatatgttaattaaaaaataaattaacaacagtagactacttcaagtggttataacacgatgatatttaatatgaattattatagattaagattaaaaatatatgtgaatcgaaattgaattgaacacaaatgacacgagataattatttaggttcatgaattaagattaacctatttaacataaaataattgacccgtttatattatatttaatatattattaaattattatttatttttataaaaaatatataaattagaaaaaaaaaattacttagaaaaatataaattaaataatttatatttaatattcagaattttgtgcaatgtattgataatttgtaataaaataattaattaattaatatatattatttatttgtaacttcatatatttttatttagtctattatttaaatgaataaaataaatcgatataattataagaggagtgctaccatcaatcttttattacaacctcttagttaatttttatgcctgaaa

SEQ ID NO: 306924 - DNA, 962 bp, Cannabis indica
cgctaggaaatgactcaaatgtcgaacaaccacatcgataacgaaaggagcattaagctcatggctcacgcaggagcatcgaagggaacgaacccctaaaaacgggcctaaagccaacatcacaaagtgtaacgccacaaaggacataaggtgctcaacaccgacaaaactaaataaaataaaataaacaaaccaaataacaacaaagcataaaaccgtttgaaaaacacttccccctaacgcaaaggaggtcacacgaaggcctaagacaagacgagcaaagacaaaggaacgatgccaacttccgacgaaaaaagcttaaactctgccatcacgtggggttttgaacggtgagagtgctaggacaagggtagcacacccttttgggaaaacccgagtcccccctatacatcgacgacacttcgaaagctaaccacgagccattgtgcaccgaagccaagacgcctgaaaagaaacccatgcgacaccgagatctgaagaaaaaaggaagaaaaacaatgctttaaagcccaagctctcacctgagaagggccatcgcaactcgccgtccccaaaaacgaaagggagaaagcctagagaaacccatctttgtcgcttcccaccagtcaatgagatcagagctacccacacccaccgacctcggacttgagacacctcaaaagagacgtccatccaccttggtcagaaatcagtcgcctgaaaaatttgggcaacaaagaaccagcctcaaggagaaagaaggagggcagatgttcttccccaccgctcaccacaactgcccaacaaaggaccctctgccttcaacctgtacagcttagagccaaggtaccctaggcaccaccagtcagatctggccagcggtgcccccccaaaaaccctagaaggcaaagaaaaaacaacgaacagaggcaaaccctagtttagagagagagagagagaga

SEQ ID NO: 306925 - DNA, 1299 bp, Cannabis indica
tgtttacttgcttggattacaaacaacctacaaaaatatataagactagatattaaattgtattagtaacatcattaatatcttttagtaattctataaattaaatatttcattaacaaaaataatttttcgagtagaaaaaagaaagttcatgtgacttttgcctagctagaattagtagaatgttcactaggagctgaaaaataaaaaaaattgcgagcaacacaatgtccaatctaataaatctaataaagtataacaaaacataaagtgacattatccaagaaagctaaaagatgtttaattgtgtaattagttacctaaaggctaaaggaagatggcatatagtaactagcaactaatggcctgaataattaccagactatatatcaatttacaataccataacataacgtcaattttttttcttgatctaactcaacgctttcttaaccctaaacacctcagtatggcgggaactatgtaggtatttttaaactaaaagaatgcaaattcatcccttattaatttgcagcaaatgtatatgcatactccttaactatagtaaagtattgtaatgtccttccaaacaataacaaacaaatattattatctcatgtgaagaaatccaaaggagatgaaagagaaagagcactaaattgaacatacaaaaactagaggtccataagggaaagacatctactatgaatgcttccttgtcaaatgtcaaataactattggatattattggagcaagatagcaacattaatgaattctttagtttctactttctacatacaaaatcaaaaaagattttccctctaatcaatgtgcgcgcgtgcctctcacgtgcctccaatgtatggtaaataatagtggcaaatgctcaagcctcaagtatgtcccatgctaaaaatgattactagtccaacttcttttttttttaagtattttatgcacattgtaattatataacaaatattttattaattttttaagaattataaggaatttaaaatgtgacatttaaatattttgttccatattaaacaaacatgcaacataaataactaaattctattccaaaaattaataattggatatggtagcaaaaatataaaaagattaagagccattgtttgagaagagaaatgctaaaaaatgtattttaaagtgtctctaacactacaaaataatttgaaataattacataaggtactatttttttaaaatatttatatttttacgtttaaagaatatttttttttttacatttttacagttttctaaaaaataac

SEQ ID NO: 306926 - DNA, 1343 bp, Cannabis indica
aaaacctcctatttctcatcatgttttatataatgcatggattcgtaacaataatattattataccttggatcttgaactctatttcaaaagaaatctcctctatcattctttatgatgaatctacagccaatatatggactgatcttaaagtgagcttccatcagaggaatggatcacacgtttacaatctaaagcaaggtttgatgaactttaagcaaaatactcaatctctggggatgtatttcaccaaattgaagtccatttgggaagagctgtccaactatagacctacatgtacttacaatggttgtacctgtggtggagtgaagaaacttaaagaatttcatcacatggagtatataatatgcttccttaagggaatcactgacacttactctgaagtccgcagtagcatactcctcatggaccctcttcctgaaatcaatcgtgttttgcatcttgtgactcaagacaaaaatcaaaaagggaaaatggctgctgcaaatgaccctaattctaatatggcattttccttccaaaaggacaagaatgtgcaaaacaggaatgacaatcaaggggacaagacttatcctcctaagaaaggaaggccttttgtagtcactgtaatatacacaaccacatgattgaaaggtgttacaagatacatggttatccaccaggattcaacaaacaaaacaaacctaaggaagctactgcaaatcaggtgcaaacaggtgctaaaaccagtagctcgagtgaagaaagccatgctcttcgtccacaactaagtgcatcacaatatcagcagctacttaatttactggctaactaacaaccgaatgtgaacaaccctgatactagcacttccacaggtagtactagtgttagaattattttaccaggatcttagatctactcacaagtatgttgattaacaccctaaatatgaacttctaaaacgattataagtatacacatataaagtatgagaaaccttacattgggtgcagtgaaatcatatgtctccttccactcagatctctaacccttttatcctttctgtcacagagtattatcaagatctgagcccgaatgtccttcttgttgaattggtttcttcacaatcttccacactatgattgaggtactacttgctgtgtctgggcactactctatcactaagaggtttcgaaacaatcaaataagaaggaggaataagagtggcggctacgtttagtgagatggctcaggtttttctctgaaaggaataagatgcattgttactttccctgaagccatcactatctatttattgtatgccacatagggttaggtttgaat

SEQ ID NO: 306927 - DNA, 1610 bp, Cannabis indica
taaataaatatgtaagatcttatatttatttatatagtgtacttggggagcttttcttttttaaggttatttgtaatattacaatttcatttttttttttaattctaatcctgtatttttaacgagatgtcctaatcatttgagtaattgagttcacctaataaaattctataaattattaaaaaaaaaaacaacaagcacccccttaattccttccttttgttgtagagaaattctgttttttggtgcttaaataaaaaacacaatgtaaaacacactattctcatcgattatttcaacaatctagaattaaaaagtttcaaagaaaaaaattcttataaaattaaaagtcacagagacctaaagagaatagataatttaaggatgaaagagagaataaactaaatggcttctcttgaaacatttacatgggactaaatatacaatggcaaaggcaatacaaagttaaaaactcattagaaaaagagaatggaaaacaaaaaatgagtcgagttgagtcgatcaagctgagggttgtgttcgcaacttgttggcgacatagagaagatgactgatatttgttggtggatagttctgtaacagtttgagattcgaggtgaaatcacccgctaatagtcgcctccgaatgagaatcaacatggcgcaacatactcgcagaagggtttcctacatatatcacacacaataagaatttgtacacatagcaacattattcttacatataaacgaaatggagacatcgcaagttaaagacttggataataaaactacaagagcattgcgattaagcaccagtagtaaaatgttaggtacaacactactatcatgaggcgatttacgagtaataagtgattagtggttttttataattgaattgcactgatagcaatataacacttttaagtggtgttagacaccgatagttctagcaattcactaactatagagattgaattgtaacaaggaatagggattagggaagagagaagtcctacctgaggaccttcaggatcacttagaagggtgtcccatatatgaagactgtctgcaaagttgaattcttgggtcaagagaagagtgatccatctaaatgcataaaattgggggttgacctgtgaaataaatcattaataattagtcagcaccaatacccttaaaccatccaccatccttcactctcaaacatttgaaaacttagtaacagctcgtgttctcgaaatgtgaatccttactcctccttttacattaaaaggggattagaatgtaaatattttatacttgaaggaccgaagtgcacaaccgaggaaattttcgatggagtattctaaaacaaaactacgttttagtcgagggtgcacctcaccattgtcttaaagcattttttgattggttttctctcagaaatagaactgaaatagttgaggaaacaatatatggtccaagtagaaatgaagagctaaattaatgtaattaattgtacaaaccaactcaaaattaaatttacgcatgtcattctgaaaacgggaggttaaagatacacgaggcgtgagaaatatatgcagactcagatgatcggatcattaaaatat

SEQ ID NO: 306928 - DNA, 2143 bp, Cannabis indica
aattaattatgatttcgataatacaaattacttttataaaatgatccactttaaataaaaatatctcttgtagataatatttaatttttaaattagttatttgtaactatatattcatatttagtttatattatgttgattaagatgtacttttatgttatattttttcttttgtgtaacaatatttatgttaccttccatactatttaagaatgaatgttaactaagatttaaaaaaaatagataaaatagtaactaatcactatattagtaaccggatagtttattttttagaaatagcagaaaaatatatgcttcacacatcttgaaatatgggagaagttgatatttacccgttttttgcttgagttaaccaaaaatacctacatataagattcaattaaattatacccacttttataaggacattgtccaatatacccttacatatgctagcatattgaaccttaatgcaaagactcctgattctctactatagcaacccaacccaaaaaactatgtctcctccgccattgccagcgtccttctgctgcctccttcattgaagatgtcgacactacgactcttcaagggcaaccgcaacgaatgtaagtaacctcgaaagattttggtgattgagtttattttacaacaactttttcacttatatcgtatagaaatgtaattactgattggggcttgtttgtagtgaatttgaaacatgccaaaatatttttgattcaatgatgagagattctattaatttaattatcagaatattggatcattttttccattacaattgctcctaggccccccttccatgtttagttcgatgctgtgtacatgatactaattacaaaatgctaatttgtttttattcaaatgaattgattactgaaatataactctatctctctatcactctatcttcgttgtttctccatttctctctattgtctttctcgacagtctgcgacacgacacaacccccacagctcctcttcccttgacattaggcaccacccagctccgttatctctctccattttgtcgacgtatgaatcaccgttggagcttatagtttttaatataaaagcttgtcctttgatttacaaaaatgagatttgtgtactttttattttagtaattaattgtagtttgattcttgtatagttgtggatatttgttttatgaataaaaggtgtttgacaaaataactgagagacgggatgggtcaacatgatgttgagttgtttaagaaaatgttaaacaagggggtaaagcctaataatgtcagttttggcatgttgtgctcatgcaagtttggtggaaaaaagaaagagatgtgtaatgtgtttgcttcaatatcattgtttcataatattaaactgaagcttgaacattatgggtgtatggttgatattctttgtagaaatggaggtacaaaagaggctcatgacatgaccaaaagcatgccaataaagccaatgctactttgtggggctcgttgcttagctcttgtcgtacttaattataatgatctaaatctcgttgaaactactttgtgagcttatcaatcttgaaccatggagttttggtaattatgtacaaattgtaaggttataactttttaggatgcgcacttatcagatttaggcttatctaacagtggacagaatgacctacaaaataggttggtgacatcaagtacattttacaaggcaaggtcatgatgagtttgacactttaatactgtatgcatccaacgatgaaaaagaacatgtgaatgtttttttttttcattactcttcttgtgtatgagcaaagcaaaacaaacaagaaagtatttcttgcgcagaataaaatctatgaggatgtgagtacttagatagtaatagcacttcatggcctgcaattttggttgttctcaggctataaatatttatagctatctcatttattcttatttgttattttatatatatatgaaggtctctgcggtagcattagtggtagcattagtgaatataatattggatttcacaaactgaatgtattctttttttttttttaataagttttgaaagctttgtattaattttgaacaaatgacatcatgaatctaggacagttagtcccc

SEQ ID NO: 306929 - DNA, 2122 bp, Cannabis indica
tctagtccaccaagcctcaaaacaaaagggccttcgtgctttagactcgggattcacagtactaacataaaggggtcagtgatctgaatcacaagtgtggagcgaccgaaccactgctttaggaaaaatccttaaccaactctcgtcaaccaaagccttaatgagtgccgacttaacatgagccgaaccatctttgtggttgtcccaagtcaggttgtcaccttttatgggcatatctatcatagcatggccattaattaactcagggaaaaaactggtccttccctttggatcccacccgctcagagttactcaagacaaaattcacatctcccaagatcaaccagggcccgctaaatttgaaacaaaggttccatcatgttcaaccataatttttttttctcgtgaaagtacagaggcccataaacacaagacaacaaccagggatgatgcttaggtcagaatacacaatactcgaaatttgatttttcgatacacataagcattcgaaactaaaatccaccttccaagcaagaattaaaccccctgcattacccacaataggaacaataatattattataaaaatgtaaattctttagagtacgtaccaaaatagtagctttcacttttaattcagtgatagaaaaataaagtcaggtgctcgcgaccgaatcagggctttcaattccagatctctatagttccaagcaacgccaatcatggctcttgtggaggggatggaccatccacctccacaggggtaacgatagcatgtggcacaccgacagcaaattcctcatcctcaatcagtacaaaatcgttggccggtatcgcaatgtccatcaaacgagccttggccttccaccttgtaagtctaattgactgtcccgatgaaatcggtttgccaacatggtggataatgccagtagtgaccttagcacacacatttttcttcatttcaacgcagggtttatctgaagttctatcaaaaacacaattaaccttagcatctttaaccacagacactgggctcgatccacaagaaaaatctctgattactcttttactcttttaatggacaagcacgactttatcccaagaaaacaagtttcaaaatccaaacttcatttcttgacaggagttgttcgttcattaatttttgatgaagcttgggcgccaatgtcaacacaaaattttgccctcttattttagttagaagacccaaggttttcaaattcatggatataatcttcctgtgcttgaataaattttgataatgaccttttctcatcaaggtgctctgaaacttcttggcccaagcaagagctactcggatcacaattaaaaaatccaacattaatattgttatctttatttcttctattaattatttgacatttataataaaaggctttaatttagttagaaataattattcgttttatgatttacataaattttgtatttacaattattgagggtgagtttttaattattttggatgaataaatattttgtttattcactattgagttgagtacttgagtgttgtccctatcctatttaattgtagtgggtagtgtgagatgccgaagtcttggcgtctaccccattgatgatgtcgttttgtatattatccatatccacatgagaagagtttagaagataataatgtcgttttctatatccacaacaaaatagtttggatgataatgatgtcgttttatggaggtgtgttgtcccaagccgacagtagtaataaataattcaattgggtttagttgtgaaaaaacttgtgatacacaaggtaatggtatccatgtacggattgctttgaatgattcaataaggttgtacacaaatttttctttaccatcacagagaaaaataatacaaaatattctttaccaaccaaattttttagcaatatttgcaatcaaagtactaagtcatggctaatcggctcaaaaggttgctatcgaaggtcatctcagagtttcagagtgcgtttattcctggtaggctcattactgataatgttcttgttccatttgagattttacattatcttagaccagggccgacccaagcattttgggggcctcgtgcaaaattttaaa

SEQ ID NO: 306930 - DNA, 4200 bp, Cannabis indica
tggtgatgctctgctacagataggaatcaagggctagagatctgaacggaaggagtcattatattccactacacccaatgtaaggtttcctaaactttatatgggtttaatttcattgttttagaattcatattcggatgttaatgaaacatacatggtagtaaatctagatcctagtaaaatatttccaacactttaaacatcatgcactataccaatgcactcagtatcgctaccatactagtgttggtagtgtaaaaatcacaatatggcatgcatgtaacacacatacacataatcacatatataacatgttctatgctattcttacctcgtttctgaattcaagtgagttggccaacctgaacggaaaacctcgtgctggatggatgccctaagcaacatttatgcaaatggataaataacacgccaaaacctaattcgggaacctaaactcacaactataagttttgctatcgataactagcatgaaaatatcctaatcatcgaggaaacaataaactaaggctctaaaaaataacatgaattgacaaaatgaattttttgggaatcatacccctgatccggttgtagaaccagttcaccagcttgcacaaggtaacccaaactaatccaaacaatgcccaattcttgtccaaacctcaccaaaactttcagaacacttgcatcaacctcaaacaatattttccaggcaataatagtaagaaaaatacacagagtccaaaaataccattaatgacccaagtttgagttccaaactcagtcttgttcattctccactcaaaacaccaaaaccaaccacaattaaacaatttcattgtaaaatagacttagaaattgaaccgcaacaaattcttaacctaaacgccaataacacacaaaattgcacgatcaaaccaaaatagaatcttaaagaataagaaaataagagctctggggtttacctttagctaaaacttcctcaaatcttggtcaattccaaaaaaatggatgttagaagttggattgtttctggtttgtttgggagccgagcaagaaagagagagaaaggaaggttgtaatgctttcttgtttttctcttcttaattgataattccattaattcactaataatgttgaacaaactaaaatagctagctatccaacaaaggtaaaggaacctatccctctaatgctaaatacccaaaatgcccctttcttccattttaagtaacctttagacataggggtaaaatggttcaaaactataaccccgcctaaacccgatattctaaataattcttatatctatcccactaagaaataggttctagacttatccatgtgactctaacggccatccatcgtatttgccatcgtcatcgagcaaaaatcataaaaattgtataattcacatttagtataaataatactcttagagtttaataaaatctccagaattgagaaattataactctaatgcccatttctaaaaatgggacccacaacaatataaaatcatatataattataaaatactaataattaatgctaattgcctttactaatctataatctaacatgcagtcattacatccattctccttgtgcctctattttctcttggacaagagtaggatgttgtggtattcatgttggactcgtctttctcccatttgatttgggcccaagccttagctagtacgtcatccatagtcctgcaatgatattttgttaattctttataaaggtcagaatgtaccattaggccttttcagaaggtcgtgatcaccttgtccacgttgcatgaggttatggatactttctctgtgttgaacctagcaacataatcttgcaccgattcacccatcctttatttgatcctgtaaagattgtcatacaatttctccaatttcccgttactagcaaattgctccacaattatgtcaattaattgagcaaatgaagaaatagaattatttggtaggtttgtgtaccactagacggctggccctaccagactagaaccaaaccccttacacatataggcctctcgcaattcacgagggatggggatggtgaacattctttgcttgtaacttgctatgtcatcattagggtccgatattccgtcgtaaatcttcattaatgggaagatgaacattttttgcatctccacgagagctatagcatccatgcatagggagtctgcgaagctacttggtaagctctttttgataggtgcggggactcctgggattctatgaatcatagcttccatgccttcaagcttccatgctaccatttgtttgatcatctcctcaaaatacttagagggattagccggaagtcttgacttatccttcttgagtgcttggtacgggaatgcttccatctagaactgatgtgacttgggggtcagtcatagttttgtcacataccaaagagggtccatgtgttagagtagatccccctagtagcgatccatctgcttcagtagtcattgtagttgactgctggtgtgttgtttttgttggtggcattcctgtgaccactggacgttggcctaagtttgtcgtcggagtggaatcaatggattgcatggatggaattggaacacaaaaccttgactgagactctgtcgtactacgttgaatagactgtagtatctccacctttgattttagcagagtattctcttcttggaatgttgtattctcttcttgtaacgttctgagcctttcattggtttccctcatctgagacataacagtagctatctgggcttgaacgtcgatctctccttcttccaaatttgccatggtattagatacgtgtcccttgctcctgaatgcaaatttgttaggaccccacagtgggcgccaaattgtaaaggaaaaaatctacaatgatcggaatggaaggatcacaggcactgacaacttgtagaacaaaggaaaaaggaccgttgagatcttgggacaccgggatggtagccagccgaagggactccgacgatcaagtcagtaaataattcgaataaagaatagccgaatgtaaataaagaatatacaaaataaatatttccaccatagaatgatgggaaaggactagtaataataatattaacgtattgcgtgaattcttgagtgagtgttcaatgagtgaagatgagatgatctttcaagactcttgggttctccttttatagatcttttgatggtcaaattcaactgttctgaagaactagcgtgggaagtggccttccccttatctaggaggaaggatcgattcttataaatcaattatagagtagttcctatcctttgtaattgattagtcttgtagctactaggcgtcgtttgggtccttgaattagccaaagccaaatgtatttttgatgagtggttacatttactggcttagttttgaaggattgtaattctaattcggaatgaagtagacatttggacctggtgcaattttttggccactacatatatgttcttataaaaatttgaaaaattacgtttcaatctactatactattattgatcatccaatgtggtgtttgtagcattatcatttttaaaacatcaaattaatgtatataaatttatattaacttagcaaaagtgaaattgggaaacgatataatcttgaatatcaagagtactcattaaaagggaaattttaaaaaaatacctttttctatttttaatttataattctacaacttaaaatttttatttataaaaattaaaaaaacaattaaaaaaataatgaaaaataaacttcataaatcaactataaataaactataaaacatccaaaaacaatcagaaaaataaaatcatcataactataattcaactatgaataaactatgaacaattaaaaaaatattaattttattggaggggaatttttatgaataaaaaaatttaaagcgtaaaattaaaatttttactgcgttaatgtattttttttatagttttttcaaatttaaagtaaattttcctcaaatcaagccatgcaatataaatgaatacataatttctacaaaaatgcaagtaaattaccctatttataactttatagatagttaatgtcctttttttaaaataataaaacacatatccttttttactttttaatacctaaaatacccttcattatataaaaggtattatatgtttt

SEQ ID NO: 306931 - DNA, 2796 bp, Cannabis indica
gggattgattcatttataactgctattgaaacgtggacaatccccacatttcattatcacacatggagatatatatataataactaccaaccgcttctttatttttatccattagacgattatgctgacttagaaggttctgtctcgtcagacatgagttctccttcttgtccatcttgatggaaaaaaaaatactaagtgttagaaaataattctcgttgtatccctttattggtatattaatactgcgaggtgatcttcgcgctatgtgtgacgtaaggcagttgagtgttgtcacttttaatctgtccaaacaggtttttatcctctccttgtatatttatctgagtgtatcctgaggcaaacatatgtctcgtcaatatcagtttaatagttattattcttgtctcacataagactgcacagtcaacgagtttgaacattatctatcaaacttatatttaattgggacaaggtatttaattacatttaatgatacgtcatcattattatattctttgagtcgattcacattctttttgtcagatacgtgtcagcttgtggcacatagctgaatttcaggtataacactaatatatagtgatgctagtgggtatcagatagcatatattgctaattagattaacatatcagaaataacaatatggtgtacataaagttgcactaggatatcgttaaatatatgttaggcaatatggaaagtacgaattaatgagaccaatactagtacgactagagtatgtacttagtgaagtatggtattatggttaactgtacttagttatgtattggacgcgggtagtagacttacagtaattgggtgtatggacgcctaattacaggtcaaatttatgttgtatattttatatttttcttatggagtctatcgattcacaaatatgtgtccatgtgtaggtaaatgtgaagtgaaagatgaacaacagtaagtgacaggcttggtgaagattgtacatacccaaattgttagacttggagggttgcaatcttcaggacaatgcaagcgtagtttttgtcgtttggcaacactactgatattgtgtattttatgtatgttttgaaaaatagatattgggatcgccaatggtaaatattttgtaatcgtaatataaatttagtaaagtttcatttattattgaaattttattaaacacactttttgtttaaaatcctttaattagcaaagattagcataataaaaacacagtaacatatctaagctagtatggtattacaataactctatttcactgcaagtttaataataataataataatactaataataataattaaaaaaaaatctaaactagataattaaaaatgataataagatcctcatataaagaaatacaggtcattgtgtaaaaactttgtgcaatttttgtatatctctagaataacacttataagaaaacataaaccataatatataagtaacatatcttactttattctaatttgaaatctctataccattcaagacaaccaagatcgaatgtaaaatgggttgtttctttctttcttctttatctttaattaaaaagtatacataaattcctttactttatgatgagaacttttagtaagaatattattattccttagttgtatttgtcaaaaattagctgtatatatataatggccttaactttactagcaaccagttattaattgccccatataaaattaaaatttcttccaaccatatatgtaattgtaaatatatatttaatatatatgacactacaaaaaatttgatttttttagtcacaacaaaatttgtgactaaaaataaaaaagtcgtgactaattataaataataatttttatgttgtaacttaaacatttgtgtctataggtattagtcacaaaaatcattacaattcattatgactaaatgtatttttagctataatatagcttgttgtgattaaaactatattagtgatcacaacttgtatctacatattatctttagtcacaaaatttttatgttataaaagataattttttttgtagtgtgagaatagtataacggttctaaattatttgaagcctaaagcaacataaaatttttgaagactcttataaaagtatttttcgtatcatactaggttaaattatgtgacggtttggcgtagttgtaaaatttatttaaatgtgataaaagatcaaaagttcgaaaccctagcacttgtgtaaaacgaaaatataacttactgttacattaagagtcattattcttttagtataataatgtatgaatttacattttattatagttaagtttataattttcattaaaattttagacttcgattcagggttaatacacaagtctagtctgtcttagtccaagaccgactcaatagaataattttaaatttaattcaatttagtttaaatatttccatagcatctttttctcactccttttttttttcttctactttgtaattttgttttatcatacatatatagttaaagtgaaagagattgatgcattttaatctaccgtataaatatactaaataaataattgtttctaataatattatatgcattgtgagtgttccatatatattacacgtatattagtaagtagtaacatgtgatgcatgtttgtttataattgtattactattagaattgttattatttaattattaatttaaataataataaaaattaaatttaatacaatttaattatattttttaaatatataaaattaaattaagtttttaaatttat

SEQ ID NO: 306932 - DNA, 2705 bp, Cannabis indica
aaagttgtttttgccgtgtcccagtataaatgtaaagttttggtcaaaaagcagtatttttgtaaaattcccaataaatatgcgtccaagtccacaacaaaaattcagaatcgatcaattgatagagtttaactttgctaatcatgtcattagttcacatgaacgagaattgagcttggctgatgtcatcaattcaggtgatcaatccattagggctaatcgaaaaatctacgagtggaattcaaacaattgatgaattggacgttaggctaagccaacttcgattatttctcgcctttatcaccaagcaatataaatagatagaattgagtaagaaaaatggttaattctcgctctagctaacatactttttttattttccttttcattagaactctatcatctgatttaagcatggacgacttatttgtaagaaatctcttagtactttgatcaattctagctgcgaagaaccaaagaacctccctaagatggagaatagagaattgtagcttgtgtattattatcaagtctctttggtttaattttttgacctcaactatttttaagttaaaattttagttgtttttttctttaatatatacttatgtaggtatagtacacaaatttattaattaaattatgtgagtgttttataaaaatagtttttatgaaattgtttattagtaaaataattgtacaaaagaaaattattagcaaaataatcttttatgatgacataaacgactgtgaattatacagtgcgatcataaacgattattacaatcgtaaaataattataaatttaattaagtgaagttattttgtaaattttaatacaatttatatttgttaatttgacaaattttacaaatcattataatttaagctttgaaaagaaataattaagtatttaagctttattatttaattaattcatgaattcttggagaaataagtggaatgaatatagaacaatccagtgattgttcctgtaatatctctggcgcacattcaattcaattatgtatcgatgatttttataattataacataatagagtcaacattaatagatttaatttcctcaaaaaaaactaaaataaaatacattagatttaataaattaattaaaaacacgtaaaaatatgcgttaaggtttaatgtagattccatttagtcaacttatcataaaagctattgtatatatataatatgaagcaagagatctaacatggggcattattagttcatgcatcccaagaaaatataaataaaaactctgataacatggagtgagttgatcatcatgataatatatatgaaaaacatcatttgattaacaatagtattcatataaatatatgtatatttttttgtaaggtacatatgaagttaaatatttaaatattaacttatataattaaacaatcgctcaatttgcatgtaattttaataatggaaatgatataacaaataattaaattcggtcataatcgataaattatcgttttaatatttatatgcttccaattagtaatagtaagtcacttgttaattgttatagatctttataaatattgttttagaaaaatggaaattttcattagcaaatagacaaagtccattaattgcatatacaatttataaaacaaaatcaacaaaaataaatatatcaagctgtttataataaaaaagcgtaaatagtagcataagtacccaaaatcttaaagtttgtaagtggtataatctcaattttagcggcataagtacctttttttctaattttgtcagtacaagctctatcattttcttaaagaccacatataaggtccagattcttgaacattgggtctagacataaacatatagtatcagttacttctaaatattaaatattaacagagtctttactgacaactagaagaatattacagttttacaaacattagatacttatgccgctaaaaataaacattggatttatgccgcttacaaacttaaaactttgagtacttatgccgctatcctaataaaaataaataaaagcctaacaacttcaacaaaaatattcaataaaccactagcgattaagcatacaaaaatgtgatgtaaactaagttttcaacccaaataaatatttgacagagttcatctatggactattattgactattagcttatgatcgtccaataaaaattaagatataacaaccccattattcacatacgaaataaaagaacaatcaaacgactaactatgacgagacatctaaaaaaacataactaaatactacgaaatacagggccgccaatagacaaatttaaccaaatagaaagagacaaatatcactcatgctaaagcgaattgatccatacattgaaatatcgacgcaccacttgattagagcaaattccactatagtcccttgaacaataataaactaaatatgtatagtgatagtacctttacccacacaaaagagtctttgagtcaatccagaacacatacccatagaacactactatatggatcccataataaagtcgtgtgagaacactattattaaaagggaaatttacaaaatactggaacaactaaaaaatatcagtataacacagtgaaaaacttaacacaatatactgcaatataaaacttataaaaaatacagtaaaaaatatcgtctgatagtatttttgtaaaaa

SEQ ID NO: 306933 - DNA, 2473 bp, Cannabis indica
gagagagagagagagaggaggaaaagcttaaatgtctgataccatattagaatgtagaaagtctaaactgtattattcaataagtgaacatagtatatatatacaggggctaactcatgaggagttagcaactaacacaaccgagaaccatctgtaataacaacccaatgtaattaacctataactcactctaacaaccaatatacataacagacttttaataattaacccccttaacaacaattagtaatatataatatttaatggttttttactaaaacatagataattaataaatagattaataaaccaaattaaaatgaatacccatgtaatatagagcgcacgataatagatagtaatataacatgcagtataattactggttggtggatatttacaaaaatataactgagatatcgatcgatatatattaaatgaaatatgttgatatgtacgtattaatgctcgtacctgaggctgttgtgttgtatattatccatttttgaaatatctgtgagagatatatgaatggcttctgaccaagaaagctggttgagggaagtagctttgggattcccccaacggtaactatttggtgataagttgagaacatttttgtgagacttttgatggaaaggctgatgaaacaccatcttttgctcgtatttgatgcactttaaaacttgttctggaatcccatgattcacaacttcgaagaaaccccaattcctggcagcatcaacaatctccttcactaccacctcctcattattttttttattattattattgcagtattggtcatcacgactagtactggtctccatgaaaagatggctaagatcgatcactggtagttcatattcctcaaccatcaaattattagggttttgatgaccattgtcagtaatagagctaatggaatcttggaagatggccttgtacgtttcttgaaatggaggatcaaaatccatacgaatcaattatatatgataatatggattattgagtaatgttatgttgatctgatgaatatttgaaattatgacctagctagcttggtggtcgtcaaaggggataactataacctgtgaaaaattatagactgtgatatgtaattgctatatatatatatgtaaatattgatttgtagttgaatgaagcaagctaagtagaccttatttcagatcatggcatatcttatatgtatgatataatttataaattattgtgcttataaaagatcataaataattgaaagtaaacaaggtggattacatgcatgattttagaagtgcttaaatataactcctatgaacctactttctcattcaaaagaattcagtaaatgtcaattgaagtgattttattgacattattgggtttcgatatagtttagaaatattatgttctagacacacaaaaaggacttactgctttcatttcaatttataatatttaatcaaatataaatctgatttcatgtcaaaattttaacgtgtttttttttttcattcctatgtttgaacaactgcattttcaaattttaaggtcaaatttagtttggaagcaatgaaatagaatgacacggaaataatttatattttattactttttttagctgtatattaaagtatcgaaatagtctttcatctattttagtagaatatataattattctattttaaaatagaaaaaatagtcattccaagaaaaaatttaataattgtttttaagtttaatttaattttcatttcatttatatatttttattctcaattttattcttatattttacattcattctaaattccacctaagttgttgttggaggaaggaatttgagctttgttaaatcatttctaataattttctaagagccattctgttaatgtgtgtataatgacgtacaataaatatttgaaacttgggagggtgtggttaattttagtacaaataattagttattgttgcttaggaatgtgctatactataattttgatcaaaattacattagaaagaaaacctcttatgtatcgtgttcacatcatgatcactttcttctattgtgtgtggcgaagacatgcatggtaattttattttgttagtttaattattatttcctttatcttgtaattctacatgcatgtagcaaagacataattagattttgatcaatgccaattcatttcgctttttatttcatttaatgccagcatagatgccgtagacattagcttgtctttggtatatatttgttagtgactggatgagtaagcctcataacatgcaggtactctggtacattattctcttatttttctttctttgagatgtttccagattgtgatggtggtggtgaagcttaaactcaaacatgctcgctcagtttctattcttgatttagttgttttattgttttttatataggctgcgtttagtaacatatttttaatcaatttttagtttt

SEQ ID NO: 306934 - DNA, 1223 bp, Cannabis indica
gatgttaatgaaacatacttgttagtaaatctagatcatggtaaaatatatccaacagtccaagcttccatcaacatttaattttgactctgtgaacccatttgtttcccaccagattcatgtaagattggtatggcacaagtgtccaggtgccatttcttttgagggcacaaaattcttttgtcatcgaggcattccatttagggtcagctagggcctgttttagtgtttttggctcagcagggacagaagcagctgcaacattagtctgaattggagcattaacaactgatgtgggagtctgagatgtgctgcattgctcatgagatggtccaacatttggagactcagaagccccgatgtgtaattgattagtatgagataatgagggagtagtgaaaaaggtagtagtaggaaaggaagggggttggatggcaatacctgctgagctgtagtggacaatagagctgggaattcttcttcgttgaagacaacattcctggtgatgtaaacactgccagaactgttttcacagaggtatcctttatgttgcataaagtatccaatgaagatacatttttcagatctcactatcatcttatgagtatgatatggccttaagtaaggaaaacatgtgcacccaaaggtcttcaaaaagacataatcaggctgcttgtgatataagcattgacatggagataaattgtccaaaactggtgaaggtaatctattgattgcaaatgtagcatgttgaaatgcataacaccagtaggagagatcaagaccaaattgagccaagagtgtcatacctgtgtcatttatgtgcctgtgcttgcgttcagtccgttcatcttgctcatgatcatgaggacatggatgttgaaaatgaacaccattgttggccaagaaggaggcaagggatctgtactcacctccccaatcagattggacagatttgatggggatgtaaaatatttttcaacaagttttttgaactgtagaaatgtagagtaggcctgtgatttcagagtgagagggaatatccaagtaaacctactgaaatcatctagaaattgaatgtagtacctaaaagccttccttggaagggacatgagaaggacccccatacatcaaatatggataagttccaaggaagggaggctttgatgtgagacaagaatatggtaaccatgactcttaccaatttttacatgcatcacaaa

SEQ ID NO: 306935 - DNA, 2181 bp, Cannabis indica
tgatcgtgtatgttatagttatttagaatcactttacaatactaaaaataagatttacatattttattgcacgcatgattatttttgcgtatacatgtggtaagtggttgtttaaatattattttcggcactacaatttattcagaatcttttaaaaatttacaaatggtaaaagactcttctaattaatgtgaaaaagataaaaaatttacagaagaatcctataagctattacaacactttcctatattatatatctcctagtgattgaagaatagaaaacactgaaaatgctagttttattatgaaagaaagaaagaaagaaagaaagaaatcttattagaaatcttattaaaaaaaaaaagaaagaaagaaagaaatcacacatatttatgtactatggaagctctcatctttcggtaaaatgagaaagaaatgttcttacgcctctatgatcacttttactgcattttggttacaagttcaataccaaatcaataatttaagttttttttcatgaaaaactaatatagctagggcatgatgcttcccatgtgtcaaatatcaaatgtatatgaaaaagttacaatttgatgtgctaaatttgttgggcttgaatagtgcaagaaattacaaaaatagttcgttataaatattatacaagtacactgtcaaaatatagtgaaagaaaaagtggggaaggaaaaaataagtacacatgaaaaaggttggagaaagaccttgagttgagttgaatagatcgaattaatttatagatgtagatatatgtacaacacatcatttagatcgcaatattttttatataaaatcaaatatatagagacatattgtcgtctaagattgttataatttaactacactttaacacttaagtttgttgttgcaattaatttaagtactaaaatatctaatatataaatttttgacaatccaagtgcttatatacttcacgtcaacaatttgataatttatttttttgaactttttttttttttaaatttcaaaaataaatttatgatgatttaggcattttagtgattgaattgtaaccatattaagtacatttaccgtgaaaaaattacttaagaatttaaggaggcgtttatagtagataaaagtattggaataaataagctttataatttgaactttgaagtgtaccaatgcctcatgtttattttttttatttggaattaattgtggtgggttccacacggtgtttttagtggttaataataataagaatacttttgaaagggtgagttttagattccttattatgtgcatatcacattgttatgtacacccaaactaggatgatcattttattgaacaaaaaaaaaagttcccatattctccctaaattgttatggatatattttgtgtggttatgcaagaatttggggcttgttaaaggtggcaagttaatggtaaacactagctagctagttatgggtggtgtagcgaagaggaagaaaaataacccctaaaggtgacaaattaatggtaaactagctaataatgctttcattgtgcttcgtgtggtaataatcccctaaaggccagacactttgtcccacaaaatgtgagataccattccaataatatatataacttgattgttatggtacaatcatacaagaatttatgacccttttatgctttttaatgacccacgtacaccatgcaagatccatacttgaaaattaatgatagcctttagcttcacatatcatcatcatcatcatcatcatcatcattatttattattattattattattattattattattatagccttgatgtttttcttttcttgtaatttttattaattcataaaacaagaaaagaaaaattcaagctcactttattatgatccattgtttgataatataataagtatatagtaaaataatgatataaatatattattatatgaataatatatattacgtattgataaaaataaaagagaaattacaatggaaaaataaaataagatgaataaaagactaagaccaattaaaactctaagcaaatattacaaagacaatacattaaataaagtgttacaatctcaaagcacaaaataacaaataaaaaaaagaagttacaactcaaaactacaaaataacaagtaaatataaactatataaaa

SEQ ID NO: 306936 - DNA, 1946 bp, Cannabis indica
atcacaaaattaattatttattttatttccttaaatagaaatgttctaatatatgtgtgatgaaattttataaatggtgtgacgtcaaagtatgagactaaaggaacttagagaggaaaggaagtgacctctcacctaagtctataactatgtatatataggcgtagggttaggttgtgactccttacaagtctaggtatctcactcaaaatcccgcatgcaaattatttaccgagatttttggaaaacaaattataagaaattagaactaaaaaaaataattaaaagaatgaaagaaacagaacaaacacttagagtttttacgtagttagggtgttgccaagccttagtccacgagtcggtgctattatgaatttaagctagaataatatttcggaatatgttctctatttttgcatgagcaactattgcaagagattcaacccttaatctaaataaattctttgatatttagagtgtttacaagaattatacttagtttctcttttccctttaatggggagtttacatgaaaatacacaatgtatggatgtttcgtgaggcacaacccatgtagggatcgatgtgctgactaggcagataggatatgattaagttgtcaatacgtgtcgtataattgtggtaactaattatgaattaattacttgatctccattttagggaattttcctttttagcttcacacgatcttccatttgaggtttaagaagaattcattccttattcggtgtgcttgaataaaaagagaaactagactagtcttctaggaacacactatttggccttccgagatcgtagtactggaattgcttctggatttgggctatccttggcggaagctcgtctagacatgaagctaaggtatttttctaaaaggtcttgtctgacttgggcttgacccaaattatcttatttggatccactagtgggctttagatgctgacttgaaatccacgtgttccttgccagaaatgagcataacatttaccccaagcttccagaatgttgcgtattgtggaagcttgccccaatccatatgagtggacatgtggaggtttaaatgtaacatttttattactttgcaagtgttaattggtcatggaaggtgaacttctatcctcagtgtttgtgggttcacgtggcagtcatctggtagatgaagagcacgtctactgaagagttgctttctaggaaagatttttattttgacagctattcattgttggcacaaaaatcgagaatattattttcattattgatttgcgcctcaattccaaagactattaattgattgacacgcttggattttggacttctaagtcgttggatgtgtttgtgctcttggaagtacgatcttggatccttcattctttttcacgtggatagccaccttgggtataaatacccttgaaagatataatctaccacttttccccaattttagatttttaatcatttgacttcaaatttccttgagaaaaaaacatagtgagaagttctagcagtgaatgaccccagccttcaacgatcttcttcaaattgccttttgcctgagaaatcgtcactttccaaatcatccacccccagtgattaattatttccaaaggagtaaagtggcgaacgttgattttaactctgaaattgactcactaatcgccctagccaaccttattaatgtaaggtttgattgtttgcctctacttgaactggggaagattagtttggtgtcgtcaattccataaacatatatgcatatgttcactttctcacctttaattctgcttttaaatccattgtggaatgtagaatttcctgttgggttttatgccctaaataaaactccattttaatgtaatccattttatttaacatcaataaagaaacagaagtatttttcattcatttgtgtatgttttggttcatct

SEQ ID NO: 306937 - DNA, 1315 bp, Cannabis indica
ggtgttagggttgattccggcactgactgagcttcttagcacaacagcaatgcccatgactccgagctcattcttattattattagttttcttttgttatttggttttgaaaaactaagttgatacagtgttgttggtcgacagtggtggttttagtgggtggttgtggtgatagtggtggtcatgataatggtggttggttatgatgacggtgttgtgggatgaggaacacagggaagaagaagaagaaagaaaaagaaaaaaaaagtaaaataataattattatttaaaattattttttctcatttttaattatctttataataattaaataaataaaatgatgtgaactaatgaaatcatgtcacgtgtagaacgtggcaggcatatctggtatttaatagccaaaattaatggaatgagtagagagcaaaacgattcggtagttgggaagttcctaaccccaaaagttttagtaaggggattgatcgtgccaaactctgtagtcaagggagtttgactgcaaattaaccaaaaataaattataaatatataaatgtaaacattccctgttttatccctactagttagtttataatttcattgttatactcacatattttttatttttatcgacacacaatattcttttgacaaatataaataaataaatcaaatggaagtcaccccatttagaaataccactagctctgccactaaccctaacttgttattaattatatagaaaaatttcgcactccgtgcttaatattctcctttacaaaactttctctaaatacacctcaatttcacttaacccccaaaatacccctcccattcagtaacctaactctcacactctcccccgcttctctcactcacctcaccatcaaactaccaccatcgaccaccataaaccaccacacccaccacaatccagaacatccttcttcctcaaactacccctgattgccctcgtctccccctctttcttttttcttcatttgaatcccacgaactgcccgaatcctactcacccaccaaaatttgagaagggcttggtgttttagcaagggagttgacgtaccttgaaagactcgtgaatccaacacagattaaatcccattaaggtttgatgtttttgtgatttttcttggattagattttgtaaatagaataatgtgtttggattattttttatcgttgagtttaagataacttttttgattttatgtgttatagtgagatttctctcacctagaaactcgagaccggacccctctttaaaaggacacgtgtattcagattcccaatg

SEQ ID NO: 306938 - DNA, 2379 bp, Cannabis indica
tttttttttatgcaatattattatatatattattgttattataaaacaaaaatgatcacagtatgtcttcataatatataaataaaaagggaataaaacgtgcataagtacttttttttttcaacattgcatagtacatagtacgcacactgagtatagtacgtgcatttagtctttacatgtatacatattaatttattattattttaagacaaagtgcccacagtatgtgtacatcttattttaaataaggggaataaaatgtacatagtacgttttttcgtctatatataatatacatttttcttttgggtgctaatcatttttattattgttaattaatgacataatgcttgaataatttaataattaaaaattgggatatatttagaaagatggctaataaaattttcaatattattgaacaataatgacgatccagtacttttctcatcttgtttagcctcattaaattaatgagcatgctaaaattattatatatggcttactctacttactaaaccaatccttaattaaaataatgaaactccataattaacaaatccatttaaaaaataaataaaaaattgaacactggtaacaaaaaaaactgaataagataattgttgcttcgtaatatattgggtcacctttcatcatcttgcccaaaatgacataataatttagtttttttcttttttttttttgaagagaagtgtaataatgacataatatatttttttttgaataaattacataataattttgttagatgacaaaaataaaaatatttttatacatcactatcttccacaatttgtggtgttttgttttgtttttgtttttttaccaaaataagaaaaatcttttaatatatattcagttttataggggccttttatatatagaaagatttacatttataaatacattaaattaagcttaaccacagtgagtaatgagtattattgcggcaaatcttaaagagttatttcactaatcaaatgcatttaaacttatgaaacatccaaaccgaaaaacgaaaaaaaaaaacgatagtgaagtttaccataaaatcactctacctaataaagaaatagtaaatcatatcattttaactaattaaatgtacaatagtaaataatagggtaaataacagcataagtactcaaagttttaagtttgtaagcagcataaacccaatgtttatttttagcgacataagtacccaatatttataaaactgtaatttttcttcagttttgtccgtacagactttgttttaaatttattgaaataacatttagaaataactgatactacatgtttctgtctagacccaatgattaaaaatctagaccttgtcgtatgtttaagaaaataacaacacgtttgtacggacgaaattagagaaaatttacaattttacaaacattgagtacttatgccgctaaaaataaatattgggttatgccgcctacaaacttaaaattttagatacttataccgctatttacttaaataatataaagaaaatgccaatgtcaaaaccaaacatgagtacacttaaaacagcatgtcgttttggagaatatattacatcatcaaccagtcaatatagatgtagatatatatcagccaaaaagagtggactcatataattatatattgaaggacatcatagatgtatttaactgttatatattaatttcaagctagcgactcctctgaaaacaaacaatactgttcaggattatgtctctactaaagataaagtcctgagatgacaatattaaatttaagaaataattggaccctatgcaaaatgaactttattttaagtttaccaagtaatataataatatgaggtgcaacttcatgattttaatatatgaattgctgcactttcatttattttttctatgatgatgtttattgtatagttagtttattaagatattttataaaattttgaaaaatttaaaataatttataatacagaaaaaaaaagttcaaacaatttatttaacacatttataaaataatgtaacaaactaagtgtaaatattattttgaatgtaaattttttttaactacatgacacactgttatattatttgaatatcgaaaatacgaaaaaatatacattagtgcattagggagtgttatactaatataaaaaggtagagtaacattataaatctatgtatatatatatatatatatgcttaatgggtactactcatgaataggtaaaattagaaaattttgagtttttatggttaatttctctatctaattaaaaaatttctctttttaattatctcatatgagctgagattgtgccatcggtaaaaaaaaattaaaaaaagtttttta

SEQ ID NO: 306939 - DNA, 956 bp, Cannabis indica
tattgatcatctttataatatgatttatgtctttaattagtaaacggtaagtttgataaaggcattattattcatatcggcctgtccttgttatgcataatctcaattatatacaacatcttcacttagatgtcatactatctaagattatttacaccgaaaaatggacataagtgaataatactaacaaccattatttaaagattctcaaactttaatattacgaatactaaacaggcagataataatcaacaattaaacctaaattacaatagttcggcacgaataaaaacacattacacacatacgtacgtataaaataacaaacgcggatgatggaaaggcatagcattaattcctcctttatcttcaattcgtgtcatcatcatctaattttcttgcaatctcttttgtaagtgttctcttttgaacaatattcatcaaccttcactataattcctgccttcgtcaggcagtacgcttggccacgctttacatttccacagggctgtaccggtgcgtccgcattgcctgatccgccagtttttgttttaggatgatcaaccaaaattcggctgacgtgagaatccatcaaaaactccaactccaaatcctccgcaatgaggcagttgtcgtcagcggcgccaccgttgaggcagtacctatcataagtgacatttctctgcagaagcacagctgcctcacaacagttcttaattgtgctcgtcatcatgagcactactactactatcgccgccgcggccgttggcattgttggccgaggaaaacgaaatgatgatgatgatgaagacattatgcttcccccctttctactttctgtactagtactgtaaaacaccaacattattaatgtgtttactatgtcctctctctctctcttatcccaacttatataatggtttgtgggagagtaaagcataataaagaggtcaatt

SEQ ID NO: 306940 - DNA, 1522 bp, Cannabis indica
aaaaaaaatatattttaaaaaataaaacacaaatttaagcccgaaacataaaaaatagaatggttgtttaagaaatacggaccgacacgagcaaagtatggcaggaatccgagtatgacacgaaaatatcgggcctagggactatgctaggccaaaaatattgatacgatatagaacgatccgtattttttatagtacagcacaatacgacctaatttttaaaaaacataaataaatacgagccgaaccaactagcacgacacgtacgaacttacaacaataactagatgtatgcgtactggagccactcacttgttgtccttgatgtttattagattatataaaactgtctgtaaacctcatgggtatttgtaacaacaaaatataatgtattttttcaagtaattgctatatatatatatgtatatgctatatctaggtggacctgagttttaatcagagaaagcaggtttcttgaatggctcaaaactcattaagagccctcctctctaactagctttaataactctttttgttttgtttttgttgagagtttaatttaagaaagtatatacaatagatggatcgtacaagattgatttcatttccaacgttttctctgctacttatctgtctcaaccacaaccatacatatacattatatatataggataattctacggggcttacatcattccttatggtatacggctcaaattgtgatccatagattagaataaaaaatgagtatccatgtaactcttgtgaagactcgcatttaattttttttgctctttttttcattattgttttttttttctttttgaggaaagtactgatatcagtttgttattcaattaagctaattgtttacgtatgttttttggttttcggaaatattttccaaattaaagctgcctaagtaaggtcgtcgtctcttgtctctcagtctgtatcgacaggttcaacaatgacgtagctaactctagcctccaacagcagcagattctatttttctcaacgagggcagctgcaagatctctctccatacaactttaacaaagagaatgggcagagagtctatacaaaatcactactagaaaatagacaatattgagataaatgataaaataaaggaatattttatcatttattagaatatttttatgtatggaatatttttaactcaattttattagaatatttttatgtatgtaataaaataaaggaattgggtgatattttatatatgagcattgctattaggtactagtggtgtctaatacttttgcgatatgtcacgttgcgattggctagcgatactccttaaaagctattatattaaattacatgagacccaatactaagttggaccaatagcgatattgacacataggaaggtgctaggcaccactaatgccctttagcatttctctttatatatggtctgatttcaatattcattacacgatttgattttctgaattaattgtcaaaatattctgataattaatgtagcgca

SEQ ID NO: 306941 - DNA, 2240 bp, Cannabis indica
ttatgttttttgtgacacaaattaattgtttgtttcctgagaaaaacctacccctgaagatctatatgttggcctcttaatattattcaactacatacagactaaaatatgatatatttcattacatatatattatatttgatgtaggcatgaaatgaagcactacaagtaaacaaaactttatatatatatatatatatatgtgtgtgtgtgaaagatgaatattaaactataggcatatatatatatatatatatgtgaacaatgatatatgaatgggaaataaatagatattgaacatatatgtagtgtagagaggatccaatatctcattttttatgcatgcaaattctcattatatgcaaaataaaagaaaaaatgaattagtgggttatggatcttctaagctctcactaaggatgcacatggaggaaggaattagtgaagagtgtttattttgtccttattctcattaagaattttaatcctcgtcttcgtttattctttatcgggaatgagacaggccaagaaatctcttaatggaagcgagaacagggcgaaaaatttcctaataaaaaataaaatttataataaaaatttaaacatataaaaatattaaactacataaaaattaaaatattacacattaattattatttaataaactaattattatctaaaatacaacttaaaattcataaaaataatattaatatattaaaatcatgcaaatataattataaattataaaatattattagaaatataaaataaaatactaaatagatcctgtaggagcaaagagtgtaattcctgtcccaatcccgtttaacatttgaggacaaaaagtaatccccgtccctgtctcattcctcatttagatgaaaaaatctgtctcattaggggtaggtcctcgcggccccatttctgcagggaaaatatgaatcacttactctatttagagaccaataacctatatttatataggtgagagattttctattaaatttttttaattaattatgagaatatttgataattaattaaaatatataatttggacaactaaattaaataaaattggtaacaaaaaatattgactgtattatatattaaaattaataatattaaaaattctaatattacgtaaaaaaaaattccaccaatatatacatagaccatctatatatttttaaaatatttcggtttgttactaaaaaaaaaaatagtttgaatttgacctttttttatcattcagttaagatatgggacaaaatacacattaattaattttttaatttgataaatttaatcacacctaatacaacaaatatctaattattcaaattttatcataaaattaagacttaataactattaattagtataatatactaattatacataacaaattttgaaattactcaaatgtggaacaaataacatgtatttttttagaataattatataaaatataattttttgtaaatttatatttttacggcattttataaaaataacataaaaataatattaaaacaacataaaaaataatatacagataacaaaaaattaacaacaaaataacaaaattaaaacataaagatacaccaaaagatttatataaaatttgaaaaaccgtaaaaatgttaaaactttcgtacatactgtattttgtatttttttttattatattttgtattttcttttattatttttgtattttcttttgaaattatcctttttcttattattgtttttaggtattgagtctaaaaatgttcacaatattgattatatgatcgtacatttaatcttgtaatttacaaaatatattctaaagctccataagtgtgccacatgttagcacaatatttgtcttccactacaaaaaaaatattacttttagtcacaataaaaatttgtgactaaaaaataaaaaatattataactaattataaattatcatttttatattattataaaaaaatttgttatatgtgtgttatactatttatcaataaatataaatgtgtagaataaaatacatgtaaacaaactaatatggaaacatatgacattatatattatgtgtcatcattttgtaatatttggaggagttgttactatgagtaacttccaccattatcaccaactttaaagagtgtaaaaaggtgttactacatctttatttgaaaattcttaaatggtataggagttatggtgtgcatgagttacat

SEQ ID NO: 306942 - DNA, 2632 bp, Cannabis indica
gggttctaccaacagagaaatcatccccaacaaaatcaacaacagtcataataaaggttctagtggagggtctaatcttcaaacagatttgttacttcagttcatgacagagactagaccatccattaaagccttagaaactcagatggggtaattggctactccaatggctactcgccctcaaggtaacttgcctaacactagaggtgaacccaaaggaaaagtgtaaggcaattactttgagaagtgagaaaaagtatgaggggcctagtgagaaacaacaagtggaagaagtggttcatgatcaataggcacagacattagaagagaagaagactactgagagtcttacattaaaagaagcttcaccacctgtcagcatagagcaccatgtaaaaattccttatccgtagcggttctgcaagaccatcatggacaagcagttttcaaaatttctgtaagtattcaataagctgcacattaacatcccatttgcggagactttggaaaaaatgctaagctatgtcaagttcatgaaggaaatcctgtccaagaagaaaaaaagggaggattacaagatagtggcattaactggagagtgtggtgcgatattgcagaagaaactccctcccaaacttagaaatcctaggagttttaccataccatgtactattggaaggatagaagggatgaatgctttttatgatttgggggaaagtatcaacttgatgtcgttatcggtgtttagaagattgaaattcagagatgcaaagcctacaagtgtaaccttgcaaatagctgaccgctcgttggctcatccaaggggggttatcaaagatgttcttgtcaaggtagataagtttatttttctagaaaacttcattattcttgacatagaaaaagatagaaacgtacccattatccttaggagaccattcttggcaacaagccaagcattgatagatgttcagaaaggcgagttgaagctaagggtgcagaggaagaggtggttttcaatgttcttaaggcaatgacttacccaaaggctagtgaaaataatttttcagctgatctcacggacacaatagtggacaagaagaagttgatagaggattcgttagaagtaagtttaactgaagaggatgtgaatgagcaagatggaagtgaggtgatggaatatgcaaaatggcttgactcctatgggccattgaatagaaaatattttgatgagttgggggtcgcttcgctaagacctcatcactaacttgttggagtctcggatcaagcgcaactctttcagctcgactgacattttggcattggactcaaggtccacctcatgaagcttttgcatgtcagttggcttggagggtctcgatctccaacttgagtttgaatagatatgtatccttctaaagaccaacttgtttagtcgttaacagttgtacttggcagtcctagtaccctttcaaatggttctccgaatcagtgactctctttgcatccctttcccttagggtcctatcagctaggacgttgtccttcaggtcttccacttctttcttagcctttctcaactccatcagtgtctcctctgccccttaagatcctgtagttgttgcatctctgatctatcaagttcttcgaaagactaccagtctaaaaaataggaaaaatgtgtaaacatccatgaaaacgccaaaaaatgagtaaaaaggtaaggtagataaacatgactcattgaggccattatcaaactcaaatcctgagcttgatagacagtattcgttgaagcacatgcattaaacctattcacaagtagctgaactaactcagctgcaaagttgctcacgatcttagaggaaaacagagccagaagacccaacatagttggagaaccaatcaatcatgaggtccaagttcaaagtcaatacttccccagtatactccccgtagagagttgcatcatgatgttcaattatccaatgctttaggacatcagcctccgcagaccctttagtttgcgcgtccacgacaaagttgtactaggccagatgaagcgaagcatgttttgggtccagaaggatcatagtcaatgagattgggggtacacttgggaatttcccaactttggaaggaatgcttgtgagtaccctgagagggagtcttgatagttttggccctctttgaagaagactctgaaagagccctctctttcctctttcctctcttagaaatcaacggggttatctccccctcctcaagcacaaacacctcaaagtcctttaaactaaccttagcgagtcctcctgaggtcaccacaaagtttggggcagctgcagtcggtgtcgcgacacgttcctcggggccaacatcaatcaagtccatcatggcaaaggtcttgtccaacggaggaactacaaaacacaatcatttcatctagtataaggcagtagtagacaatgcacataatcacgacaaagttagacaagcaacaaaggttgtggaggggactaatcctacccctaggggtgttcattggatcacatctaatatttttaggcctatccagatctgatctaatcatatattggatgttagattttaccatccgatctgatccaatcaattt

SEQ ID NO: 306943 - DNA, 2689 bp, Cannabis indica
aataataataataaagtaaagaatgggaatccaatgtatgaaagaaaggtagtaaacatgtacacatgggcagaaaaaggaatcctaagaatatcaaaccataataaaaagattctaattttaatttgaattaaggttttttttttttttttaaaccatgcaccaccaatccatttacatcgaatttcgttccccttttgtaaatttgattttcccaaattaagccctcttctctctactcctatttgctgtttgacttttgttcttacgcggtttcagcttagccttttattttatttatttaatttttaatattattttattttatgtttgggtttgtgaacccaaccagggtttatcctgcccgaactgcccgatgattttagcgggaacacgaaaaccctaattgtttggcgccaaaattgaaattttgtataatgtagcccgcaaaatgcggggctctgacggctgtctcgtacacgcaattaacaatccgaatcagcaaatgggtatccgatgatgatgatgatgcagcgtacgctaaaactaaaacgaggaataacaaaatataatgacaagtcactggattaatcctatgctcctctacctttaatttttacctcgtaattaataattagttgtaagtaaataccttttaattttgtattccacttttaactatcacattcacattcactaccactacctaagttaacaaattggtagaatatcttaccaaaatttattatcttaatagttgatttacatattattattattatgggaaactttgggtaaatcttgtaaaatgggctaaattttacaaaaatataaaaacacggaaaatttaatatttatacaattttgatttgatttataatatttatgtgtataagtcaaatagtactaaactttctcaaattcaacaaccacaatcgacaaacactaatcaatcacagaacagtcaaaaaattcactataattctttttggcggtcagccaaaatagttaagatatccttaatgaccctataataccttatactcacaagtgataactttagaattagtaatgctcaaaacgtatgtatttaagacccaaatcctgaaacaataacataaagattaactaaaacaagagtataactacaaaaacaaaacaaccaaaaaaattacaaaaaaaatactatacctcaataattccttttccaatggggacttccatatcatcatgaaagagaaccttctacttggaaaatattcccttaccctaaataaatttaaagttaaattacggcataaatacttaatgttttagattttatatacttaaatactttatctttattattggaggcaaaaatactcaatattacagttctcttacacccgttactactattggtgttaactcataaatatagacacgtgaaaagcccaaatacattaaatttatttattttttattttaaaacttaatatttttaatatcataaattaaattttaaaaacttaacaatataagaaataaaaactcacaatttgagttgaaaccacatttatttcttttaacattgcattatattcttgacaatatttgcaacaacaacaatgataaattccaagacaaacaaaatgcagaagcaaaaaaaaaatgagacattttttgaaagattattcccacagaaggggacaaacaaaaaatagaatgtacaaaattaagcaataatcatgaggtaaaattaacgaaatttaggcttgtaatggatcttctccttggactaatgtgtgtccaggaagtcctttgaactcacactaccccacatttataagcttcaagagctttgaatctcagaatatttcacatgtcaccggagttacaatgagagcttcgacagttgatctatgtcaattgctaagcgagttcctatgagatgattcagaatatgcatctctcatcgtttgagcttgtgggtttctccagaggatagctggagaatcatttcgtcttcaacctccaggtgttgaggtttccccggacgacaacaaccaggtaatttcttcttctaccttcattacgcctctaatgattttttcaaaagattttctttaaactagtttgggtattcccttgtgaccattttttcagggaatttctacaaatcaatttgagtagagatgggagaaggtggtatcgacgcaaagtctgatgttttttttttaaacaagagtcgcatttgattttggttttaagaaatgagttttattatttaattttagattactaatatctttaagtttttaaattttagtttttgatattaacaatattaagttctaaaaaaaaaaggtaaatgtaatgcatttgagccctccatgtgtccatatttatgagctaacagaagtggtagtaacatatgtaagagaagtgtaacattatgtatttttgcctctaaaataagattaggtatttaagtgtgtaaaaaggtatttatgccgcaaattaccataaatttaaaaacaattcagattaacaacaaaagaacagtaaaaaatataaaaattaagtatataatactaaatatcaaatagtaggggtgttcgcggtgcgggtggtgtagtttttgacaatttttcaaactaatctgcacatgcggtttttctaatttctcaaaccgcacccgcaccac

SEQ ID NO: 306944 - DNA, 2040 bp, Cannabis indica
atttcattgcctaggatatctcataggtccaccactacttctagagggtgccgacttactcatgctccatccctactctccggatgagggatagagctaattatatcctttccctccgtattgagaggagaaatatattaaggttggcttgtgaggccaacttttggaaatatggtttgtaccctcccgagtctggtgttaagggagctgagggcccaactagaggcccaaatgatgtcccgacagtagaggagactttcccaggaggtgagcatacaccctatctagatgataaaatccccctctccaggcttgcgaggatcgtggagaagagagagaaggccctccaccagtgcttggcacgcggaggcaccccaagtgatcctgctctgtcgaataggcctagaggccaaggttttgcaaggcctactcgtcccctacctgcttccagaggcaacggaaaggctactattagtgatagcagttcagatgattcttcctccgaggatgatggcatttgataataccaactttttgctttttcttgcattaagtacttgtaacttgtattctaactttgttactttcttttgttagatatggcttccagattgatggatcttgctgcagagccttcaggtagagcttcttcaggttgtcccaaggccaaggtggcccaaattaccagatctagtgatgccataaggtgcccactgcctctccctcctccggggcctactccagttgatcagttgatgatcatagatcctcccctgagaaagacttcatccttatccagatctttgggaaaaaggggtctaggagtctggctgggggacctattcaaccaccagacagaggattgctgaagttgctcgtagttacattagtaggaccctacccatccttgacaaggagctctaggagctacatgatgaggagctagagtgtctgacatctagtgagctttaagacttgacatttataagttgtgtatttgattttacttaaatttttgcactgattgggatggccgaccaggtacaaaccactagaaggctgcccagccagggttgcattaacgaaaagctggctggccagaagtgcaccactcagggtttggccggccaggtcctcttctgccactagcttggttttttcttcagatttcaggccatgttaaacttcagccttacccatggtagagccaatggctcttctggtgctcaccgagagaagctaaaggccaaggaatctgagcttcagatggagaagggagcacttatctagacacaagattatctaaaaaagacataggatctaaacaatagtctggagcactttcttggtattaggaaccaagtgaccaaccttgctgctgaggcctccaagttaggaatgaagcttgggaacaaggaccaggcattgcaacttgctcttgatggctaacaagcttgggaacaaggaccaggcattgaacctgcctttcttcccattaccctgtctgtttccactgtttaacctttttccaccttgattagaactgctaggattttatgaattttggtctagctggacagatgtattggctgcagtggtgtgctattgagttttattttgtccaactgtatccacacgctgtactgcttcttagagcttaataaatcatctgcttgtccagggattctgccatcgattccacagttagccttttttatatctttccataactctcttatgggttcaatacctcccaagattgcaactagccttccttctttagtcagcccatttacctttgttgcttcagtcatgaacctactgatgtaagctcttaaaggttctcctggtatttgctttacttctacaaggtcttctaaatgagagggaagctaacgagaagaggaaaattctgcatggaattcaaatgagaaagaaatctgtgaactgaatttccctggagctagtttgaagtaccactgttgggcggcctctgctaatgtagctgggaagattctactgttgggttttgtgccttaa

SEQ ID NO: 306945 - DNA, 996 bp, Cannabis indica
aatacatgtatatatataaggactacgcaatataatccatattagacaaaaataaactataaaaattatgtatgtaaacatattatgagaattgtagtaaatctaaaagaatataaaaaaaattacatgcagtatccaatatggtgtcgaaagaaagataagatcaacgtaggaaataaaaattagtaccgagaaatatcaaattaaaaccgtatgttcttcgaacgtcttctctacaatagtcaaaatctgctttaagattgttatatacaaaatatataaaataaagagatatataaagacaataatatattaatttattaatcaaagaataaaaggataaatagaaattaataattgaaaggaaaattaaggcccgtaaaacatactttacttaaaacagatttgcttcctctatctaatttggtattagaggatacatgagcaactacttcctaagatacaacgattaacaagtagacaaatacactatttttactactccagcaaacttgagttaatatcttcactctatcaccttaagaattacaagaaagacaaaaaagagaagatagtttttgagtgtaatacttcttttggtgtgtttaaaatgaaaagtgaaacttccttttataggcatcatatgggggtagaataccaagtgtgaaaaaaaattaatgccaaaaatcccacaaaattagtgatattgatcaatcacaatatttactataatgtctaatatcaattggaatattcaccatggtgattacatccttcttcaaatttgtatgtattagcagttatcaatagatcacatctaaggtatcaattttttatccacacattagcctaaattgactatttattatatattaaatataacttttctaacaaatataatatttgagaagcaatagtcttataaaaaaaataatctgttataaatattattaattatgtggatgtctaaatcttttatttattaccattaatgta

SEQ ID NO: 306946 - DNA, 850 bp, Cannabis indica
aaaggtgaatgattttgcatttcttcatttgacctctaaaatgccattaatgccaaatttaaagcgtggacatagcggatcctttagtaccaatgttactattattaaaaaagcaatagaatctatctcgagggcaatatcacttgttgctaatattacctcatagattgaaaatgataggaaaatattgttattattgttattcctataatcatatgatatgcgtactttttcaatcatatttatttaaattgttaaagaacaaaaaaaactatatataaaagcaatgctattacatttcaaaaaagaaaaaagaaaaaaaagagcaatactatattgtgtcaatgaacgttacatgcgttcaatatttattaacggatttaacaaataaccgaccaaaatttgtggtgccttaattttttaaaaatttcaaaccaaattgatattttcagatcaaataaccttctgactccatccttataatctagttggaagtgcctacattagtgccaaccaccatatagttttcgatattggaccaccacaaagtgcagtgcgccatacatataaaaaaaatcactagttttgttgttatatatttctccaaattaacgagtggttgacttactattaatttgtatgaatagttactaattaaatgatgacgattgagtataagcaataacatttggcaacgcatacacattggacaaaatcctcattttagagataccaacggaaatagtgaagcatggatatacttaagtagtgttacataataattatgcaatattacgtttctttccatcaagtaatcgtaacttctaattgtttttaattagtggtgtat

SEQ ID NO: 306947 - DNA, 1642 bp, Cannabis indica
atgtcatacaaacaagactaaaatatttaaaactatgtcatagaaataagactaatcgtaatagaaaaatcgaatcacaatagcaaaacataaccccaaccaagctgtacctatgcccagagaaggtcggcgagcttggtcgaagaaaaaagatgattgcctgcagctataaatttagaaatgaaaaactctaattttttaaattaatttacaattctataatattgatttacttttaacatttagtctcaaatatacggttaaaagaaaaacctttaggaaagtaattcttactatcaaacttcatttataacacaataagtttaccatttattcaagtgaaaattaaaaaaagttttagcagttaaactctttcaactattgttttacttgcacttaaccctccagacttaaattttggtggtaaaacctttaaactactgaactgttagcaaatttaaattgttatccggttaactgtcactatggactgcttatgtatacatttttgtacatataaacacatttatattgatacacctaataatactatttcaaaattttattttaaaattaaataatattataaaaaaatatattatagattttaaaataatctttataaattttaattaacataaacagtccatattaattgttaacaatgaaaaataaatgacacattaaatttgttaaccgtttagtagtttagagagttttattaacaaaatttaagcttggaagagcaagttataaaataatagttgaaatggtttaaccgcaaaaaaactcaattaaaaattataaaaaagaaaatctttgttttcaaaatatatggaaaactcatttttagcctatttttctttttcccccatgggtaagccatcaaaagaacaactatttccaccactacaattcattgattcccacatcattgggatacttaacaatatgttttttttaaaagattgtaatttccattaattatacagaaacaaattacaacttagaaacttgtagataacaattccataccatctctccatctcgtcattaggtcttcctagccatcttatatgctaaagtgattagcttgtctaggagcatcagtaatttatgtcttggattacattagagcataaaaatctttgtaattatgtaagaccctatctacaaaaattttacagccaaattcaacgcttgctaatggcaatcttattattctaaaaaaaatgtcttaaaaataataaaaggctattctgatgatatttctcattgcactaggtttaaaaattgtcgtaatagagtagttgggacgacaatcattgcaataacctcatcagggccggccctatgtaatattggaccttatgcatacatctgaacaagatctctcttcaaattttcgagtcggagataagtttctatctttttttattttatctattatattattattattattattattattatatgttctaattattattttttttttctttggttttgtagggaagttcgcagattagcagaagctaaacttatgtagctttagtggttgcactgtattgatctcttgcattaggctacctaatacatcttttgaggctagttgattattttctaggagatccttctt

SEQ ID NO: 306948 - DNA, 1721 bp, Cannabis indica
gtacatgaatataaaaaaaaattaaaaaaaatttactggatgccgaaataattaaaaagtatatcagtacttcccttttaaagaggtttattatagaatcaccataattcattttatttgcaattgtatttgcctaacgtgatctttatcaaaaattatcattgcaagttttgtcatttatattttctagtattgtattcttctcacaacaaagtaaaactatttaattcaaaattttcccctataaatagtctagaaacatagttaagaatccatacaataacatcatttcaaacatgatgatgataggagaaacttcaaaaaagttagccctttctttcattctcttcctcatattgatcattgtattatcatctcaatctaccttggcatccaagaaactaccactcaatgaaaaattaccttgcaagagatttgtgctctactaccatgacaacctcttcaacggcacaaatgtagccaatgccacatctgcaacggtagctaacaaaactcgtctaggcgatttcaatttcgggaaactggtggttttcgatgatccaatgactaaagacaaccatttcctttctcccccagttggtagggcacaagggtttttcttctatgacaaaaaaaatgagtatagtgcttggtttgcttacactttggtgttcaactcaagtgagtataaaggtactttaaacattatgggagcagatttaatgtctgagaaaactagagatctatcagtgattggtggtactggagatttttttatgactagaggaattgttactttagagactgatacttttcagggtgctttctattttcgtctcaaaatggatattaaattatatgaatgttattaattattattagtttagagctaataatgataagaataagaatattttcgatttgaaaatattggtattttctagagtactttatgtcacaagtgctttgtataattttattgtcattatgctcaaattctcctaagaaattgtaattgtgaagctttatatataaatatatattgtaatgaactataattcctatatatattcttgtttaattagtaaactattttcaaattcaaaatttgacagttagtacctcccataatgttatcaaagtaccttaattaagttgttgagttaaaacaccaaatttatactatagaaatgagctcaattgcaaatgcatggtggataattaaatggttacatataatattaactttagtcattattaattataaccatacatgcagaagttgaaatcatagcataaaaattcacatttatgtctctaatagagtaaaattaccaaactatatttattatctaaataaagattaatcaaggcatagaagtatagctatagaagggaaattttatttgcactcaaaatttgtaaagatgctcaatttttattttatataatacatatctttaatttgtattattttttttaaaaaaatattgtttttatattcttaaaaaatatacatataatattaaaataaaatatattttaaatattatgacaaaacaattaaaataaaaataaatataaatgatacacgaaaaaaaaaaagtaaaatctttattgatcaaattagcacaaaataatgtaaaaaaaaaaaaagaaaattaaaaaatatattttgatgagtgattttttaaaattaatttaagtttattttttttaat

SEQ ID NO: 306949 - DNA, 3488 bp, Cannabis indica
ttctcataaaccaagaattttagttatataggaacactttatataaatagataaatagataatataaagatttaaaataagatatatatttaatatttgtatttgtgtgaaggattaatttctttggatgcaatgttaacctgcaaatatgcaagatcagtgtggcttcattcggggtttctttttaatctgatatctgctactggtttaaaaccagaggaatttttgtttcacctctcacaagttcataccaaatctgagttggaaatattttttgcattatgtggtttatttggtatgatcaaaacaatattcttcatggtaaatcacctcaaacaattgaaatccattccaaggcattagcttatcttcacaatttctaaaatgctgttgctaaaatcaactcggctgcaagttatcaagctgttgatgcaggtcatagtgctgctggtgtacaatctcctggtgtagcagatctttctacttctactagtgttgtacaatccgctactggtgcacactcttactctactggtgtgaaagcttctcatttggttggtattgcctcaaaatgaacattgatgcagcctttgattcttcccaaaaaagaattggtttaggcataattattcgagattcttctgggtgtttcaatgctgcaaagtcaaaattagtgcgcggttgctatagacctcaaaaatggaagctaaggccatgttttatggtctaatttttgctcggagtctgaacctataattggatttcattaacacagattctctgcttcttgttgatgcaattaacaatccaagacccattaagtcttatttttatgatttggttggagatattcattatcatttatccaatatccctttagcttgtgtttgtcatgttagacgaaatgctaatcatgctactcgtggtttagcgaaatatgctttagtgcggataatgattatatttggcttgaggaatgaccctgatcggctatcttttctgttattgtaaacggctctctttaatttataataacagattctttctcaaaaaataaaaatttcttcagatattttgattgtacaattttagggttttgatgattgaagcagaggatgtagaatttgggttccaatttcagaatgaaaacaaattcgcagtgaatttctcaaaattccaattaatttaatgtcagacgatagatggatgaggcttctcgacaatcaattgctctccgaggtatggacgagacattctcaatgagtttggttaattataggtgtgatatttgatttttcaagtttagattacacttgtcttcctctagaaatcttggttaatcactctaatagaaagaattaatggaaaatgatgacaagagagggtttggatttcttttatgtttctaaagcactctaacaaatcatggaatttttctctctggttgtctatatcgattcattgccaaatgtacctcattttatgctcaagatttatgaccaatgtataaggaattaattattttcctttttgcaggcaaagctacagttttagaggatggaattgtggtttgtcttcaagtgactctcccaaatttaaatgctttgctgttgaaggtgggaatgaggtgacataaagatcacaaggataattgctcacactccattgatgtgcaaatgttaagttgtaatctgcagaatggttgtaaaggtggctttgaatggctcttcctcattcatccattttgttgtatgttacagataaaaatgaacttgtgctgtgtatggattctaatattgcaacactcatggcaaggtgggaatcttgatccactttagtcttcaatttttctttcctgaccttaataagtatttcctacttaattacatattatagtatttcctcttttttagactgaagatggaccatcttctcgtttcttctaatttttttttgtacattttgcgtttgtgaaacatgtaattaacctggatatgggatctagattcttatagattcttattgttctagatttgtttgtgaaacatgtaattaacatgtaagacctccatttctaaaggaagtactcaatttctacacaaccacttatattatctctcatgtctgaactctctttcatttgaagcaagtctatgtaaccacttctcttcaaagtgtactctctactggaattcttttaataagattgtggcatcctcattattaaaatttctatcaataaatgtaaatttttttataaaaattagtattttatgtaattattccatcaatttattgtttgtcattatgtataacaatcaaacacacccttaagcctttaggtaagtacgattattcatagaggaaaaaggagttaatcttgggagccatttgacttccaaaattctaacatcctcccctcagccaattctttaataattaatatcccttaagtttactttccaagtgtttaattaataatgatttcattaaacaaaataaatgaaaaatcccacatttaatataaaatgaaagaaatgaaataaaataatatataaagataacaaagaaaaacagtaatctaaaaaaatttataaatattataaatattccaattaggagcagaatcgcttttaaaagaattagaaacttgattatctttcattacacaacaccattttgaacaaacaggttcaaaatccactttgaacaccattttgattatctttccttttggtgtgtttgtccaatctacaactacaaactgcttaagtggttgctttttaccaactaaatccattgtataatagatatttagtcggactttcattattctctcctaatagtagcacttattaatttcttgattaatgatgcaataattaattaatttttagttacgagaaagaattagtgaaagtattgcttatttatagttaaaaatgagaaatctaatcctattccaattctattattattattattattattattattttgaacggaatcctactctaatttaaaataaaatatatatttaataattatattcgtgcgaaagattaattgttaaatataacatcaaacaatataatcaaacattaataataatattatcttatttaaggcatcaaatataatatataaccttgtaataatcataatgattatcaaacttctctttgtgctcatcccatccctttaatctacacatcaaagaaaagagaaacaaaatgtgcaaggaatttctatgaacacaacttttctacactcttcacttatcttagccacagacattcccctctcatcaccgaataaaaggacacatccctttttaatgagaaattatgggttaaatgggcctacatgcccaatgtgagggtattaattgtcttggcccaatgggctgaccaaaaatgttttagagaggaaattacactctataccattttaatattgtgctcttttatttttatcctctttttaaa

SEQ ID NO: 306950 - DNA, 996 bp, Cannabis indica
tttaaaataaatagcattcattaattttgtttagcctgctatcatttaggcaacaataaaataatggagttgtaaaatgtaaatacatgatgtttttatgatgtttttgaggaccaagaagccactcaaaagagaatcatctttagattataaaaataataaacttctttctttaaaaaagaaaatacatataactctataatttataaaacattgcaaaaaattcgtaacttgtcgcttgtatccctaataatttatatatatatattgaggagatttcaatggtttgataattatatttacttttagccgttaaatcattattaaacatttgtgattaatttaaaaatttattaaagataattaataaattacttgttgcttgatactaacctgattttatttatttccttaaaataaaaaaaaaataaaaaaaattaaagggttttttcatttggattgaaaagtaaaatggtcctaaatttaaaaattaagttaataaatgtccatttttataaatatttagcaaaatggccatttaattaataatttgatgataaaattacaattataatctttcatcatacataaagaagctttgtataggaaaacaaatattatagacagcacgattttgtcatttgtgtaatataatcacctcagtattgtttgattatctattgaacaatttatcattcgttccatttttttttaactttcattgttatataaatttagacaacagctattaccatctatatactattgaaatatggttgcaaggaaatttttactactcactagttgatcaacttttttttttttttttaggtttagaaaccttacagtggttgcagcggaatttaatgtcttcttccactcagatctctaacccttctatcctgtttgtagcagagtatcacaaagatttgagtccgaatctccttcacttcaaactggattcttcacagtcttacacactatgattgagtacca

SEQ ID NO: 306951 - DNA, 1611 bp, Cannabis indica
aattgactaagagattgtaataacaagttgtaattagcatttctcaaatagttattagggacttttgttattgtaatttgtaaagtttgatagttttggtgttaaaaattagtttttgtaccaataccaatatcaaagttaaaatattaaataatagcatctcaattactgtgttcctatagcattacttataatgcaaccataaaatatattctgctaaatattcttttgacatctcacttgtcagatatttgtatctgataatctggttggaatatctttttgaaaactcattaaccaacttaattggttgggacgtaaactactataatatgtcagacaactgtgagtcccaacaacatacacaacctcataaaaaatacaatcaagaacaatttctataaatttatttttattaattaatatcggtacttgtcaatatgacatcaataaatgcttgaagaagggccaaattaacactcaaacttataatgaaaaattatatataatagataaaaatatatgtttgagaagttttacgtctgaagtatagctaccaattgcatatatatggatatttattataaatatgtgtatacgaatgtgataatgtgattaataatacataataatactctagaaaatcgataattgaaaattgtcttttgataatactcaatttgagcatattgatttttttttcaagagatcaatggtacttagtttgagataaatgtagtccgtcacaccccctagttatcttaatccaagaaagtaggtgaccgaaccaagagattttagagcaaacatggcatttgagtgataatggtagtaacttgggcaacattattcccactaagaagaatatcgttaacataaactaagacaaagagaagagcatcaccttcgttataaaagaagagagaagtgtatgcagcagaatgagtgaaaccaagattgatgagagagtctttaagtttgtcaaaccatgcacgaggagcttgcttcaatccgtagatagctttgttgagtttacatacagcagtagggaagtcaggattgacaaaaccagcaggttgttccatgaagacttcttcttgaagagtaagaaaagcactgtcaatgtctacttgttggatattccagttatgaataatagccaaagagagaataatgtaaattgttgagggttttacaactgggctaagtgtctcaaagaagttaattttggattgttgttggaagcctttagcaaccaaacaagcttcatagtgattgactgtgctatcaacattatacttaatacgataacccatttgttgtcaacaatgtgcatgtggggaagcctcttgacaagaattcaaatgcgatttttagtgagggaaaagaactcagttgtcatggctgaattccattttggagaggctaaggcttgttcaatggcgacaggcatgggctcttcgatagaggcagtaggaggtgtggtagcaagaaaagtttttagcttgaagatgccgactttggatcaagctatcatggtgtgcgtagagtgtggaggtttagctgctagtgtatgtacgtgttggtattgagagggagagagagagagag

SEQ ID NO: 306952 - DNA, 3538 bp, Cannabis indica
tttggcatgggttgtgtagctcggaatcatcatggtgctatggtagaagcatttaagaaggagaagattggttgtgttcaacccgaaattactgagataataggcattaaagaagctttgagttggattgcaactcatttgtgggatagagtcatgttgaaaacagatagcttgatgtgtgtccaagcgattcagagcggtatgtttataccttcacagtttggtcttattgtttaaaatgttcgaaatttgcttttggctttatcttttgttgatttatgttttgtaaaataatatgcaaataaattggttcattgcttggcaagagactcttgtttctctacaggtcatgtgcttcaactggaggactattcctcggaagtgcattctattgttttgaacgaatttattaattaataaatcttataatttttattcaaaaaaaaaacattaaatagatataataaaatttttattttagtcctttaaaatattatataaaattcttatactcaatctgtaatttaattaacaggaatataattacatatttttttatttaaatgtttgataaggatatttattaaataaaaagtcaaatataaaatttaaatctattataccttaataaaagtggcaatactttcgtccttaactaattgaattgccaaaaactccttttattctcaccataagtattaacacataaggtaaggcattaggatattcacttattctatattatccaaattacctttattattattattattatttattgttggtttttaagttcacatcaatatatatgctataatattgtaatacaacattagttgaaaattctctctgagactctatctttgctatggtccttgggaccctgtgatcatgttaaatatgtttatagttttgcttctgatgatgagtggtacttcggaggccacagtagacgacattgtgaatatggcaagccaactggcagttgaaacggaggatgattgggaggtgaatgaggaggaggcaaaggaatttacggagaagacggttattggtaaggtgatttcgaaaagaccaatgaatggaaagcttttccattctatattttcacgaatgtggaagaatattggggaatggaaagttaaagtcttagagacagttgaagggttaatctatatccgagtctcatttgatactaaggaggatgctcgtgcgataatggagaaacagccttggctcttcaatgggggaatcttattattggaagaatggccattgactgatagatggcaagatgcacggttgaatagggtaatctgctgggagaaattgaaaggttttagtctcaaagcgtttactctgaataatgtgagacgattggcacaactcgctggtgatgtaatggagattaaatggagtaatccacaacaggcatttatgaatggctatgtgcgagttaaaattggttttcctttgcataaaagtgcgtttgtgggaagatttgtgctggctgggggaactaagaattgggtacagattaaattcgagcgaatgccaatgctatgttttcagtgtggttgctggggtcatgaacaaagtgattgtaaggaagagccgaccatggaggatattggggatggacagaaagtgttgaaatatggatattggctaaaggatgagcatcccactcctaattgtatagttgcttctcaacaacatgttgctgaagggacatccgaaaaggagaaacggagatctgacgatagttggactgagatggaggcggctgttaatgctcagccggaggttggaaattccaggggtgcagtggtggttcctcaaaatcaggggcaagagtcattgggagttagtggggtagttattaccgaaattggagggaagaactttgaggagagatgtgttggtactaagaccaatgggcctgccacctttgtaggcccacaagaatgttcaaaaatgatctatggggataaggaggcccacgggttaaatgtttaagaggcccatggtctaaatgttaaggaaaatccaagtaatggtagggaatatactcaaggcagacaagctggagttgaagtgggatgtgggaattttcaaaatttatctcgtaaagggggcagggacattccaggtgaggaagagggcgaagagagtttgaaaaaacgcaaagggggaactgggtttgttgtgggtactgatgaggtagagactaggaagaagaataaaggaaagggaatcttggaacaccatctgagtccagctatcacgaaaggggggtttgtggtgcgatcggctactacagatgagaataaaagtaagaatgggggttctcatggccaaaggaagagaatttctatcaaaaaccgggcacgatgtgttaatcgacaacatgtggagatgggttctatgtcaacgaaccaaacggtggggagggagactgattattcggttattggttgctcacaggaagaacattttgtttttggagcagctacagagaatggacacgaggcacacgacatggctataccaaatacagaggtgagtatttctaaagcaattgatttctcatctcatgattctgatgttgaagcggcgagccttgctccgcaaggccgccgagcacaatgaaactcttaagttggaatgtccaaggaattgggaacccttggacagttcgtgcactgcaatcccatattcgggatcatgacccgagtattgtgtttttaatcgagagtaaactaactagagttcaagcggaaaggctttgttctgtgttgcgggtcggagttaatttctggtctgttgatagaattggtcttagtggtggattattattgttgtggaaggatgatattaacattcgggttgattcgagctccccaggtcatattcttgtggaagttgcaggaaaagattttttgccatggacattgacatgcttctatggccacccggatgcagctcaatggaaattttcttgggaattattaaggaatataagagctggcgtacatggagcatggttatgtattggtgattttaatgaaattgtgagtcttgcagaaaaagtagggggaaggacacgatgtacgtctgccatggaagactttaaagaagtcattgatgactgtggtttgatagatttttgctctgtcaaaactgaattaacttggtgtaatgagcatcaatctaatcaaattatggagagattggatagggggctatgcaacgaggaatggttgagatgttttgagggagcggatatccaagttttggattggtgggaatcggatcataggcctttaattgtagacttacccgttgctgtggaacatgatcgatgtggtcaaacaaagaggaaaactagatttcattttgaagaggcatggtgcgatgatgatgagtgtaaagacatagtcctaaatgggtggcaagatggtacttttggtggtcattcaaggggctttaacggaaaacacttcaggtaggccgaactttgaaagcatggaataag

SEQ ID NO: 306953 - DNA, 1467 bp, Cannabis indica
aacctctccatgaaaaatacttgagcttaccatcgtatcctggaaaagacaagaagatattgttccaaaacatcacttacagaatctggaagctacttaactcttggcaagagaagctatttttggatggtgggaaagaaattctcctgaaagcagtagtgcaatcaattcctacctatgctatgagttgttcccaactaccaaaaaaactaattgatcaaattaaaaaaatgatgaatagattttggtggggatcgaatgctacaggaacgggtatccattggaaaaattggaaatctttatgtcatgcaaaatgtgaaggaggcttgggttttaatgactttgttcattttaaccaatccttattggtgaaacaagcatgaaggattttttccaatccaaactcatcacttagtactctgtttaagcaccggtatttctctaatacgggtttcatggaatctgaggttggaactcatccctccatgacatggagaggtatagtttggggaaaagaattgcttaaaaatggtttaagatggaaggttggaactggggaaaatatttttgttgcaacagattgctggcttcttggaatgactaccttcaaacaacttcaatttctggattcaaacctttcaatgcgtgtctccagcttcatttctctagatcgaacatggaatatctctttactacccaggtttttcattccttttgatatccaatgaatattggacactcctctaagttacactcctcatcatgaccaacaaatttgacattacactttggatggaatatacactgtcaaatctggatatcaattatcacttcagcttaacaaacaacccagaacaccatatactccaatatactcaattcaagtaatagaattcaccaattaactcagattcaaaaacaccataaaagctctaagttgagttcgcaaactctaacttcacccaaaccacaccaaaacccattaattcagcttaaaatatccatcataaacctatcctaacttcatagcatgaaaacaaacaaccctaatacttaagcaacctaaaacccaaaattcaaacactatacttagataagcttaggaaaattagaaaaagagaggctaggaagtgaatagcttgaatcaaagcactcgattccttcaagaaatccttaaaactccaaaccctagttgccttcttgaataatatatatatatagagagagagttatagagagagaagagtattcttttctagatttcttctaaattatcaaataactcataaacttaatcccttagttaattttctacagcaacacatcaatgccacaaaaagacaagaatcacttaactattatgaccatttcgcccttaacaaaagacaaaagcaaactaattttaaagggtaatttggtccttttccaaaacccgacaattccccgatatttccaatgcctaacaat

SEQ ID NO: 306954 - DNA, 1075 bp, Cannabis indica
catatgatattttacttaactaaatcaacacctaacagaattttatagtttttactgcaacatataaatgtattagaaaaaatatttttaaataaaacatacatatgatacataaataatatatattttttaaaaatataaagtatctatactataaatattcctatttttttattactaaatgttagtaataaaatgtgatgattctccattctcatattttgatctcattttacaaattattctaaaaatcaaatttgctttttcgagaaaatcgtggtctttttacattcacaaaattaatatgtgaaactagttatactttaggatatggatccatgtgaatgtgatgttgatgttaaacgggtataatgccccattacccaaaaaacttggatcgttgattcagacacacacaaaccccaattttaaattttcatatttaaatatgattataattattaattctggtatccatccaataagaagaaaaggaaatgaatttttaccaatcatgattacattactaaaatgttaattagaagaggaatggaatattgaccattgacctaagatgggaccatggtagaccttacctagaatccagaatcttttaaacaacatccgccgcctaattccacgtggacggtcatgatgtaatgtctccgcgtacgcacgtgacataattttcacccaagtttccaaatccctcagttacgccgtcctttcctcctcccaacttccaacttgagccattggatcaaagtcatcaagtggatgaatttaacattgactcggcaataatcgcttcattctccattaattgaggctacttccgtaatttaacctctccaaaatgggaaattgccctaaatcttatttaaaaaagcttattttatattatgccataaatatattttaaaatttatattattattttattaaaaatattaaaagtaatataaatttatttaaaataaaaaatataatttttttataatgtatcttcattaaagatgaacagatatatctctatctgttttattatctgaaataattttttaatcaaattttt

SEQ ID NO: 306955 - DNA, 681 bp, Cannabis indica
tttaaatattaatttttaattaaaattttataatgaaataaattttcaagttagtatcaggttataagttatttatttatttattttaatttttaaattaatcacaaccattcaatagtgatctaatggctaaaaataaatgtaaccatgtttttatatatatataaacaacttagtaaaattttcttaattttgagaggattgggacttgttttgctctgcatctcttcctgatccaactgttgaaaccttaccacatgttgatattaggccatactactttggtggtcgagcaaaagaccctacagagcagtatgaatatgttaatagcgttactaataatgaatggtcttactttgttactaataattttcttatacttataagagttattccattactttaaaattttgtaattatatatgtttttcgaatataaattaaaagatcatttgtaggtattgtttttcaacaagaatcaaagtgtgacctttgacactaaaattataggtattgtatatttttcacgacctaggctcaggacataacaagaactcaacataattactaaatttgtttttatatgttaaataatattagacatatatatatatatatactagcaaaaaattacgtgcgaggcacgtatactaaattttatgctagtttttttctatgtta

SEQ ID NO: 306956 - DNA, 615 bp, Cannabis indica
ttattatttaccaaaggactcagtgggaaatcaagtaaaccggcttagactttgcataatatgtacaattatctatatatatatatatatatttatatgaatatttatgagtgaagtttaatttaaaaaaaaaaagaatcaaaccatttatttacaaagtaaatacaatgccatatttgctcaacaaagtataattttctttattaattcctgcaccgcgtgtttgatttccttgtattgaaagcacagaaaataacgtacaattataaattccatcataaatttatgaccgtataaaaaataaaacattttctcaacgaaccaaaaccaacgttgagaaagaaaaaaattacaaggatcaaagattcaaagacattgataaatatacatataaagacagggaaacaagtgtgtctagatatacctggtggaggcaatctcttctggctatggctattgactcggccggcagcaaggtaacggtgacggtcaaagagttgaaaaaatccattcatgcacccaatttgcttttgcagatctgggttttcatctgataacgaatatatgagctttgcagacattttctcaaactctttagatatatatatatatata

SEQ ID NO: 306957 - DNA, 1465 bp, Cannabis indica
ttattttttgttgttagttttttattatttgtatattatttttatgttatttaaatgttacatttacctatgtaaattaattatataattataatttattttatgaaattgtttacagtagtcatatttagcaaaattttagaagaacataaataattaacattataaaaaaacaaagtttacaacaagagtactcttgctcttgtctttctctcttccatggcaaagaataaaagaatgaacaagaagtcagttactcgagctgatcatcaagatctcctttcaatgcatgatacgatgagagtaaatatgagaagattgctaattgtgttgcggatgattcaaaggggcttaatttaatatagttgatgctcttcaagcagggaaaattatcgaagatcattgtgtgaataataagggagatgattgtatggaagattcgttttgtgaataataagggagaggattgtatggaagatgcaaataaactcatatctttgagctagacggaggagatgaaacaagatggatactgggcatctgctcaacaccaatggaagaaattcacaaaggataagatttcttattctgaacctaaattgagctattcgaatccgatagtgaaagatggaaggaaaatctctcaagtggattgtgaagaggttaaggttcaggctaccaattagaattcagcaatcatctgtatggttcttagagctaatcctcctacagcagtggttgaaggctttattaagcgaatttggggacatctagggattgctcagattgtgaggatgacaaagggacttacgatggtgaaatttaatgatgaagtaactagagaccatgttttggaaaatggtatgattcaatttgacaaaaaatcagtcattattcgaccttggtctacatatatgaatgcagttcgattggttagatcaaacctgttatggattcatctccatattttggccttcaatattggggcaataaatgcctaagtgctttggtgagtaccattggcaagccaattatgatggacaaattcactcgtgatcgaatccgagttcaatttgcaagggttttggttgaaatggaaataaagattactctgtcgcgggttattcaatatttcaatgagtttgggcaacttgtagaacagggggttgactatgagtggttcctaattaagttcaaatcttgttctagttatggtcttgttatggctgattgtagaaaggatagaagattcaatagataaagagaaggagaccatagtggaaagtgttcctgagatacaaacagtttctactttggtggcaataggaacctctaatttagttaaaccataaggaaatatggatacaacagttggtgacaagaaaattatagaacatggtgttcataagagcagccagggtgtgacagtcagtagtcccgtgatccgtaaggggaaacaccgggt

SEQ ID NO: 306958 - DNA, 2528 bp, Cannabis indica
agaagttgggcctctttcttatcaagaagagttgttagtttatcattctcttccataagcttctgaacttctacctctttctgcattttctcaccctctaactgtgttgttttcaccactaatctgtttcgaaaccaacatcagaaaaaagataaatcttgggtacaaaagaaaataaacaataggaaaactaatggaatgtaaattaacaaggttggataagtttatattaagaaacacaatgcaacaaaaatgttaggcttcaaatatatgcttaggctaaggtgtatgaacaagtcacaagttagttatttcagtttagttcctatagggctgattgttgcgtgtgtcagttagaatactgtaattggtttttaatttgtgtgtgagtaaaatactttctcgtagataccaaactgagtttagaaccttgttattttctcttcgatatcaatgaaatgcttattctctaattctttcaagaagtgaattggaataatagtgtcatcaaaaaatagatcaatgtaaacatatatgcagcattgccagcatgaaagtacaaatagcataattataaccaattcaatcaaaaggacaatgtattgatcagatcattcaatgaatggaattgaaaagcaaacatactgaccgttcaaatagcttctcaattgtttgaaactgcttctctgatgaaaggagtgtttctcttacagtagtgagagtgctaacatatgattttagagattcgaattctcgcttcacacgactaagttcctgttcgttttctgaagctcgttgcctctgtctagtggtttcttcaaccaaatcatctatactctgcctcatttcatttagaatactatttgtaccaagagcaaacatttccatctcctctaacttcaatgacattttttcaatttgaacagactttctcatgatttcttcctgacccgagtttaccttttccttctcaattgcagtttcagattccgccaataacaccctttcaacgaggtgttccatcacctttgcaaccatcttcactgatttaaccgtatcactaatataagcttcatcttggacatccagagaaccatgaagctgacctatttcggtacaagtctcatcatctaaactatcgaacgaagaagcatcaatgtctttagaccaatctgacaaaggtgtaccatttttatcaactagtcctaccccttctattgttcaataccacaatacgttcgggctaaatggggaacagccataagccttgctttatatttcaagtaagttaacaatgtcgtcgttgttttaactctatgccaaagaacatccaactctttcattgactcttcttcagactctttcatgtatgctttcacctccatgaatttcgactgcagcaaatccacttgggattcttgttcttccatttcctgcttccgaatttcaggtgtttcgcatagctgagcctttaacttcgatgattcagcatgttccccagttgccatcccctgcacaaagttgaataaagaaaggaacataatatgtgttagcatatgatacaatataaccacaagggcaaaaacaacattagggatttcatctttagaatatatagaaagactaattcaagtaagcataacattcaataagattccaacttgcatagaagcatactatgtctggtaaaaagcaattgatcaaacactcaaaagaaaaagcataacttaaaaatgtgccaataacttaagcttcacaaactcaattcattgtccacctaaacaaagatgtacagtctaagcagatgcctatgtacattcaatcatggttctttccttctcacaagtgattgagaaatatattgggagatataatcaaatttacaataacacactaagatctaaaggtgcgcataaatcgatccaatccaattatgatcggacctgaacttgttagatggggtgttcgaaaatctaatgcaatccaatatcaaattgaactaattagtattttcatttgatttttggtttgatgagtaattagatttatattgttatacttaaaacccaatacagtgatccaagatccaacatcaccagcatgaatatagacacaatttgaggtgggtgtttacccatttacaagctcaatttaactctttaaacaaataataattacttgctaattccaagtatcattacataaaggcaataaattgaagagagatcttatagctcgaaaaaaatcactgccattaatttaaccaaaaagaaaaatctcaacaagaacttaaaaaagacaaaaattttccatgtttatccaattgggaatttataaagatgcaattataaatacaaaaactttcagaaaacaaaaaatctgaaaaaccctaattaataagaacaaaacccccaaaaaacaaaaatgggtatatgatccgaaaagtaacgacgagcttaagcttaattgaaccctgatctttgaaagaagaagaacaaaatatatatataaaaaataaataagaaaat

SEQ ID NO: 306959 - DNA, 2189 bp, Cannabis indica
aaggaagagtgcagagttggatcacatgaccatgagagtgctctatacatcaatcctgtaactgatctggctgtcatttcctcctgtcttgaaaggagccttaacctgactcactatcagatcagcagagcagccagttttctctgtaaaatttcagcctcaaaataatttctaaaatgtactgtcatccctaaaaaagatacaattaaactcatgttcttctttaaattttaaaataaataaataaatgtttctttttcttaaaaagaaataaaattaataataatgaagaggaaacggaagagtgggccatcagacaaaacgtcgagggttttgtttcttatccatttttcacgtgatcccgttacggagctgtgggctgggtggtatgggcaagttggagagggcgtggtggcccacatttgaaattacatataaataagtagggaccacatcaacctaagttacgctatgactagagagagcagcagtatattcacgtgtcagttttctcccacgtgtcgactgtatctatctcatcttcctctccttttttttctatctctgccttcttttctgggtcaattttcgtatgagtgagacttaaagagctacgtaaaatcacctatccacctaatgggtcccacttctgactaggaaagatgtggacccttgatgcttacgtatgatcgtaaaatcattgcaaacctctctatcaattttcttttaccaagtcataatctcacttcttcacttttctttttcttaatcttgtacaatgttgagttttaaagaataaaaaataagcaacatcttatttgatttggtctatttttactcgtacataatgagagattttgttttgaaaaggtaagaggagaggtgaatatatatttacactatccaatattttataataacggatattactgaattaaaatttgtaggacataacattaaaattaaattaaatgaatataacaaatacaataaagcaagtcaataggatttaatagtttgtttcgaaatgttgtaatacacttgaaaaaaatgaaaagacatgagttgaaaataaataaatgatgaaagcaacatataaaggaaggagggcagagaagtaccgatctataatgggactcatttaatcaaaaccgttaatttttaactactcaatatgttcaagggtcaattggtagttgaagtttgactcattgtccagttgacccgggcagcttttccaatatttcgggttagacacggtgtagccgcacagaccagagtttactctctcccttcccttcctttgataaataagaacctttcattcaattattttttttatttttgaagaattttcatttccagtttttttttttttttgaaaaggattcaattattttgttgtagtatatattttttgttaaaaaaaaaatataagtgctacacttttaaatattacacaaggcatgtacaaagttggaattagaacaaccttcctagttcctacttctacttcgaagtttccacacatcaaatcagcttcgggactatgcatagtaactaaacactctcttactcacacactatatgtctatatcaaagagcaaccaagatttcaaattacaaaaaaatgattcaattaggaagtttcctaatacaaaattgtcttcccaatatttattaattttcaaaacgaaaaaaactttcaagttcatcaatgcacaatgaaacattttcaaaagtgatataaaatcatatttgtacttatgcagctaggacttatattgtttcgtgctttttaaaatataagtgatattaccataaaaaaatataaattatatcatgagttggtttgacactacttgtagggttaatattttcgtgtagtgctttatttgagttgccaatttcattatactaacttaaaattcttgttgtacttttaataattttgtaaaaaaattactccaggtcaagcacgcttgactgtgaagttcttttgtgatgtgttaccaaacaacaagatgcacattgttgatataggtagtacttatcaattcatttaagctctattcaactgtgcagtcacatacctacacaatctcataatcatcatacttgaccttccagtaggggtgttcgcggtgcgagtggtgcggtttttaaccattttttcaaactaacccgca

SEQ ID NO: 306960 - DNA, 1002 bp, Cannabis indica
catacaaaactatctaatttccttatctcaaatctcgctgcttaagactttgttatctcgtcactactccctataataacacataggtcaaggccctaacattaaaattctaactcttttagtacagtagaaagactattattttcgaccaacaactatacaaattcattgaaagttgctttcataaaaattttagacaattcaattatcttttcaatgatatactgatcatttgaaatagaataaaactgagagagctctatcataattttactgaaacaacttctgagagaaaatatggaataacggatcacagaagacatcaaaacatacaatattttgacactgaaatattccaaataagagaaaactctcttcataaaagtttcattaagtttaattccctttcgaatgacactaaaatatttaaaattgaacttataacataggaaatatagatattttactgaaacaatttcttagaaattctatttcaaacgaatttcgtactacaccaataacgtacaatatttttgacttagtaaaacaaatattcacaaagtactctcttcattaaaaaatatagatactttattaagctttaaaatgatataaagaccttcaaaaaccgacaagaattgagagagatataatcattgttttgaaataacttttacagaagctatgagaaaacgatttacaatatatacaatataaatattactttttgacataaataatttcttaattggcaaaatatttctttacaaaacacataggaaatcgaataagctttaaaatgatatacatatatcttcatattaaaggaatgagaattgagagagttattgcattttaagtgaaagtacgtcatctgagaaaatgaaaaaaaaagaattacaataacagtagaaaaatgataatttttacgaagaattggtatacggttcctttataaaaaaacatagatcatccaataagctttctgttgggttttatgcc

SEQ ID NO: 306961 - DNA, 1549 bp, Cannabis indica
tcagattaaatttgatgataactttgaccctaatgaagagaagattcattcttttcgtgcaaatggaaactctagacaatgtgctacaatccccatggttgtcgacatagtgaagggatctcgtccattatgactagtgacagatttaagatttttattatgtgagggtttaattattataaaaagtatttatttttatttataataaaaattataactattttgagggatttttttcactatattgttatatagttatttatttaaaatgaaaatattaatgtgtattttttttttactattttgttatattatttaattaaaatatttataatttaatatgcttggggagaggagagaggcatatatatatagtgatactgtataaagatatagagagagagagaaataaagagaaattagatttttttttgagagaaaaacaagaaaattagattttttgtttgttattattttataataatttttaaatggtaaattggtgacggtggtggtagagaggtggttacgatgtggtggttgtactgatggttgaagaagaagaggaagaaaaagaaaaagaaatattttgataaatataatttttaattatttttaaataaataaaattatttgtatcaataaaaatttaggacacgtaatcttctatgttggcacattcaataaacattattgaatgatatttggaatatgcaaatatataatttggatttttttatataaaaaaaaaagaatatgcaaacataactagagattggaatgttttgctaaaatttaagaatggtggttgtttttttatgtgaatttaagaatggtggttaaacgtaccaacatatggagattggaggatttttcaaccaacatccatattttgtttaaaaataacatcatttatatactttcattttcgcacatgtgcactttttctcttaatcactctctcattcattgttttttatttgcaggtgcgcatgagtgtccattgacaagggtattaggatttatatatacacattataattttttcacacattgataatatgaaatttataatacttcttgagatagtaattattttctaacagctacctcataaatgattttttttgggtcattatcaatgaatcataagtgactatttttttggatcactatccctaaatcacaaatgactcttttgctatactttttgggctcttacttttttttttttggtatcgaatactttgttaaatatttttctttttagctttgatactatgttagaattgtaatatacatgcaatttcatctcaaaattaaattaataataagaagcatagcgcaggtcatgaatcttatatatgctataatgtttccacacattaacaatgtggtggactactctacctattagtcgttaatgataattgagtttgagatataatctcttaattcttgttaaggtgatttcgaaccatgcaagtagtttcacacatattaaaattaggtagtgttcaggaatcatgatatgagtattgtagatata

SEQ ID NO: 306962 - DNA, 1269 bp, Cannabis indica
tttttttatatatatatattaagacacttgaaacaaaaaaaaacctattgatttaatggtgtcttaaaaagtagagatacgattttattctgatgtattttcactgaatgtatttcgtggcacattaaatgggtctcagggtacattagatgagtgtcattactattttttaactctaattatttataaatcaatctcagccctcaaatcaaataactgtctcatctaacggctgccgtacgtcacgaaatacattccgtaaaagtacaattacgggacaaaatcatgtcccctaaaaagtattatgttaaaaattgtgttaaatttgacacaagatataatattgtgggaatctcaattgatacaatacattagtaacataattatccttgtcatgtttatttttggaagattctcaaatttttattcgtcttataatttatggtgtgattatttgttatgattattattgctattgtgggtaatttgattatttctttttattttagattgaataataagattgttattactcaattttaattgggtaaatttttgttgatatcgtgtgatttgtcaagtatatatttaaattggatatataagtgtgactaataatttgacaaaatattaatttctactatacaagtaataattagtttcaaattgtttaaatcatcattttaggtgagaatacaaaacaagtgtagagagaattttctttttatacatatatatatttgaaagctaacttgttaaaattgattttgtgtagttgttgaaatctgaattagaggctctattagatcacattagtcaaaccacgtatatgtatgttcatgttgttcattgtcttttactactttagttttggttgatttgtctttgattgtgataaaaaaaaattgcattgataatgatcatgtttggtttgacaaaataagtgatctaaaataatctcaattatatataatttaagcatttttttttcttttttacatattttatcatgtaaaaatttgtaattcatattcttattattattgttttgaaatcatgatacaaattaatgagtatacttttgaacttagtgttttctaaatttaattataattagtcatcaatatgacattgtccatccttaggtcaaacctcttcaccataagaaagaacacaaaaatattaagaattatttcacaaaaacataaaaataacaaaaacacggttttatggaattttaaatatttttacgatttttttttattttat

SEQ ID NO: 306963 - DNA, 1824 bp, Cannabis indica
acatatattttataaaattatttacgtagaattaataattttattctaaattgtaatacatgtatagataatatatttactcaaaaataattatattattatatagtattaaggattgtttaatgttattattgttacattgatattttttggtgttttaaatttttttttcttagtgtacctctatttagttataacctctcaattagaatataatttttttagtcccaagtgtattcttggatagaggttctactatagtataaatagtactccgagctcaattttttttttaatttttttaaacataaccaacataatgtaagtttctagtacaaagagatgtaaataatgtaattagtttagttatagatacctctaagtaagttattattgagctttattttcatgaaaattgaattcataatactataagtatttattacaattttaaatatataaaatcttatttattatttaacaaaataaatttaatttggtaatgcttataaaaacacaagatcaaaataagatttattgtattttaaatatacattatcattacatcatattaaattgagagtgcatttaatttaatacttcatccgcatcaacagtgagtgttacacagtttctaattgattattctattctattattttattttcccccttcaaatacggaattatcatgaactattttgtgactattaaattattaatcattaccaattttttacacttcagaaattatttatgttttttttccttttatatgcaaactcatagatagagctaaatagtaagtacatcgaattgtacacttgcatatttaagatccatcatatttaatactactttcttcgtttttttttttttttttttgggaagaattatgcaatttagttagtttgaaatttttaaaagagaacaaacttcattagagcacactcatcagccttttaattctaatttttaaaatattttattaaaatcatactttctctaatttacatcacaccatacattcaatttttttcttctttctctatattatttaaatataatattttaaaagtaattttagttatatataagtaaattaaccatattaaaaaaaatatacaaaataaaaatataattacacaattctatacaattttataaatatttataaataatcaacatattcacattatataataaaaataaacataaatatttacgattttaatatgttgattattttaaattaatttttttaaaaaaatgcgtataactaaatataaaaatacataagtcaatatttatattttgatatattattaaaatagtatgtttaaaaaaattaatataaaattataaatatctattgttatagtgcgaattttttacctagaaaatacgagcccaatctcatgaaaaattaccacgtggagcctatctttgcagaaaaagatgatttgctacaagtgtgcgcttatttctaatcatgtgttgttaactacagaaagtgttattaaccgcaaaaagaacaagtgtggacacaagaaccagtgtgataagagagaataatcacttcacctcgcatgacatgaacttgcgagaagatccgattgagatagggtctaataacatactatgccccgcatagtcaaagaataagcaagatcaagagaagttaatactagtcgcgcatataacgattgtatgcgatgatcaagtatatctctcatgtgatgagtaaagatcgtctctttacataggtttagtctgaatgactaatgtgttcgacgactcgtcacaaactcgcatgtcttacgtt

SEQ ID NO: 306964 - DNA, 1599 bp, Cannabis indica
atttccctattattgggagataactaacctatttaatatttatagtttaattatgtaacaaatattttacagttcctattttgtagggatattatgttattattctcatgtaagctctcctatgtaaggagcattaacctaacccttatctctctaagtctctagctctctaagctctcaagctctaagtctgaaatcctaattctctgtctccctctcttctacacgcctcaggcattgtagaagagactaagtctctttcatctttcttacttgagatttgcctactgattctcatattgtaatcttaagagagccacctcaagttccacaatccttgtgatctgagtggtattatctctagtattaataaagcaaaaggggagtaggtcattacctgctaactaagctagcccaacctctataaaaatctcttttactttcatgttcttattgtgtatacgtggtagcatcagtaataaatacaagtccgctgtctgttggccaaatctaagatcaacacctagatatcgggataaggtaagattagatgccttaatccctcctctagttgcactttactagtttgttacattataaccactaatagggaatgcgatacaactcaaatttatagcctttttcctaatgacattagcaaggccattaactccatcagcctagcttaactctccatcctagacattttgtattggtgccctacccaccatggcacctatacagttaattctgtctaccactggccaatacattactcacttaagctaagccttctccctttgactctctctctcaacaaaaatggtggaagatgatgtggagacaactaataccttcaaaaattaagaacttaatttggcttttctatcatgatgctcttccaattggctcaaatctttacaaatgattggtcttacaatcatgtacttgctgtctctgccaccatcatgaagaaactctaactcgtgctcttttcaaatgttaaactatttagcaagtatggaaactaaaatcttttatatggttagtagtaaacatccttctcttgccccattgatttacttcacaccttgctactaatactctcactgctagtgatttccaatttttcgtttgtttgcttttgaagctttgttattccaagaatgaatttttgcacaaacactctgtcatagtgccatttagagtagtccagtagactgaagactacctgcaccaataccaggttcataacacccctcacgccactgtctctctagtctaccctctcatcactggacactcccaccacctgcacaaataaaaatcaacgttgatgttgcccaagacataaagaaaaattaaatgggatttggtatgattattaaaaagagtaatttgcgacataacctccttaagtggcaagtttttgcaactaacccccaattttaaaattttggtggtaaaacttcctaaaccgaagttctgttagcagttagccctttccatccatttttttgttgttaactgccatggtggaatgtccacgtgtacacagtgtacacatggtacaattttattagtccacgtaaataaata

SEQ ID NO: 306965 - DNA, 1219 bp, Cannabis indica
aagttcaggagcataatttagtacatgttaaagtttgggaggaaaaattcctaattagtctaacttttttattcttttcaatttctgcaccagatgatacattggcgttccagcttctttaatctcccaagcttccttcagtctctttagaaaattaggaatctattgctacatacaaaaatactgaaatgacttcttttctaactgaacatatggatagacaaacattatagaaagacaatgatcaaaattttcttttgaaattaaaacaacttcagcatttgggaaatgattcacccattgtgagtttccaataccctatcaatgtttgaatagatacaagcatccaaatcatgtttattttttcatgtgaaaaaagaactagttaactttactgttcatgaatccaccctgtgccaacctgtccaaacatttttaacaaactctttattaacagtcaatcaactaccaacaactaatctaattaacttctagctcaaacaaaaatagttagaagtcgttacctttaatctttagaccacaacagtaattaagaagctccaaaaactctagatcaaaatgatttgaagttggctcaactcgcagagaagagaaatacacagattgtgtgtgtgagagagaagaagatgaagttttgagagaaaacaagttacatagagttgagaggaagagagatctttgagagaaacaaagataatatcaattattttttgagatgtggctggaatcgatggactatgttgtaatcttggcttgagtaataagattgattgagcaatccattgtggcgagctcgacagaaggcgtaccccaaaaaatttgggtgaacctctataatatgtttgttcatcttgatcttctctttgtttgctattaatctctgttaattctctttgtgcatgaatgtgtctatttgtaataatttaaaagttatttgcaatatcattatttattgggtgtctatatatttggaccttatgtttaatctagggaattttataaaaatactgctttttgacacaaactttacatttttactgggacacggcaaaaacaacttttgtactgcccaagcccaatttcattacttttgtactgcccaagcccaacatcatttcatttctactgtgaacagcaaaacacacgggaaacaaccttgttcgtgtgtgagcagacgccggagacggaaatcaccaag

SEQ ID NO: 306966 - DNA, 1452 bp, Cannabis indica
tttatattttctaaaatagtacacttagttcaattttcgccaattattttttaatataaccaacttctctaatacgtatattgtaaataatgtaatcagtttgatcataatatcttcaagtcacgttataatttaataaaatagatagtcgtaatcttaatctaattttgaatcttccaataattaaatgttgttgtacatcttcatagcaagaaaatgttgttgtatatcttgaaagatatgttttacctactacaaatagttaagatatgttgaatcttccattgcattataaatgatgattgtagttattaagttttgtgataccaatcttaaatttccaaattttattttgtttttctccttgaagcttttatgacacacctaaagatttgtttttctatgcaattctttccattagtagtgttttgtcatatccccataaagagaaagtaaagatatatattgcatgcatgcaagggatggaaaatgttttagtaaagttgctgatcagaatatttattttattaaatgataaaatgaattttatattttttaaaacagtaatactataagctcaattttcgtcaacttttttttttaataaaaccaatctaaaatcaatttctagtacgaacagatacaaaaaagtataactagtttggtcatagtaccttcaggttaagtaattaagttttaatttgacaaaaattaaacaaaagatactattttgtaccattttgaaaaatacaggtctaaattatcttttaacaaaatagaagattcaatcagtaacttttacacaatataaggtgcaaaatgatatttacccctaaaaaataatgcttttaaattacaaaattacaattcgataaaattatataaagtatttttaacaaaaaaaaaaaagaataaataaatacttttaaatttgaagtattttataaaacttttctcctacaactctctctgtctaaagtttgaaagatatttaagattcttaaatttagtaaggttattatttagcattgcccaacattacaagagctgcacatatgggtggcttggcccgacccaagcgattcatattttagaaagcccatttttaaaaatgaaggtccagcccgcgggcctaagcctatatttttgtaagtcgtacttgtgtccccgagctcatgccaatttcgtgcgatgccaaaaagttcaacccaaatatagaactctattgaggtttatgtcctaaaaattattttatgttattaagaataataggacaattttattaattgagtcaaactaacaaagtaaataacacatttaattactttaaaaagctaattcgaataattaaattaggtatacaatctacataaaataaatcaaaatatgatttacaaattttaaagacatttcttttataaattatcacaatcctttttttttttttttctt

SEQ ID NO: 306967 - DNA, 938 bp, Cannabis indica
ttaaaaattttaaaaaataaaatattactaaacaccaccgtcacaattattaattaataacactttgttgtctacttcgaaagcattttatatttttaatcatacaaataataaaaacttaataggtttccttatttaaattttctggaaattattagggaatgacatcacttgtgaaaattgctcatatttctcatatttcgaaaaatttatggccaaaaaacattttaaataatcatttgcacatataaattatttgaaaacttttcaaatattggaggaatggttagacataagcacattccaccgaatcattacacataaaaattaaaaaaattgaattataatttgaattctatactaaaaactaaaaataattttagaaatagaagtaaagtaatgcggccacacacacctactcatgttcatattaatataattggaagaatttgtgcacgctgttcacactgtccaaactcacatgagctgacatgcatgctttcagtataatcatgagaaaagctagtcaaggaaattaccagtgaaacccaatacaattcagatagaaatagtctgcaaaaaaagtccaaaatttcctttctcaattatatatttatatattatatagagtgtgtgtatattattatattatacaactctaaaatcttgctgcaacaataataaagattgctcttgattccaaggagaatgtttgtgattgttatttgttttcctctctgcagccttggcttttgggtctgaaattggaagaacacatatttcaaagtacagttctggtgtttaggacattgctcctttttatatacatagcaccagtttatttataacaaatttcacacaatattaaaaataatgtaccaacatgatattttacaattaggtaacaattttttttatattatttaataaaataaaat

SEQ ID NO: 306968 - DNA, 1443 bp, Cannabis indica
aaaaaaaaatagtaaatttgttgtggcttacgacacgcatcaaatttttgatgagtccatatttatcttataaatatgaactcatcagcgccttcatctactatgacaatcaatatgttattcacattgccaataattttaccttccataaacgcaccaaatacattgaactcgactgtcacttcatttgaaagagattaaaaaatttcaccatacacctcattccagtagctagttctccccaactagctgatgctttcacgaagcctttgccttccagcactctttcttctcatatttccgagatgtctatatataggatatgtgtagtctaccttgaaggggtaatcgaattatagagaggctaatatatcttatcttcttggtttttatgttgattaatatacaattggttcgtagtagattagttggttctttatttacctgtttatcgttagtttgttaggctttttctctttttctttctgtataattagtactctacactatgtaattcattcagtcaattcttaattcaatacattttatctttctttcaaagatttcctcttcgcgatctgttgaattcatatataattagtttttgtaatttgattttgattcttagtaaaagttatttaccctaattttggagaatccaaccactaatctattaaaaaaaatttctaatgcaaacgaagcttgtaaatatataagtgttcttgatttacttttcgcatttaattagttttgattactttaattaacaatttctagtggcaatctattaaatttcaatctttcatatatacttaattataaacaaaataaatgagccatatattaattattgtacacaaggaaaatatgtcttcaaatgagatgaagaacgtagctatataaatttacatatacaaaaatatatcataatgtacctagctagatacatacatacatatatatatatatatacaacatataatttttattaattaagtaattaaatggaggagtagtggagatgtttggtgagtttggaagagtgcaaaatattgccaaaaacatcatagaagagaaagtgagcatggttagggttgagatgtaaagacatgaaaccttgtccatcgtaaaaaaatctcaccatacttctatttttatttctactcttatctttaacatgatcataatctcctctccatgctttcgaacccgctccacttgttaaaaattgaattgaactgtccatgtgttcacatatatattagcgttataaatattatatttatttatgtactttaaaagcttatgtatattctctaaaaaaaactataatatagtaagtctacaatgcacttttatttatttattatttttcataataacatacgttataataatttaaaataaggcattttacaattttgtatacattattttaattaa

SEQ ID NO: 306969 - DNA, 2985 bp, Cannabis indica
tgtgattaaaaaattaaaaaacaaaaatgttaccaaacgacaccttattctatactgcaaataattatgtcttagagtaaaaaacgtccaaaagaaaagtagtagtacaaaaacaaaagtaacaaatgaaagtacagccttattaaaattagaaatgatacaaattacattataacatataggtaaaaaaaaaaagacttaaaagaagggatttttacaatgattaactgatttactaaatttctttagttatattttgttacagagcctcagaaatcataattactttttttttttttttaaaaaaataataataattccgataaaataattttttttaaaaaaatattgtgtaattttcactcattgtatctttcttaatttactatatgttttctaaatttactatatctttcaatttattataattttcactcatcgtcaaattataataaattgtatgaaatctaattcatgtcaacaaacactaaaacatttgcaccacaaatcatgaggctttcattatagcaaacaaacacaaacacattgtgttctagaataatgaacaatgtgaaactatagtaaaagaaaaaggaaaaagtcgtaaaattcgatcgtcgctatttagccaatagctttggtttttgttcatgaatcatgaataagaagaaaggccatctaaaagagtcttcatagcttgcttcttcactactttcccatacagtcctcttcccactttgaaagctttttcagtctccaccaccccaccactcttattcaatcttcccaacaaaatctttagcaccctctcatcacttcccaccacttccacaacactatccaccaccgagtccaccggaggaatcctccgcccccatcttttcacagatttttcagagctataagcatcaaaaaaggcagcccaaaaagatgacctcaaatagcctttcgctttgcccctcaccatcattcttttcattccctcctctaacctaaaaacgacacccccagcttccattcctctctccactccaatctcaacctctctcatttcttgccttgacgaaatctcttcctcgaatttacacctcttgcaagcacaatcgaaaccccaactcttacacatctcctttctttttcccagtggagaaagcacatcaaaataagcaaatgtgatttcctcacctgccttaacatctctagaggcatgaaccaatacatagtctccaacatgtactcgcctagcattgggaacacatgaatggttgatgaaacaagccaaaacccataacccaataccataatagtcaccgttcttccccaaaaccttacccgaaactccattttcaacaagagaattcacatccaagatacttataaccctgttagtatcaagcttttcaaaacataagcttgtgctattatcctcagcctcaggactaaataggcctatatcaggaacttcaagactacactcttcttctccggatgataactttccgatcatattgagggttttgggacacttacaagtggaattgttgacttggtcgatgaaattcttccacatgaccaattgggcattctcatcgggcacttctcctcccaatatactcctctcaatggcgactgctttcgtcgaaaatagcagagtccctgcatcaatgttcttggtagcaaatagccctctcccgctaatctccgatttcctcaaatcaacagggccaatgtactcggagagctccggaaactttccttggaaccgattcatgacccactcagagatatcaaaagcaccggtcctccatagaaactccagcttcttgcacttttccacgtacccattaaggctctcggagccacatgactgagaatcgaccagagctgttttaaaacagcccaacgccatggcatatctgttgaggttcatcaagattttccctttacagagaagagtcttgaaatgggcactctcgattctcaacgcttcatcgcaatctctcaaagcttctgcgaattctcgaagtctgaaacgagcttcggctctgttcgaaagggctagacagagggatttgtctagcttggagaggttatctggattgggttgaagatcacgagccttttgaagctggacttggcagagagagatgaattgagagtaggtttgtacggactccttccattcctctctgagtaaaagctctgtggctttcgacctcagttgctgcattagctcttccgccattgctaactctaactttcttctctgtcactaaagatttcattgacgaggtctgtttgtttggttttgtgtatatattttaaagtatttatttatttatttatttattgtgtgtgtaacggtcacatcgaattgttttctcaatctttttctcgtaacggcaacggctatttcggagaggtttttgctttaaataatcagaaagaaagaaaaaaagagaaataataaatattattttttgataaataaagaaataatatttgtatacataatacatattactatgttaatattactatatatttttagttgcattaattttttttaatgttatttaatttttattaaaaaatgcctaatttatttgttatttgtaaaaagtaaacataataatatttttgtttatgataattttatttaatcgtaatattttattttataatactttaatattatacacattatttatttattttttttaaataattgaaagatttttttttggtaactacattaggttttttgaaaagatacgttcattagtaaaaagctaattaggaattatgcttcttaaattttgacatgtacaaaattatgcctcctgaacttttaaggtcgttaaaaatgtctcctgtacttgttggatttaagaacttttatccaattttagtaaaaaagtctaacatggatgaaagttcagagagcatgatttaatacattttaaagtttgaggggcatgattt

SEQ ID NO: 306970 - DNA, 1564 bp, Cannabis indica
ttttataaaaattcacatatcaatcaataaggtaacttaaatcgtaactaaaatttacataacaacctacttaaaattattagaacaaaccaaactataaatagtaaagaaaaatacacgattacattccaatagaatgataattccactattttagtaggaaagactattccaatatatgagagaataaacttaataatttttttatcaattttttatgcgtttaaaatttattctattgatttcattcttattcctattctcatttatatatttttattcctcacaatcaaatgccactttagtcttcatatattctacttccctccttcctaccaaacttgagtgataaaaattaggggagacaatttgggttaccatacattggtttgacatgaaacaacacaagattatttgacacaatacaaatatatgtatgagccactgaaaattttttaaacttgacaaaagcatgatgacacaatgagactaaaaatagtaatttagcttatataatgttaacatgacaggagattttataagttcgatacaacataaaatttatataagttgagagcaaaaaagtattgctcgtaattgagttatttaagatgagaatattaaaaaatctcacattacatatataaaaactataataataaaattgatagactactcatcttatttataattaattttaattttgagattaaattttatttatgttactacacctcactctattttatttttatttagggttcgtttggaatgtcctattaggtcatattgtattgtattaagtttaatatagtattatataaaaatataatccaattcaatataatacaattcaatataatacaatacaatacggcctaatacaacgttctaaatgaactcttagtaaatttaagacaagagaaacaaacacgatatgtactaacacaaagtgtgagatcatcagctgtaaagaaaaatttagagggccttgttaaatttgacagaacaagaaagaaagagatctgattggggaacattgtatttgaaggtgagggaattcacgtgcgtcgaaggaattcacgtgacattgctagcgttatgtgtgaaagtaattaaagtaataataatgtaaccatacatacatacatatatatatatatattcgaatattgttatatatatatctaacgtcacattcctcatgatcaattttatttctcataccattttccgtggatggcaattgacatgatcaatctccatccaccacgtctcttcttcatacctacttaaattcaaaccacaattaattttaaactttcatcaactcacctcaattatttcacatataaaaaaccaataacatgatcttattcattcttcaccaataaaatcaccaatgccatgcatggttcgatattgggtcaacatatatatcatggtcaaatatgaacttaattaaggactacatgaaaaaagaaaagaccacttgtagtgttaattaggaatatgatgatcattacatgataaatattagagacttttttttttttgttttttt

SEQ ID NO: 306971 - DNA, 1139 bp, Cannabis indica
cttctagcaatcagctgccgacggtgagaatgatgccgaagggggatcaaggaagaactccgatgaacaaggacaaaggaaagcgacctgtcgaggatacacaaggaaagaggaatgcagagaccgttgcaaaggagagaccacagaggaaagtcatcagaatacaggagaggaatgcagaaggcaatttgggaaagattttgaaagttgttgacaagtttggaaaggacccagtggatactcttcacgaaactgcctgcccacaacctctcagctcaatgaaaacgagaacggaaaggacgacaaggtcagcctcgcctcgtatagtgaggaatcatactttgggcaaaattcattctgtcgaaagtgaaaatgaaatattgaagaaatactcttcccgcccaattccaaatgaacgagataatagggttattaccacaattatggcccgttcaaggcccacttacaaacaaatgatagaggagcctcatgtggatttatgcaagtctaggcaggcccataagcatcctgaaccaactcattttccatggcccactgatgctgataaagatggcctaacagaagagctaatgggcccagcccctattgataagtttgagcccatgttgactattttccatgatccagtggacctatccaaccaaatccatgaatgcaatcaaccccgaaaaaggaaggctagtctcaaccttattccttatgtgcaacgtactgcagaaaacacaagggaattctctcaagagatgccatcactgcctcccttttctcctggccctctctcaactcctttcaagcttggatcaggggcctcatcatcagcttctggtggggacaaaaaaaggaagaaagccatggaatccagaggcctttctaggagaaggaagtctgcaaggcaagagaatgtcaataagaagttggaagatgatcttaacttggtagaagtaagaatcgaaactacaccaaattttccagtgggcgaggaggcggcccttatcaagccccccccgccacaatgaaaatcctttcgtggaattgccggggtcttgcccgagacccggcaaaccaagccttaatggcttgggtgagaaaatacaagccggagtgtatttttctcatgg

SEQ ID NO: 306972 - DNA, 1084 bp, Cannabis indica
tttatttgaagccacatgagaaaatatagatgactgaaatttgttttattaaacctctctaaaataaatgtacgtaattaacacaaaattttaaatttctgtacacaaataaaaaaagagaagggaaggtaatttagtgggctataaagcctataattcacgggtggccctattctaaccgtagagaaagcacttttgttagagttaattaattaaccatatatacgcgagaaaaggactcacttcatatgggatttcctcacaaccatatatatctcttccttcacgggagctgaaatcaatcatatcagaaggacgttgttgtgtggttaggtactgtttttatatatatatatatcaaccaatatgttggtatgtaaatacttaaaagaaaaagtagaagaaaaacgaactcactaacttagtcatgaagagtcttcattcattcatttacaccaatcagttgtgtaatgtttcttaggaacacaaccctttgaacagacgtaataaatgtgtatagtgatggaccaggtccaagtgggttcccataaatgttgttctcatgtgaattataagtcatagcctctataagccatagcggcatagccaacaaaatatcttctttttgctacttacaaaaatactatttttggcttaatttttacaaaaatactgcaacacggcaaaaattacttttatactgtcttaactaattttttttcttttatactgtaaacacaaaaaaataaataaataaataaataagacctccatcttccacactcacggacagaaccaccacaggaacaccatagcaatcagaaaacaaccatcaattccggtaatattaaaaaaaaaaatcaaatcgacgtcaaataaataatcatagcaaaacaactgtagaacaacactaaagaaaatcaaacaaaacaaaggaaatcataattaaaaaaaactaaaaaatgttctgcacagcctcaatagccaatgcaatagcagttatatttgcaagtccaatcttaaaatatcagaataaaaaaattattaaaacaatacaaaattaaatgtaaaacaataagcagat

SEQ ID NO: 306973 - DNA, 863 bp, Cannabis indica
gagagagagagatagaatatgagaaggaagaatgcgatttaggttatggtgcagctagaacgagaaaaaagtgacattggggttttataatatgcccctttagctgatggttaaactgttggctatactttagcctacggtttttaaccgtcggtaattctaagctatgtgatggtgtacaatcgtcggtaatacatagcaaaaatttacaaattgtcagcaattccaaactataatcgatgattccaaactatattatggtataaggaaaataataatttaaattttatggtgttttattaaatataatactttgaataaatttaataattttataattaaataaatttgtaaaaattaaattaattacttaatttattttacatactttttactaaaactaatattgcaaattcaaaattattatttttagtaaagtagataagttagtaagcataatatataattcaatttttctatagtttaataattactaacatttttgttttagaatgtcacatgttatctgtcctgttgttttgatttagccaagtaggaaaaagtccaacgaccacctcaaataacaaaataaaattaaagtttgggaggctcattttgcttcccaaaattaaattaatacttttgtcacaacaaatatatataacatatttataatatatcttttttatataaatatatataaaaaattaattataattttttttttcaaaatttgacatgtactaaattataattttaatttttttttaccgttaaaaatttctcaaactactgagattgttgaatttaaaagtttttatcaaatttcttttaaatttactaattcagtaattgtttatata

SEQ ID NO: 306974 - DNA, 3409 bp, Cannabis indica
gtgattccatagacaattttcattctgattcacaatgataactttctctgcatatctggtcaaaattcactatatccagtcatgtgatgagaacatagaaattgtcaaataatttaccttctcattcttactaaaaaacaaacaggaagccaagtatgctagacatagtgtaacttacattttctcaaaactatttggaagttgaaactttagaggagctttcaatgcagttctttttctcgatatggaagaggggactatatattttgcctttttccattggtgttggccaatactctatgcctctgcggtttgttatccataggcaggcaccagctttactctcatcagtaataagctcaaatgcacctacaaaaggaaacaataactgggtatgagaagatagatcttaaaaatgctatgagactcacttattccacatttcaaggaattttttcaattaaactattcatgaaatcaattacagcattatgattatacaagcatctctatcaaatgctacaaagttttagacaagggtcataagacatacctttcaccaccatttccataggcacaaagcctcccataatgtcaacaaatttaggatctattttcaatcccatatcggtttcaacaaactgcattacaaaattgtcaataatagtaaactgagaaatcattttcaatagagattatctctctaatctaacttaaattagagtcttacctcaggacacaaaacattgacgcgaatgccttgacgttttaagggaacaagtgatcttgtaaacataacaatgccacctaaatagaaaaacaaaaaaatcaaaggttagcaatgttttaagaaaaaaatctgaataagaaaagaaacaaactagtggcataagcaacaaacttttagaggcagagtaagcagggtcaaaatacatcggatagaggccggcagatgatcccaaattgatgatcacaccaggtttctttgcaccttgcataactttaacctgttcagaaactgtaactgattagtgaaacacatcaaaacataacaccctcttctttgacagtgttagacccaagtttgctactaattattaaaaacacttgaccctcttactaataacattaaacactatagcagagaggtcaattcaatatataatttcaagctgtatctgactaaacccaagtggaaaaaatggaatcataccgcgagacggatgcaatcaatggcagcaacaagattgacatctacaacttttctccatgtagaattaccatcagattgatccttatggaatggaatttgagtaccaataccagcactggtaatacatatatctaaaccaccatatgtctccacatgtttatcaaatgcagcacttaaattccctgctccaacccaaatatcaaaaattcaaaatttaataataaaatcaaaagcataaatcatctacacaattacaaacaaattcctcctttttttttccccacttacttgaattagttacatcacagttgacggaaatagaagacgggaaatttaaatttgaatgaaatttagaatttagcgtctgaacaagattcgccacttccttccccctttcttccgataaatcaaccactgtcacgaatattcctctcgctccaagagccagacagagagcttttcctacaaaccaaacaccaccaaatacccattactaagcatatatatatcgatttgtaaaccatatatgatgaaagaactataccaattccagaggcaccgccagtgaccagagctgataatccgggcttgagctccattgtatttggaagaaggaaaaaaggatatgatctggtctctgtgtctgatcaatatgaagataagtttcgatctatgacactacgacaatatatatatacgtatatagatatatatatatactgggtggcatggcaacatcgttacatacgccggaatttggttttgtttttccacgacacgagaagtgatttttgtaatattattattatttattatatgaaatgatatgaattatattgcgtaataatgtcatgattttgactttatgatattgtaataataggccggcaatgtgaatcaatagagtatctccatttatttagggaaatttatacagtgtactaacttttgttatttttttacaaaaatactgttagacgctattttttacttttttactgtgtttttttataaattttatactgcagtatattgtgttaaattttcattagtgttctactgatgttttactggtgttctactgttgttttgagttgttctgttttgtgttttactagtgttttataaaaacacagtatttttgaaaaaaaaaaattgtgtgacagtatttttgtaaaaattaactaaaatttcagtatttttgtaagtttccctttatttataggttatttctattttcactttaaaatattcttttatatatatttttacaaaaatgtacgtaacaattaacaaatcaattaaaatgtaaatttaaagaaaaaaatttagaaaatagtatttaaaataatttttttatttatttattttgtgagggtctaattaacaaatcaatttaaaaagcaaccaaaattcatatataaactatcagagcaatttagattgtttgagtccgggtccaggtcggggtctgggtctgggtcagggtccgaggtctaggatcgggtcagggtcggggtcctggtccgggtcccaggtccagattggagattggtgttgaccacgaatcctttgtaaatattataatacaagttaatacaaattatttgttatgtattaaataatataataaactaaccaataagaatagaaaagaaaaaaaaaaataacagtagcagcaactctcaaatgtatatatttgaaaagttaaattttttttttgacaatgagttccatttttctgacagctacctccactagcaactccattggagttgcacctcgagatgctcttatggtatcaagcatcacaaaatcacaaaaagtggcatgtcaatattagtgcaaattaatatacacaatttgatttaataaataatgtaagaaactgttaactagtcgcaacgtgtcacatgagtatggtattggacatcatatggtgtctaatagtaatacttttttacttacccatacttaattgcactatattacactttgaagggtgttagagcatcttcaattgagtgccaaaaatataatgtatggctatattttagcacacttaaaaaattactagtccaatgatattctaaaaagtgtgataagtttgacatatgctaaaagatgtgtcaaatttagtacagtgggtaaataccattttagaccctgtgttttgcaaaagttacagattggacc

SEQ ID NO: 306975 - DNA, 1420 bp, Cannabis indica
ttgcatgtcgtcgtgacctgaattgccacccctaaaacgaggacgttttggatcaacttcttccatggaaggattacatgagactatacttcattcattcctactttcaatagccaatatatatttccattggtacttgcaactgactcttcaaagcatggatataccatcaaaatttggccacaaatgcaatatcaaactactccattctccaaaatccgaacaaaaggtcatcactttaacattactattgttagtctttgttcaaataacacaaccttgtaactatatttctcatcaatattattgtaacaattactatgttaaatccagattctatcatttctctatatactaaattttattatatatattaaataatgtatataccaaagagagaaagaacaaactagacactatatatttatataaagatgatcacaacttcatctaagttcgaatcttattaaaaggttcactaaagattaaaaattgatgaagaaagaacaaaatatttctttatccttttcaggagatcgaaaaataaaaatataattaatatattcaagataattacgtatttataaaatactgtctcaattcaatttatttcatcagctccgagatgtaatataatttcgaaagaaggatgaactagatatgaatagtttcaataaaatatatatgtagatatatgacctatcactaatggtttgcatatatatgaataataaaagaaaacatagggagcaatagcattgtattagatttctaactagtgcaggtcatttatcactatactaataatgatatcattaaaatggatttttaacaaaaacagggccaattgcatatatatctttataatgaatttttatggtacaatatcataaaaatgattgtccttgatcaaactgtaattgttttttcatatatctcaacaacaagatcaaggaatgaagatgctaagccaagtcctatacttctttaaaatcaaaattgttgagagaaaactctctatgcccacttaccaataattgccacaagaacattcaccatttctaaaatggtgaaatctcttcccatctctgacaacaagttccctctccactactcttgtcaagaacttgaaaaagttatggcaatcaccacagattctaagattcttgaagactctaatggtggctccttgtggaagactcaagagtccaaatgcaacagcaagtttctcactgtgagtagacaaagcatactctttatgctcttcacattcagtatcatgtaacacaaattttgtgtctgggacatatcccaattttctaatttcaagtcctaatttttctaaatacttgtacactgctgtaactctgggatgtgcagtgtcatcaaccaagaaaacattgactttgttctcaacttc

SEQ ID NO: 306976 - DNA, 2053 bp, Cannabis indica
aattttcttttttttgactgaaacggaagacacaatttaatatatggacattgacacattaataagattgaatattagtcggaattctttaaatttaacaatcttaataatttaagaaaaattttaacattctaaaaaattcataagacataatttgatacataaatttttatagataaaaatcataattagtctttattaaatcaaaaaatataaaacttaatattaaattatactaataaatattcggcacctagtgatatgcatttcttttttttttattacacataaaataaagagaaatgttaaagagaaccagtagtatctagtactttcttacgtgttaatattgttattggtttaactaagtattaagttacatataatttttaaaaaatatcgctaactaatcacaagacaacacgtctaaaaaatactaaacactattaatatctaatagtaatgctctaaaataaaatttatttaaagtcgcaacaaataacatgtattaataataattaaaaggatatgtttaggtaactgtaaactgtatttaaagtccacaagttcataaaattattaatattataatgttggctataattgtttatttctagaaagagatgaaaataaactttaataattgagctatacataataataataatagtaataatacaccacgtttgttgattgttctctcaataataatattattattgtgatacgacagcgttttgtttgtttgggtattttttaatacatttcaacattttgtgtggattctatttctgaaaatggaaagaacatcactttataagtttatatatatcaagaaacatactaaattttatttgttttgtgcaccaaccaaatattatttatattaagataggttatgacacaagataccaaattaatgaacttgagatttttttattatttatttttttgaaagggaaatgagtttaacataaaataaatagttatagattaaaataaattatatttaattatacatagattcaaattagactaatttgcgatataaatatttaagtttaactctcgattacagaataataactaagtttaatttttgacagtattgatacctaaattatatctttaaaacttttgtaaggacctagttattaaatatcaagtcaatggccacctaacagtttttaattggtccatgtcattaaaatttttattttttatttaaaaattaatttaaatatataataaaaaaatgacaacgacaaagtaggtaagttctaaaaatataatttaattattattaccgccaaaaattaaatttaagtatttatctaaaagttaaacttaggtatttacgccgtaagttactcttaaaattaaattcagttagagatgattaaattttatataaaaactaagttgacatgcaagatccaaaattagtatatttaattatgaattaatatataagttataaatatgttaacctaaaattaactaatttattattattgtttagacaaaaaaaaattatgatttggttactatatgtatttaataatgtaaaatttcaaaaaaaaaataatgtaaaatttcaagccaagataataaagtaatactttattttggagatattttaagcatatataatattttatttggatatataattaattatattttaaattttgcctatatttacattttaattttgagtttactactaagttaaaataaatttctgcattatataaatgagtgtggacaacttgttgccactatttgtgactaaggtgaagaagaatgtgaatttggaacagactccccgaaatgtaatccttagaagtgttgttgggaccttttgtcccagaaactgatctaggggttggtttggatgagcaacttggcactaatatagatgatgagagagtgggtatcgaatttgatcattcagatgagtttcgatgctcccttttacaacaatgatcctgtggttgatttgggtgtggtatgatgatgtggctacagatgtacctcccctgaggatgga

SEQ ID NO: 306977 - DNA, 1334 bp, Cannabis indica
aaaattatcaaaaattgagttcagtgtcttatttatactattttaaaaaatacataatcaatttggtaattaaaaaaaaaaataatctaattaataatttttgtaaagcataatgtttaaaatagtattaacccaaaaattattattatattgttataataattattattattcaattactttttactaataacataaatgttcgcacatgacatttaatttttgaagtgaaccctaactttttatcacaacacaccacacaatcctcaaaacacacgcaaatcttaaatgtcttcatatgatgttaactcttttttatgttgttgcattatatgaatataggaaatgtattttattcctttattataaaaaatgtaaccattctttgatgtattataaattaacataattattctctaatctactataaattttatttttgacatattttaattaagatagaaggtactctacattcaatttgatataatcttattttcaactattagatcaactcaatcttaattcaataattataaaactattttgttcgtaacagaacaaaattcacaccctatattattttttttataaaagaaaaaaaaatataagttgaaattgggcatttaaagctctctcattaacaaggtgggaaaacttgtgaattgaaaatagtattgttttttgaatatggaataaaaaatagttgaaggttggtggtggtgatggtaactaatcaagtgttgtagttatgtttatttgatacataacgtgtcaattttagggtcatctattcatttgtctaagacaagtaaagagtcttaagtaagaagagtagtattctagtgtagtacacattccaacttcattcaaactacactttcctttcctactcatattttccttcttgccaaacaactcacacacgtttaactagtggacctttttctttcaataaataaacaaactagtggaccttttagctctagttctactcacttgtacttttcttttcattttgtttttttgtaagtgattttcctaactcattttcagcaagaataatgataaatattagaggggagagaaaaggctaaaaagtaggggtgttcattggatcacatctaatggatttggactcatccgatccaatctaattatttattagatattagattttgtcatctgatccaatctaattgaattgagtcatccaatccgatctgatccaatggatgtattggattggatcggttccatccattggatgctttaactgattttttatttaattagattggatccatccaatagatccaatggatgaatccaat

SEQ ID NO: 306978 - DNA, 1800 bp, Cannabis indica
gtttttgctgtcactttctctctcatcatctctcaacgaaaccagtatctacttaatcaacaagtaaggacacaatagataagtgataagagtgtattagtaccattctgtttttaaattgatagaagagtctctgttcaatgttccactttttttgtttacccattttacagagaaaaaatgcaattaattatgagatagtatcatacaggaagaggagaaccaaaagtcctccagagtaacaatcacaaactacaataaagaaaagcattacctcaatatcattcacccataaaactaaccaaaaacttcaaagattattttgagagaaaagacgccctaaataaacagccggaactgaaaaattccatagatcaatttcctcaaagattataattctctagttaattataaatctttttttattttgtgtgtgtgtgcgcgcgcttaaccccttgaaaatcatcccaggcaaaacataagggaaaaagaaacaaaccaacagacagacctgccactcaagatgacccaaaactgctttcaggaggccttttctaagatgcaaaatgtctcgggaatccccctgcatcaacatgaaggaagttgatttaacaaattatacatacagcctctgttgcttgtatcaagctttatatgacctgtaactattagcatgtcttggtattgatgtcttctttctttagaaatggaagtgccttgtatcatggtattgatatcctaactacccaaccaaaaaaaaaaggattcactttggaaaggaggcactaagaccacgcccaatcatcaatcattcagttctatctaacaagtgtctgtctaaatgtaaatacatgacatgttagactaattctgattaaattcaggtctatgtgaacaacagcagcatatctcctactaatagtgagagtatactaattgcaccacttacttgggagcatttccttgtgaagtagcatgaaatgaagtacaaagctgacctggataacataactttcaattcagttaatgtgaacctcaaaataccatatgtataactcatatttgaaatacgatgaagaatttagaaaactaatgatggtggaattttaatgctaaataggtaaaagacgttgccattttctgattagaatagagattggtatatttggttgtgtaaaataacgtgtaaaaattatatgaaacttaatcttagtttgttatatttaaaaatagttgttagttagtttcctatttttcagactttttttattctttttataaagtgaaagaggtcattgtcttagactgacctcccaccgttatgcatagataacctcacttatggcataggaaagtcgtggtaaaaatggaacagaaagaaataataaaaagaatacacaacaaaataaagccttaggatctaataaaaatagaaaggaaaagattttttttattctgagttgttacagtttgtaatttataaaaagccatttggctattcaacatatctccgggatggtgtatctgttgcaagtccagtaatgaaacgaccgagcatatgttccttcattgcacatacactcaaaaaatctggtcattactttataaagaatttagtctggactggattatgccttgtttggtgacacaggccctactaagtaaactggtgggaagcaaaagaaaagttaaactttggaggactacaatgttagcactgctatgggctgtgtggaatgagaaaatagcagaattttcaaagggcaagagagatcaacaaactttgtttgggagagaata

SEQ ID NO: 306979 - DNA, 845 bp, Cannabis indica
caaccctagggcgctagtatcgagaggagaagccccagcaccagcaccagcactagcgttattgaacaagcgagcagcgatctcctgcgctcgttgcttggctagctggatctcatcgaccggtggaggaacgttgttgtaggagtcgggagaggaagaagtgattggggcagagaatccagtgggtcgacgaggcggtggtggagtggtttgttcttcgtatttgcgtttgttattggtgacagagtctggaccagaagagtactgagcttcgtcggccattgttgtatattttggataaattggaaaccctagcacagagcgcagagacaaaggagagagaggcttttgttcgctactctttgggactcgccttttatatgatgctgatttgatattcttcgctgtatgtatttttatacgtatttgtgtaattttatgtaaacgtccctattgtttgtcgtattttgcttttaggtggtctaatattattttgtttcgtttaactacttattgttttctatagcttaatggttattacctttttaaaatacaattattattatttttaatgcaaaaagacatccaaattttttgataagttaaatgggacctaattttacaaagaaaaccttatatttatataacttcttataaaagtaatataatttggattgtggtaagaattagtcataaacatgagttttagtagtaaagtgattacacgctggctttaggtatagacatactagggttagagctcactcattttaggagcgtaaataaaaaaaaactgttaaaaatactatttatctttatagtaaaggttcaattttttttttttt

SEQ ID NO: 306980 - DNA, 1675 bp, Cannabis indica
ctaccgctcaggtaaggaaaaatcgcctagtaattctgttaaccaaaatgatagagtaacatcaccctatgtgcgaaaacaatctctcaaatctcaccaagtaagaataaaaaaaacaaataaaaaataaatgaaaaatatttaaaattttcacttcagaaaattcaatcataatgttcattaaataccattaccatacaatcactcctacaatattatgatgcacctcaccaataagcataagttattaaatgtcctataaatgaggtctattttaaatgtcctatagtataattttcgtatataacgttcaaattagtgtgaatactatagacattacttgtaaaataaagatgcggatatgttagagtatattgatatttggtgccaaatgttaaattaattcggtacaaaaagtatacatatatagctagatgaatattttgtattcaatactcgatcagaggatgtcattttctctatctgagattgttttgtttggaataaaatgttaaataaataaataaaactttaattcttaagaaaaacaaagcaaacttattttctaggggggaatggtatatattaactcatgtaccacgaatcaattgcatattctttttatctttctttatacttttacatattttcatatgtactgtttttttcatggcataggtataatttataaattatagaaatttaaagagcataaaagtgttttggaaaaattgtattcttctttcgagaaaacatcataacaatagaaaccttcaaattttctactaaaaagtttaaaaattgtgatacaaaacacaataaagatttccttgccaaattttttatgaactagatttttaaaaacagctaaaaactgataagagcatgagtgatacccatttaaattgtacacagttattttacgtaataatttataataaatattaactatttataattttaagttaattagaccatattattttttaattatatgattgagattaattatacattatttgtatgtaagaagtgtgtgtaatttaagtgtgtcctaattattttcctaaaaacattttatctaaaaaccacaaaataaaatataactaacacattttcagcatttattaatattgtaataatttttcatcgtactgcaataaaattttcaataagacttcaaagaattctcatccacgaattcttgatttgtataaattaatgttcatttttttttctaatcaaacaatacttttaacatatatatgtcattttatattatattaattattaattagtggccagacaagaggagctcttggaatggagaatcttgttctttaagcactcctctttttttttttagcaaagtactcctctttttcatttaatcaaattactttttcttttttccttcaatattttcattctttaatctttaaacaatagtaatagcatttttatctaaattcaattaattaatgaaagcaatacactaacactatacactacacaaaattttccttttactgccaatcaaaagaattataacacttcatttgcctttataggacaataacatgttattaaccattatttaggttaacttttaaaagtttgcactatgtattataaaaggaaaattttattaattgaccctaataaaataccccat

SEQ ID NO: 306981 - DNA, 1570 bp, Cannabis indica
aattaaaaaaaaaattagttgaaaataattaaactcagggtcatattttaactatttaaaaaaatacagggtctataatgttatttaacaaaatagatgatctaatctataatttttacaaaatatgggtctaaaatagtatttactgaataattaattagagagtaaattgttttaataataatttattatattcttaatttgtgtgggctatactatcattttcctttctaaaatttattaaaataattgtatatgaatcagtatcataccattgattctcatttcctttaagtaaatatatccgaaaaacattcctattgttattgctattaataagtgtatatcagtcggtttgattggattatagtgtattttaaccaacctaatataaatattggggtttttcctctatcatataaattaaaaatttggcctaaaagaattttctatccttgcccttttacttcgcctggactctacttggatttcatcaattaccttttcttgttctcgatcatccatcgtttcaaatgtttgcttaaaagagcttcgtccaatcccattatctttgcaaggacatatatgttcaaagaatgataggttctttgattctattatcgtattattgtaaatgtcgaggtttctagactcttgtacaagaaattgatatgcattgctattttttgtatagccaaaaaaaattacaatctactatttttgaaccgattttaagatccatgaacaattgtgccccattttagaacataataaggaaaagaattttgaatggatcgatgagtgtgagacagcctttcagagcttaaaggaacatatgtcaaaggctctgatattgtccaaactagtagagggagagcctttattcctatatctagcagtttttgaacacgctattagtgcaacactagtttgagaggaagaaaaggtgtatcgtccgatttattatgtcagaaaatgaacgataggtgccaaaactaggcaccatctcataaaaaaacttagtctattgtctgctaattttgtcccggaagctgcgtccctacttccaagcgcacacaatcaaggttctccttaaccatttgctccaccaagtccttcaaaagcccgagtcctccgggaggcttctcaaacgggtcatggaattaagttagttcgacattcaatatgtccctcacatctctatcaaagggcaggttttagcagactttatcatggaatgtaatgaaactaagttagatgtagatctcccaagagtatccacaccttcttgggaggtatttgtagacggagggtcaattgataaaatatttagagtagggatagtattggcgtctcccgaaggaattagacttcaaagtgccttgagttttaagttcaacgcctccaacaatgaggcaaaacatgaaggtttacttgtcagactccgattgtccatggcagtgggagcatcccacattgaggtatttaggggtgagcaacggtcagtttggtcggttttttacacaaaaaaaatccaaaattcggttttcggttttcagtttttatggtt

SEQ ID NO: 306982 - DNA, 1608 bp, Cannabis indica
aagaataacttcaatttattataaaaaattaagtctcaatttgaagaataaaaataatctttaaattgtaattagttatatattttttaaatctcgtatacctaaaataattacacacaccaatcaattagtttgtatgtttaaaaaataaagtattacaaatataacttccaaatatgatccgatactactatataattattattattataggtttaagtctatttttatttctatttgtttgattttatttaatttattctttgcattattttgtttttcttttgaatggattcttcgcataatattgattatatatatatggtgttgaaaactatatactaaaatctgtgtattcatcaatttttatttttcttctttaaatctcttgtttatgtaatgcagaagaagaggtggttttgtgtcagagactctgcaataaaaaatacagaccaccaccgccagcaccacgaagattcttcgtgaacccaccacctcaacgtagaacaagttgcgtcgacacttgctcagatgcatgccgaaaagagtaagttgtactctcttaacttaataattactactattactactattactgttaacttattaacttatatagttcaataatgctaaacatatatgacattgttacttagtcagaacctgtaaaagattgttgaacagtataggattgccaaatccaacacaacaatcttttacaggttctaactagtatttgatgatctcgcgtgatactgtcacgtgagttcaaagattgaaaatagaatcttgaagtttaatttttgatattttaattttttatttgtagcagagataatcgtgcagagtgtataagaaactgccacaaaaaatgtgaaggaggaagtctctaggtaattctaattttttttaaaaaaaaataagagtaataatttgtgcatgaataaattaaacaaagttggacacaaaaaattcaaactaatggtagatgtgtgaaatttatatctgtatatatcattattcattaattagtatacacttatgtttcaaattttcttacataatttcttttcaaagtaatgttacccgttagccagctcactttattagaacttattactctcaaacttctatctttatatattacagctaattaagatttttggttctgaattttaatatgtaataaattatatcctctgaatttgtgtctgttaaaaatttttgttgaattattgagattattaaatttaagggcttttgtcaaattttattcaattatactgatttggccatatataaattatgcttctaagattttgatatctaccaaatcgtatccctcaaactttcacatgtatcaaattatgccccatgagctatagacttttcttactaaaattggacaaaaaactttaaatctaacaatctcaataattcaaggagaatttttaacggccttaaaagtttaagatttgatacatgtatgcagggccgacccatgagttaaaatgggccataggcaaataaaatattttgagcccttactctaaagataaatggtatttttaaaaattattaaaaaaatatatatgtatattttttaaa

SEQ ID NO: 306983 - DNA, 1941 bp, Cannabis indica
attttttcttttggttctgcaggttattgaattcgttaagaaaaatattggaacatatacacctcttttagcaggaaatacggtctatatggatttcatattcataaaggtaaaatgtttttgtaatagttactattaaggggagatttagtgtattttctaaccccttacctctttctttctttgttcatttactagcatagtttttgttttctttcagaaatacatgccagaattagctagccttttctcccatgttgtagttgatgtcagcagtgtgagagctctatgcattcgttggtatcccagaggtacttaaaaatattaagtccttagctaaatacatgaaagctactttcgtacgttacttaagaggtgactggccttctaaaatgcttagaaattgttttcactttaattcactccattgattttgtttccaaaccgggatccccagaaagttactggagaactttattggttttagtctacttaagtgaaaactttacctaggattgacctggttttgcttatgaagttgcatgttcatgtagctaaatgcatttttttcttggataactgcactaagattttgttgatcatgaagcaatagtctatataatatatatgtatatagtgtcataaactgatgtagaaattaggggaaaatataaagaattgatagaacgagaaatttagagtgaagtgaaacaatggatataaaagatgattttaaaagagaaagcaacatttttaaagaaaggaaatctaaacacgtataattttattccgatctgaaaaataacgaacaccactaatattatttataaatctgttaaacaaataataaatcctaggaatctaaaaaacatactagtactgtagttgcttaatattatttttttagtgataatcctatattctctattcaattgtatcaattttgtactttgttgtttgtcttgggaccaagttaatactttagtattcaattaaagaccattttgaattttgattacttatatatggtaaaatgattcaaaattgtacctttccagttgccactaagtttgggcaagatttttttgaataattatttttgacaaattgttttaaattatttcatttgattatttttgagatctaaaacatatttataatttaactgatactgtggaagttctggttatgctatactccagtatttgcaacaactatatttccttacatacatgttatacatcgtaccaaaagctttcccctagttctttcaaagtaatctaattctttatgattaggtaacttatgatttaatcatcggatccatttattttggttatgcagatcaaggaaagccccaattaaagaaagtaaacacagagcaatggatgatatcagggaaagcatcatggaactcaaatacttcaaagagaatatatttaaagcttcaaggtcaaaaaggtgatggggaaatggatgtgggattaagtgtgaattttcagtgtgggggtctaattttccatggtacttccacctaggtctcttttctaatttgtgaaatttggtataaacattttgttcaaacaatcctgcatagtgcagcgattttggtttatttggggaaaaccccaacctagtgtaaatgtaccatcataaacgtacaaacttatttctcctagaatttatctcatcttagaccattttttctcctattcttatgttgcatttgtcagtggtgttgcttgcctactctttctccaaggaactgtttccttatacttttttctttagggcccgtttggtacgtaggattggactggattggactgaaaaggattggactggactggacaagattggataatgctgaaagtaatgtttaagaatggactggactattttatttattttcttttagaaaaaaaacttaaattaaataaa

SEQ ID NO: 306984 - DNA, 1440 bp, Cannabis indica
actagttggtttttttttttttgacaatgaacgagatgactttacatgttaatacttctaattttttcttaaaaaaaaataggacctcatcaaaacctcaagggtaaatcgaatgggagaatctcaaaagaaaaaaaagattgtttaaaatatattaattaagtaatgtcaacttaaattacattatgaatacgtgatcaaaccaccaaacgtaatcatcagacaaatataaagttagcttaaccaatgaatgaccagcactattatccatcctagaacaaaaacaaaaagagatactattaaaaaagtcacattgagcaataatatccctaataatacatcgagggccatcttaacgtgttaggaggcctagggtgaaatataaaattagactttttcttgcaataataaataaatattaattaaattttgacacaattttcttaaaatgctactatatacattatatattagaataatttttaacaatttgtactattattctttatatgatagatatgagcatagttattaggcattagtggtgcccgtatcactacctaaaggtgacgttttatgattggttaatgatattccacaaaattaaattatatgaaattcgatacttaattacactaatagcgaaatgatacatttaaaagtattaaacaccactaatatcttttaatatttttctatatatattaaaaaaaccaaatatttaaatatatatataatgaaccacgatctttgataattaaaaacaaccaaaaagtggcaaagttgagtttgcattataaacaacacacacttgccaattgtgctgccataattttattaagattatagaatcatatatttatataatattattatctctctatatgtatcctaattttaaattttgagggcctctaaaatagtggggctcggggcctaagcctcagttgccccactctttagttggctctgaatacattccaaataagactaatcaacatgacgattattaatagcaaggaccacattaacacaatcaaattcgatgaccaccgaatgatatccaagcttgaaacacaaacccatgctagaataaattgtcaaggcctcagcattagcggactctaggaccatgtatgtacaaaaagtagtgttggatcttattttaccaagatcttatttactaaacaagtatgttgattattgcattataagctaacatcataaatatgcaaaacaaaactatgtaaatttaaacatgtaaaagataagatttctcacattgagttgcagtagaatataatatcatcttccgttctaacactcaaaactttgattcttttttgtcgtaaggtttcaaataagtgtagaacctggatcttcaagcttattaattttttaacttattaattcctccttgcgccactatagatttagaat

SEQ ID NO: 306985 - DNA, 1435 bp, Cannabis indica
catgtaatagacgggatattgtctaccttggtcttcgcgaatgagcactgagctaatcgcatagtcaacactgtagattgacatactttctctaggcaacggctttgagagtattagggtcgcccacgttgtatttttagagcctaaaaagactttttccacatttttcagtccattagaatttcttatgccttttaaaatctaaaaaaattatgtacacttatcagaagatcatgaaacaaaacgattcaaagcagcgaccttactagtgaggctttgaacttctttgggattagtaggagatcgcatctctgctaaggctttaatttttgcaggattggctttgattccttgctagttcaccatgaagccaagaaacttctcaaaacctacactaaagatgcatttgagcaggttgagtggcatcttatattggcataagattctgaacatcgagtctagataaacgacatggtcggtcgcgtgttgagacttgaaaagtatatcgttgacgtatacttccatagtcttccctaacaaatctgggaatatcatgttaagtagtcgatgatatgttgcacttgtatttattagaccaaaagacattactttataacagtacaaatcttagtctgtaatgaaggaggtgtgctcctagtggagctcgtacattaggatttgattgtaccccgagtatgtgtctatgatgatgagcacctcatgacctacggtcgcatcgacaagttggtcaatgcttggtaatggaaagttgtcttttggataagctttatttaagtttgtaaaatcgacgcaagtgcgccatgagccattaggttttgggactaggacgggatttgctaactagttcgggtaaaacgattccttgataaaactacacgtgagtaggcggtcagctttctcttttagcacttagtacctcgtggggccattttgcggcgcttttatcgtactccttacacatcagggttgatgttcagccaatgacaaatgagcttgggtgatattccaaccatgtctaaatgtttccatgcgaaaacatctaagttctgtttgagaaaggtaaccagcctttctcgcctctgcagtttagtttagaaccaacttttacaacttttgaaataattgatatgtacctcaattgtttcctcaacagcttgtgatgtgttcgcgtaatcgaggacttagggatcaaggtctggcttttccgcatgaggaacttcctcaattttgaatgattcatgtcatgaagacggcgcctcaagcatgtagatcatgttgtacgattttttcttttctcaatcttgatgcatcatgtacaaaataactttttattttttcttaaaagattagagaaataatattactttttaaaagaataattattagttattgatattaaaatattatttttagt

SEQ ID NO: 306986 - DNA, 1965 bp, Cannabis indica
gagagagagagagaggcagatttgaggtcaggtctgagtgagaggaggacgagacgagaccttcttttctttttctcttttattcctaatttccctccaaaccaaatcaccaatccctaatatcaattacaaatatggtactctcactttttctttctgattttctctcaaagtctgcaactttggttttgattttgatgttttgttttttttttttcagttgttcttctcctactttaaggagttggtgggtagagaagtcactgtggagctcaagaacgatctcgccattaaaggaactcttcactcagtcgatcagtaccttaacatcaagctcgagaacactagggttgtcgatcaagacaagtaccctcacatggtatttattttcttttcttcttctgaattttagggtttagggttttgcgttctttgtgcctttcctaacgaataaactgtcaagtcatacccttttgactgctctcaccttgactttgataaacaataacgtgaaaatttaatgtttctgctcccgaaagcttgctttagctagctccatgtggagaaatattgagcttcgttgaacttagatatagactcagaaatgcgatattaattaccaacacacctttggttttgaatgtgttttatgcaagtgtatattttgctatgctctcttgagtggtttatcttattaaatcattgcagggttattccattttttcttagttgtattgcatcacaaattatagagtccatgggcactttgatgtgtaatgaaaactgtattttgttgacattgtcttatactatactagagaaagtgtaatcttgggttcatttagatagactaggccttcaagtccctaaaaaatcaagtgtctgactatcagcggtgcgaggcagggagaaaagaacatatgattcgtagttttcttttagaaaaaaagcttctttttttttttcaatttgtttattttataatgtagttcatgtaaaaaatgaatctagcttagtctaatatggtttagatattttgttagtagcttttcagtcatgtaaagacttgcatagtgttttgctatgcattattctgtagcaatatagtttcacaagaattttgggcttaattatctaagtagattagctagcgtggtaactttggttctactaatatttttattctatctttcgttgttttacgcatttctggattgtaaaaagtttggttgcaataacctttataatgatcttacatctgaattgaattctcttatgtatggtggcagtgtacctttccaatttaacagactatttttatttatggtttcagctttcagtgaggaattgtttcattagaggttcagttgtgagatatgttcaactaccccctgaaggagttgatgtcgaattacttcatgatgccaccagaagggaagcacgaggcggctaaacctcaatgataattcagtttagactctgtttgtcagacctttgtagggttaagcatatttttggaaaattgaactcaaaaactagaacttctcgatatatatgttatttttatctcaatcatttcttgtatttaactgtgagtaactaccttgatgaccagagtggttcttcctttttgactgcttcctaccctacttcataactggggatgtgtcattgcagttttgatgctctgtcacgtgtacggtgatcgcatcaccaattgatcaatatgactcacttttttacctctcattatttctttttttttttttggaagttagatttaagaccattgctttatggtggttgctagaccattgctttatgtgtatgttgcatcaaattattgtagtccagtattaagtattaggctaattagtaatttttttccccgaactttgacatatactaaatcatgctccttgaactttttttgccgttgaaaatttcctttgaactattgagatt

SEQ ID NO: 306987 - DNA, 1157 bp, Cannabis indica
attaccttaaaagaacaaggggtaactagttatctctttagataatctcttatagtattttaattgtgtattttaatttttttccacaaatattttttttgaaagtgaaaaacagtataaaaatccataaaatatatatttttactattctatttctattactgggtaaaaaggttttttattactaggtaaaaaggttaaaaaatttatactaatataatatatatctatacataaaaatgtacattttataacttataaattatatatattgattaggtagatacaaatattataaaaataatataaatataataagtaattaataattttgatgttaaaaattaattcaaggctttataaaaaatgaaaatatataagtttaattacaaataatatataatataaattaatatattcatgtatatatattgaattatgagattttacaatttacaaataaaataataatttttaatttcacattctaacgacacaatcaaaagatgttagcgtttgagattacaaccatttggatttacacaaatagatatgtacaatctttaccaagctctacttttattgtaatttgactttacctacacttacagataaaagtatatttgtgagtcgacagactcagtaagaaaatttaccgctcatacactcatttaccataagtctactaaccgtatctaatgggtataaattggcatctaaatatttgtgcctatagtatgattaaccataatactaaactaattccaacactctattcgtactgatgttggtaacattaatccatactattcaatagtttctaatatactagatataagtatcttgatgcaactctatgtacatatatactattttctctaatatgctacttatatgggaatatcatacatgtgtaactaaacatgtgcatatgcgcagctgaatatttttcttacctcaaatcctgattcaggtatgctagtcaacctcagtaaaaatctgtttgacgatcaaaggtcctaagtcaaattagtagtaaattggtaagtatctcgctaaaacactttctaaaactagaattcataatttgaagtttctctatctatatatggtggagttgttggaaatattttatcaggatcttagatttactaaca

SEQ ID NO: 306988 - DNA, 2664 bp, Cannabis indica
aatatctcacaaaaagatgatatttgaaatagagaaaattaagcaaaaaaataaagctgaaacttcaagcctgaattcgactatcttctgtttatattttggaaaaaattaaaacataaaagttctagatctctcttttatcttttcgaaacatcttgaatcgtccgagtctgagtaatatcgagagggttatgaccaaaatactatcagtcgacgcagtagaaaaatcaccgtcgaaacgtgaaattccaacacgggccgccgcatgataaagctgggctgcggcctgcccccctaaacagcacaaaatcatatttttttgtctcacgtgggttttggtggtttcctaattcgaataggcatttaacatgtgtgtttttctatctttttagtccctgaaagcctatataaagggtgaactggagtttattttaatcaagcaatttcagagagaaataaacagagaatatagatgcaaattggagagatcaactggaatattagaggcattcttcaaagggttttcaacattgttctcttctctagtttcatcttctttcttaaagttaatatgtgtgattgtgctctcaaaaacatgagtagctaaacatttaattagggtgtagatagagattgtttaatattgttttatggttttaatatgatttattttccccctaatttttatgtactctattttattttcgtacttaattacttttaattgtttggccatcaattaattgttttatgatttcgatgcgagctctgagaagtaagtgtcgattatgctatagtgaaatagaacttaatttcgatacaggacgagagtacatgtatggtttagatagcttatcgagtttctgtgtttaatgtctgttgcatgttaaatttatcacgagagtagaaagaaagatagaatgtgcatgtaattgaaatttatatatctgagatgactataaattaccttagtaaacctgctattgcatagaaattaataattaaaaataatcatattagaccatataatcaatagaatcacaattgaaattgaagccctaattttaattaactgtcacttttcttcaattatttgtgttttactagttttcttatttttaaatttcttaatttttaaccaaatagaagtaaaagtttaattttaatttccttaagtacaatttctgtgagatcgacctcactcctggtgaatttattacttgtaacgatacgtgtgcaaaatatcacaacagattcagaaatgcaaaggtagcaagttgaggaaagagatttatactttaatttttaatgctttcgtttacttaagagtggaaaacaaaggaatagatagtgctcattattttaaattctgtcaaaatagtttaaaatggttgtaaattgaatagatagtctttgatattagacgtgagggatatagatagaagttggtttgaaaatatttgtaaaggagaataatttattgtaattttttattagtgagcaatataattgattgatttacccctaaaaaaattatacattccatttctcaaaaacatataacacatctaatatatatgcctatatatgtatgtataccatatgcagttgtttgaaaattctatacagcataatggtataataagatcgaaataataaactaaacaatatatataagaaaaaaaaaagctggactattatttgattatttatttatttatataattaggtacatatataggagtgtacctataatacatagtttcttatattttccatacatacaacataacaaaacatataataataatattaaaatagtagacatgaataatacgtacatataaccatgcatgcatacagtagtagtacgtactaatagtattagtacgtactattcatcaaactagaggatgacgaatatcattatttttatttttaggaaaaaactcatttaatatattggcattcggaatacaatatcccgaaccaggtacatcgctttcccgaacgggttgcatgcagcaccgccgggatcacagtcagaaacaggcacgcattgtcgacccgaaccaattattggacctcatccacaacttttttttgaaatatacgtttacacataccaatccactacaacaaatcttcgcttctgcccaatgatagtattccccggctactctacaacggtcatcaccatagcacccctgcaccaccatcatcacaaacattattatgcccacaaatttcttcattttctacagatgtttataatatgtagtagtagtaatgcccctattgtccttgatttgcttttctattgataggagaaaaattgagaaatttattttcttatttcttttttgcattgatgcaacctagctaccaactactacaatatttgtcattgatcattcccctgaatatataatttataaatcaagatatgttatccttagtcataaattaacattaaaaaaattatttttagtcacaaccttttagtcataatataatttctagtcacaagttaagtaacttatgactaaaatatcatatgtaaatacaagttgtcattaattaaagtttagtcacaactaatattgtgactaaaacacatttaatgatcacaacgaattgtaacttatcaaaaaaaaaaaaaaa

SEQ ID NO: 306989 - DNA, 2805 bp, Cannabis indica
ttttttttataattaatctgataataatattgatttatgcagtgttagcatcatggtttagattgaagtatccacacatagcacttggagcattggcatcatcagctccaatactttactttgatgatatcacaccacaaaatggatactactcaattgtcactaaagatttcagagtaataataataataataattaattatatatactttttctttattatattatatatatatatatatttatatgtaattatgtatgtaggaagctagtgagaattgctatgaaaccatactaaagtcatggtcccaaattgataaagttgcagctttgcctaatggcctttcaatacttaccaacaaattcaaaacttgcaggtataaattaataatcaaatatatattactaatatttattaatttaaataataataatgtcatcttaattaactatatatatttttttcaataataataatttcatttgacatgtaaaattcctttaattaattaccacattattattcaacttaaactatatattaattataattattagtttaagaaatttgttaattccctataaatatctattatatatatctaaggactatgctaataataatgtttacttcctttcaacagataaagttagttttttttttttgacaaaacaaattaagtaattatagtatttaattataagattgatattaattaattaattaattaatgattattattattatttttgtgtagtccattgaagaattcttcagaattaaaggattatttggggacaatatatgcaacagcagcacaatacaatagtccaccaaaatatccagtgaatataatatgtgaagccattgatcataatcatcataatgatgatgacatacttgataagatcttctcaggcctttctgcttatgatcctaacaaaacttgttatgtcaatccaccaaaaattcctactgaaactgatcagggttggaaatggcaggtataatatatatttatatatatatatatgtgtgaaattaccaatttaacccttgtgctaccgaaaaatacatatgtgatcagttgttatattttgtcaaaatgataaaattgatgatcatactttgattgagctcaaacttagtcaaacaatttatctgtgatgactgtgatctagctaagtcgaacagtacgtgattgaacacaatattaaaaattatgttgaccggaattgaacacagtgcatcaatttatttcattttgtaaaatacaataaccagtaatttatatagggtcaggcctaagctaaggcgggctcggaccccggatttggacccgaaccctgacctcgacccgggacctagacccaaacttcaaactcaaacctcggcctcggatcctgaccctgaccccgactctagatccagactcgaacctcaaccccggacccagatccagacccaaatcgggagtcggacccataccccagccccggcctcgaccctagacctagacctgaatccaaaccgggatcgagacttggacctggacttggggatttggacccagacctcgatcctgacctagaccttggaccttggacccaaatctcgaacccgaaccctagatctgaacctagaccctagacccagactcggaaccaaaatcgaatctcgacccagaccaagaccaagatctagacccaaacccaaattaagacctcgaactaggacccaaatccagattcgaccttgcaaaatatatatagatgtaataatatatttttaatatagacattctatatcattaccttatttaatatatatatttattacatagacatgtagtgagatggtgatacccataggcattgagaatgatacaatgtttgaagcttacccattcaaagtagaagatttcattaaggattgcaaagactcttatggggtcccacctcgtcctcattgggtcacttcatactatggaggtcatgtaagtataataataataataataattacttcaccaattaaatatccttaattagtattcatcaataattaattaattaatgattaatttcaggatattaagcttatactaaatagatttggcagcaacataattttctccaatggcctcagagacccttatagtagtggagggtatgtatttatatatataattatttattaatttatatttaataacttttaattataataaataataatctcatcctaataatatgtagggttttggaaaacatatcagatagcattttggccatcaaaacaaccaacggttagtatcacattttcattatttcataaaaatataaaaagtataatatatattaatttgtttgatcatatatttaaaattaattatgttaattaattatatatatataggatctcattgcttggatattcttggaagaaaatcaagtgatccagattggttagtagagcaaaggaagattgaaatcaacatcatcactaaatggattactcaatactatgctgatcttacatcattaaaataatataattataatatatttatatatatatatatattttgtatggtgctcaagacttaagtcttttagtattaatatttattaaaatactttaatctaaaactcaaatatataataattacaaataatttttcattatatactttaatggaacacttttcaatgcatatggttagtatcaaggccggctatgatggagtgcaaagtgagctactgtatagggcccaaaaaaaataaagggcccaatatattttt

SEQ ID NO: 306990 - DNA, 592 bp, Cannabis indica
aaaaaaaaaaaaaagaaactacctgattttgtcggcttctttacacaaaatgccaactctttttgactcactcagtgactcagacaaaggattttcattagtaaccgttgaaaactttccgaacatttatttacatgctgaccatgtgcatgagaagccatatgcagactaaagactaagtgggctataaatttgactcggttttaagatatttggtactttaaatttaaatatattttttttgaactgggtttatataaatattaatttggcaaaatattatccaattatattgtttagtgtattagtaaatctatttttaaagaggaagttatagaagattaaaatttcacactttcattttgctttttgtattattgttgcgatttgaacttaataattataattactaatttaaaatgtagttatactaaaatttatttaacataattggttatttagtagaggcgaaagaaattagaaagagtaaacatcaaaattaaaacataattaatttacaaaaaaataataataatatataagaaaaatacaataaaagagagtataaatataaaaatatttacaaaattaa

SEQ ID NO: 306991 - DNA, 1761 bp, Cannabis indica
aacataaaatgttatttctgatctctattaataagtaaatctgattatatgaaatgagttttatttatggcataaaacccaacattgaatcagaaatagtaaccacagcattggaagttgacagtcgtgagtgtggaattggagtaccagttgctggtagagtagaagttgtatagcttttccccagtccagttataaattgatttcctacaccatgatcatcgacaaccacacttttacccttaggatcacttgtaagattggtaccaggcttcttaaaattcactccttcagataatgcagcagaaggtgagaagtcttgtgaaaaaccagtagcagcaagtggagaatttcaatgtggcatatgctgacttgaagatgagggagaaccaattgaggggatgcatttttctttatcagttggtgatcgtggtaatgcagggaatggggtagggtgagttataataggattgatagtgttacagactaattgagtgataaaaggccacgaaccagatttagaaaaatcctgacgatatctatcataacttgatcttggtaatgccgatccttccatccaaggaccatattcaagactaggatcaatgccgtcatcaagtttttccaaaaataaagagcatttgtcgaaaacatggccaattataccacattcatagcaaaaatctgggagtcgttcataccgatagtcaatccaaagttcatcacgcaaccaaggaagatagatcatttgaccacggagaagaggtttggacacatcaataccaacccgaatcctcaaaaaaggaccccacccttcattaagagagtcatcatgaacttcaagaaattcacctatgagattaccaataatcttggcaagcgcctcagatttactgaggaaaggtaacgtgtaaacctggacccaaaaaggagtgatcgtatatgaagaaattgagccagataaaagcacacttggggggcataaaattagatgctgattatgaaaatgccaaggctccttggacaacacccttctcatatccccttcacaaccaaaagtgatcatgaaggattcagaatcatagtcagacacagtaacagcaaacctgcccaaccattgtttaagaataaaattcttaaattgattgggattgaaacccctcttagaatatatacgacagagtacacgaacagaagtaacgccaataggaggagccgagataccctggatattgaccgcagccctttctcgctctgaaagggcctttgaaacatcattcaagaaggaatccatgaagattagatgacagagaaggcaaaagcagatgaaaaaaccagaaaagaagaggaaaaactagagctagtttttgtttttttttttaaaaatacgaaggcgggaacggttaggtgaaggaaaaagggattgtaactgaagatatatggttaaaaagaaaataacgactaaaactgccacagagcaaattgtaaagggcagacaatgctcctcaaaattatcatataaatatttatttgttataattaaataatactttgagattatagattttttcttttatttacttttgtatggttatttttatgccatatttttgttaaaaatgttagaaataccatattttatatttttattatatgaaccgatccagaccttaaccaacacgatcacacattaaaaaactgctacttttagtgacaactttttagtgataacataattttttttgtgactaaaatatagta

SEQ ID NO: 306992 - DNA, 621 bp, Cannabis indica
aattacaatcaacaataaaaaaaacaaaattatcttcactgtcagttcagcacaagcattttaagattgatctacaaatgcacaaacttctaaaaatacaaaattaatcttaggcaagtactaagattaatttgcacaagtactaagaacctactgcacattgtcagttcaaaacaaaagtcttaagattgatctatagtatagataaaacaaaattctcaaaagtgtaacgagtagtgttacaaagtaccaagtttaccttgcataatttctcaatatcagctgaaataataccaatgacgtcaaaaccacatgtttgacagcatttacgcagcctctggaagaaaaataagatgagcaaatatcagcaacaagagggcaaatgtctgacagccattataatatcttaaaatcaaaacatgtgacagaaatacacgcataaatgaaacataaatgccttaaaaatcctgcaattactgcatagttacattagtacataaatttatcatacttctgtaagagttatctcaaagctccaaaaaagaaaaagaaaaaaaaataaaaaagaagcaagtttttttaagggcatttttcatcaatgtacaactaaatttactatat

SEQ ID NO: 306993 - DNA, 3570 bp, Cannabis indica
agagattacggaatgcacgatcactcccaattccacgtgcattccagctcacaagcttcatggcagcaggcaggcctgctcagtggccaggcttgcgctttcaggagagacttcagtgacttgtggattgtcagagcgagagcgcttgatttttcgacggagttccccgttcaccatttttgcttgccatttgatcctatcctttgagtcgggtttgtttctcttttttgaaacctttgagcccgagggagtggcaggctggtaggtcaggttcattacttcaagtcgtttactagtgtcaaggagggggatgttttcaggcaaagggacagggcaatatttggagctactagagttttgtgaggtgtttgtgtgactcggggtggaagctagtggagctttttgagcactagtattactcatagtggcgttaagaagggttgtgaaggatggtgtgttggtgtcgggttggtgtgggattgtaatgttggtctgagtatcaacatggatccattgcgcggtatcatgggtataagatgaagggctggacttgtagagtcccacttgttgggtttggccgttaggggggcttttgtcttgggagtcgtagatgggaaagggaggcatggtttcgggtggagtaacacaaacgacactagcaggattggtagtcatgaacgtggacaccggaggattggcaaagttaagctgttcaggacacaacatagcattagtagtaactttaactttgtcggatatggttttgatatcataccttagctcgggtgggaaaggggcttcgtcacaagctttcatgtagtccacacatcccttgttatagctatgtcccgtgcgaccacaaaagaaacagatgtcgggaagattctcatactttagttcgagccaaacaaccttatttctacctgagaagtggacgggtattccacaagggaacagatgtgcaacatcgaacatgacccttatgcaaaagtagggtccccatgtctcacgaaaagatggctggtagatttccaataggtggctgagagaagaggagactagctcagccagttgttccgtgcgtttgaggaaaggggtgttgaaaacttgaacccaaagtggaattttaagcaaactgtccccatttaggacatccaccgaatttgggatatccattagaatggcttggttgagataagtccaaggttgctgcagcaaaacacggtgcctatctccatcacaaccaaactcaacaaggaaaagaccattggaacggtctgtaataaaaacaggggaccgggatatatgattccagttcttagtcattttgtctatgaagtttttacgattaaaagacttaaccgtatgaaccttggctaccaggaaaatttgagctggggtgatctctgtaactgtgttgtttgttgggatgggctcatgaagggtctggatggtactttcggtttctgtaaggttaagtgcaacggacagggaattggttaggtcatccatgagagtggcagagtgtgtgctagaaaaagcagagtgatggaaaacccaggggaaatattttcctaggagggaataagttgaagaaggaaagaagagaagcagatttccttttaaagcaaaataaactaaaaagggtaaaatctaatgatgcatggatgttgagcatcacgtctcttatatagaaatcccctaaagtagctgaagcaaattaaatccatagcatttaaggggaaacagagttgttgcacaagcacttgacaactaacaccaggcaaaacacatcaagtacagataacaattaatgaatatttcaaattccttttgacaaaatagatatacccctgactgtaaatggatttgaaatatttcacattactcaaaaatcctttggaaaagaatcgttcaggaggtaatttaatgggatttccaaatttatacctagatatactgattaaaacccattttctcagaatcgatttgacaatgaacagaagattttggggggggggggggaaattggaatatctgtaagagcttcattaatgtccgtacaggtcggaggtttggggagatggccgaagttaatactgatgcgactcgagtggttggggcgtccctgtgtgatgcaactggaacagcttgggttagtcgagctgccttgggtctcgtttgatgatgagtcagagccaccgtgatcactagatctggggcttaggatcagtttcaccatgtggaaacattctgggcgcaagtgtgaacacgaagaagaagttgaatgaaccctgttcatctgcatgtttgagagagagagagagagaaagggagcagtcaaagagtctagagaggttgggagttgactaccattaaattaatataaaagttgtagctaattaggaaagccttatgtgaataaagtgaaaactctcgattagacattaatctaatttagttctaagatacatgtgcaatccgtaatttgaaaggaaaatatgataaatgaatatgttgtatgttctcttaatataccactcctttcaaaatttacactctatacttttattatcttttaatccaaaaatacttctaacatttcaaacaaaatttttctcactccagataacaaattgtatatatataaggagattgagcttaaaaaacaaaaaatggagctctctagaatatgcaagagtctggcatgtgttcctccctccggtaccctaaatgggtttttggtccatcctcagccgttgagtggtggtttccgatggctccttttttccccttccaagtaatcattccattatagagcacattaattgtgcatttgatgcctttagccttcttaacccccaaagtctacgcgtcttttcttcttcttattgtattaaatgcaatatcttcccctcagatccgaaattgcctcgatttatctcttcacctctctattctcttttactttcttctatccatcatataaaaaaaaaaccctaaagatcccaatctccttgaaattttggcggcgatccgaagaggtggtcatcatgaagctagagaaactttccttatcatgatccctacttcctatggtaagaaggctatggccaagggcagcgttagaaggattcccaaaagttggaggttttttctatataaggatcgtatgaagctgcaactctaggtatctccttctctttcatttcttttcatttcctgttccaacttctgtgtccttgctactatggatagtatgtcactaatgtcttctcaaccactttcccttaccgctaaagaaactgatgttttcacccttcaagatgtcactgatgactctacccccaccattagccttttgtgagactttttcaccattcgccattttagccgccccttataaaaaccctttcccaagtttggacttcacagtgtcgattcccagtagtgatctctgagcattccgatggtctctttctagtcacttttgcctgtgagggagataagagaagaattcttgatggacagccgtggcactttgtgttggaatttattttaccaggatct

SEQ ID NO: 306994 - DNA, 1547 bp, Cannabis indica
aaaaaatataagagtgtaattatcattttgtgaggtggaaatagactattccatattttatttgtttatatatgtgttatatatatatattaaaataaaacattttacataattaagaacttttctctagttgattataaagtatgtgtattttttatatttgctttttatttttttttgatgaaatatatttgctttttatagtgtttggtttccctctctttattctttactttgattgcttgaggtatcaataaccatacaacagaaattataatttcactagtgattaaattttctttttcctcttgctccttgtgagttaaaagaagataaatttactgtatttgtcatcaacgtttacttccttgcttagaaaatgaacaatgcattagtcaactgagtttatctttgctgggaagaaattactattatattgtgtttttaactaaatttgatacttagatcttttgtttttctcaatttatatatgacccgcaacatatgtaagatgataccactttctccttttaaaaggagaacattttccaccaacaaaaatagtagggtggacatctctaattactttcaatgtttatgggtttcttcttcttctttttttccatgatatgtgcataaaatgtaataatgtacgtaaattagagtcgaaaatatttgctttctgtttttgtaatcctatccaatgaacatatccatgggattgttgcagataaatgagatctctatactggacgatgggaaggggcatatatatatggtgtttttctttgaggttttcatgtcatgtatggagctgtaagattttattgattcaataagcattgtgcattcagttctcacggaatattttcttcccgtgtaatgtaatgttgacaaacaagtattttgagtttgcattccttttccaaagtatatgatctttcaaagaaacgatttcttggaatgcaattggttggtttctgcttttctactttcgttttcaagtgatttcttttgatcccttatcttcatccatatacgactacttttgttacataacgttattcttctctccttgtgtaaaatgttgttattctttccagtagcttaaatttaaatgaaagtcatggacatactagtaatgtttcgcgttgaagtttattggagaacattattccaaaatagattaattgtaaaagtattgagccatatataacgggctactttgcaatataaagttcatgagcatgtgaaaactattatttttgcttatttttttttttaaaaaaaaattgtgattggttagttatcttaaaatgaaaatgttagaactttaaatttcaattctgttttaaaactaataaaattgtttccttgtattgtattatccggacaaaaccttttctattacaacaaattcccaattttttcgttaacttcgaatacttttagataggggtgttcacaaagtatccgatccaatccaatccgcacgatccaatccaatccaatccgcaaaatgcggatatccgcacttgtgcggattg

SEQ ID NO: 306995 - DNA, 1086 bp, Cannabis indica
ctctatatatttttttcagaaaaaattttatgacgatatttattatagttataacattatttttgtaaattttataaaattttcaaataattaataatacttaaatagatttaaaaaaatttaaacacttgagataaattgaaatataaagaattctgttatggataatttaaactatttaaaatttttaattatttataaaaataatattataagtatcattaatatcacttttcaaaaaaaaaaaatctgcatttatctccgggtgtgaagattaactagtaaaaattttaattaacagcgataatttgtgttgaatattaatgcagaatgggcttatttaatagctaaaagatgtagatctaagtcaatgtcattaagataatattagagtcaaaacatataataatagcatggaggaacaacttgccgaagataatataaagggtagtataaaatttttaattaaattttataataatgacaatattttagaaattgtttcaacgtgtttcattctttctttttttcactcacacatttctaaattgatgtgttgccttccaaaaaacaaaatgaagaaaatgactacaaacttttcttcgtaatattaatactcttctgtcgagttttatattgggctggttttcccaagtctatctctttgcaagttctattataataattatgtgctgaatcatatggaagacacataaattttgtgtggctattaacttctcgccacacacacatacatagcgattcttctactttactttagtatgctttccattcacccaacaatcattagattaaaggttaggttgatcaaatatttttttcaatattagaagccaaagtatatacttcgaagttaatttgtaagagacaattttttttttgtcaaacacggattcattatgttatgtactggtgtgcaaaacaaaaatagtcaatgacttacgatttagtacactcgatttagtacactggctcaacaaacaaacaacataatcaagaaataataaattaagagatctcaaaattcaaataataaattaaagctgtaaaataaaaaaaaaataa

SEQ ID NO: 306996 - DNA, 1087 bp, Cannabis indica
aaaaatattgaatacaaatttgaggtcatataagaaaacatgttggttaatttaagaaaaataagcttacccgaataaagcacgacatgaattcgagtatagtatgaaattatcgaatttgcgagtcgtttcaagtctactctataaaattgttgcaagtcatggcatgacccatacattacattacatcaactcagacctctcgcgtgcatccagaataaagactctaagtggggcaagctccttcttgaatatagttgataactataccaaaaaggtttgagttttcttacttaataacaaaaatgatatatctaacatttttgttaattggaaaatattgaaatcaaacaagtaagaaaatataatgtcgagaaatgacaatggcttagagatttattttgatgagtttaacaaatattgttaagaaataggaataagaagacacaaaattagaatcaaaattccttagcaaaatggacttgctaagagaatgaatagaaccttgtttgagagagtcaaatatttgttaaatagtgtagtgttaggaaaacagtttttgggtaaagctttactatctcatcaataagtgtcctttaacaacacttaaatttaagacacctcaaaaattttggacaaatcatgcactagcgaattgatcacttgagaatcttcagtgcaatacacatgcacacataagacaagacaagctagaacctagaactttaaagtgttgtttcattgggtatcgagaagaggtaaaatgctacaaattgtagtgcatagagaatggttacaaactgttatgtagtcttcaatgagagtgaaatgtccatgaagaaaacaacatcagaaaatgatgctcagacaaaaaacacaggtagtattcaagtacaacttgaagaatcacagaatgagacacaagctaaaaacaaataacaatcaaaacaaatttcgtttcacaagactgttctacattaagtagcaaattcagttccaagtacctattatgaagttgttaattgcaaagatagaaagaaattgtcttggaaatattgattaagagataacatctctcaagaagaac

SEQ ID NO: 306997 - DNA, 1785 bp, Cannabis indica
aaatcttaatatatatatatatatatatatgttgtatatataaattaccagcgagccatgtgagaataaacccaagaacacagctaattatattaatgaaacaatcaatccatgaataatacaccaatatatatgtatatatatattaaactataattttcatatctatattgtagaagaatacaaacaataatatcagatttttcaaatcgtaaaaactactttctatctgatatatatcatatatatgtcacacaattaataaaatatatactatatacaatcaaaacaatatataaatatatttatataaaacatgtatgcaactaaatgtggtcatgataaataatgtagggtcatatgtcttatatatgtttttttagagatatgaaattaattattaatgagttaaaaaatcatcaaatcatgaatataaaataattaatattatatagtgaaagatagaaagaattaattactatagaaataatattattagttgaaaaaaataatttttgggtgttgtcataaatttagtgtattatatatatagaaattatgtgagctgttataataatatataggaggtgaggagaggagagggtaggtataggggccacctgatgtttttgaggtcattgccagctgtcatcaccccagatgccacctcatcatccaccctggcttaactccccattctccctccaatcatattcccatgtgtaatgactcttttgcccctccccccagcctgtgaagaagggcaaaagaggtcattttctatgtgttattttgtttgtggtggagtttctggctggacataatacatattattattattattatgtaatttagtaataacaacaaggcattattacataattaaggaaaataggaggaggggtattttggtaatttaatgtctatggaaaataaaaggagttgtatatatttgaggtacacacgttttgattgtttcatcccaactactaataataataacaattctcttctctgttttctcatttgatttttttaagaaaaagaaaagaaattaagattatgggttattggaaaagtaaggttcttccaaagatcaagaaggtttttgagaaaaacactgccaagaaagctgaagctgctgaggcttgtaacacctttgatcaatcaaaggtacatatacatatatatatatatataatatgatgatcatcttataattatgttatttattctatgttttatgttatataggatgaaatcaacaaggagtttgaagagaaaaaggttgacctccaacctaaggttctagaaatctatgaagcttgttctgttgaaatcaaggtacatatatacatatatatacacacatattatcatataagtatatgcatgtacatatatattaattagtttttttgtgtgattaacagggtttggttaaggaaccaaaagaggcaggaatcaagaagagctcagttgcaatccacaaattgcttgaagaactttctaaaataggtactaaaaataatgcatactttaacataatcttatttagggttcgcccttaattttagtggctcttaatgagaaaaaaaaatatggtattttcaaaatcagtaaaaaaattatttgtattttttaaaagggtttaaaaaaaatacaaaatcaacaaaaaaaaattataaaaatacagtatatacgtaatttttaatatttttacggttttatagattttttttttactataaatatgatttttaatgtatttttatattgtactct

SEQ ID NO: 306998 - DNA, 3351 bp, Cannabis indica
aacatgttatataatgtagaaaacaaagtacgtctcttccccctctcttacaaaaaaaaaaaagtatgtcccttcaacttaaattttaagtccgctactgataattatgtaatattttaactaatatataacattaaaaagagactacaaatattatattttatgtgtgtctacatttttattataggtacgaaaattgaatatttgaaccctaaatttgacgatataattaaattatttatataaaatataaaagaataaaaactatctacttatccaaaacaagaaacacacaaagtggtattgtctcctttttaaatggactacttgaaaactatccacaacatagaaaaattctatgagataccctcataaaaataatacaccatacatctccttatgtttttggtataaataatcataattatacaccatttaaaatatttttagaattatttgaaataattttaataattaattatgtcaaaattaaaatttaaataaattattttacacgtatataaataattatttttaaatcattctcacgcacattaaattattcaaaatttagaaaatatttaatagagcattctaagcactggtgatacctattagaatatctaacaactggaggaaaaatagtattgaggcgcaaaattctctggtaatcgtcatcgatgtaaggagaaagattgcaccatcgaccttcagtctcgttaaggggctaaaccccctcccaatcgcccctctaattaaaaacggttgtgaatttttcttcttgattttttctgctccccaagcaaagagtgaaagaactaaatgggttgtgttaatgtcagaatttaatcttatttgtatctatttagtgacaggtctactagtttcttttatctcatcatttggtattcctaatctatttgcttccaatacttcaacctatctagaaaaatttacggttgtgagaaattaattacaatggttagcaatttttttatgataataattaaattaaaatatataaaatttaacgtttaattatatcaataataatatatggtgtctattttttaaaatgtagaatatagagatagggatgcatacagggcgaggagttggcggagagtgctcctcccatccccatctccattaagaatttcaatttctatccccgcttatctcttttgagagcagagtgagaaagagaatctcttaatataaaaataaattttattataaaaaatttaaatgtataaaaatattaaattacataacaattaaaatttaaaatgtttcacattatttattattcaatatattattatataaaacataacttaaaaaattataaaataaccctaatatactaaaaatatacaatcatatattataaaatattaagagcaatttgcggcgaaacccccttactattttaatttttatacacttatctctcttatctttttttggtcggcaaaaccttctaaagtttatttttgttttgtcaatttaacacgcaagttaatataccgttaatatcaattggatgaccactgtatacatctgtatatatgtagcaataaaacttcaaaaattgatacagtagtaatccaattagtatttaacagtaatatctatctgacaccttaaatttaacaaaaaaaaaaaaagtaaaacctaagagggttttgctataaaaaaaataagggggttaagtgtataaaaattaaaatataagggagttttgccataaattcctcaaatattaattaaaataataagcggcttttcgtcgagacagggagtatcattcacatctccatccaatttaatattttgttcctcattaagatggagaatttcggtaccattagggacgggtcttcgcaggtccatgtaatgggaatgtgcatccctaaccctaaatatagaaagtgagtgagagagataaaaggggcggtggtgcatgtgaagaagtaatgggtggttgatgttagtgaggcggcagaagaaaggtttttggtgcaatgaattgaatatgtcccatgtgcctttttattttgtgggctccccaatctctttttctacatacccttttcaatcatcaactcatcaaaacaaaaattaactcacgtttaagatcaaataaatattcttaatcatgcaattaagaattacaaagttattttgaaaactatattgggtaaatttctaaaattatccatttacttttgtaggtgttttcttggtagcatggaatagaaagtatggtatattttttctaatattaattcacgttgttactctctttttatcctaaccttccatagttacacttatagcaaaaagaaaatatattatttaggaacttgattggttagaagccaaacttaccaaaaccttttgtagttaattttgaattgctatcggctctcgaaaacatataggtgccatagtgaaataattttaattaataaaagaataaataatcgcattaatattcaaaattttgagtttttaagttgcataagtatttaatgttataaaaagtataatttttgtctaattttcgtcagtacagactccgttagtgtcttaaatataatagatgtaagacccagattccaaattatttgatctgaacaaaattactaacaaatcttcttttaattaatttaaaactgagtttgtactaacaaaattgaacgaaattataattttactaatattgagtacttatgccataattttcccaatataaaattagccacttaatcatattatgaacaataaattaaaatatcttaattagtaggtcacaaatttagtaacatcatgaaatatagaattaaaagaaaaaagtatatcttgaagaaattctcttgtgaatcaatttttagtttttaatttattaatttatttgaataatatatttattatttaattaatgaaaaaaaatatgatgtcttgcacttgtttcatttgagaacttttatttttatccaaacaaataaccaaatactttttatatgatttttttatcaccattaatgtcatatcatggaggaagtaaggctatccaatattatgaatcttcctatccaaaatgagaaaatgaaatcgatacacactacctactttcataaatacatatatagacaagacatattttttataattttatttcttaatcttaaataaataagggtaaatattattttggaccttgtgttttgtaaaagttattaattggaccatctgttttgttaaatgacaaaatggactctgtattttccaaaatagtacaaataggaccctgaactgatttttgttaaaataaaatttaattat

SEQ ID NO: 306999 - DNA, 1725 bp, Cannabis indica
cccgaatccaaatctcatagttacactttatattcacttttaaggaaatatttttatctcatgtgaaactcaatgcatgtcactcactttacttctcatatattttgtgaaaaaatttaatatggtgcgatgtgatgagaatggttttaatttatgcaatttaggttgtttgatgtactattaggtaccaatggcaccgaaaactgccatgttacctaacaccttacaaataactataaatttttttacaatagttgttgaataaaatatgtgatataaagtatttatgtagttttaggcaactggtgctctttagtatttctgaataagaaaatataagttcagtgatcttaatatcttatggcatggctttaaacttaaattattagtacatatacaagctacacttacaacgacaataatgtcaagaaataacaaagaaaggacaataacatgttaatagaacaattgaaactacgaccataaggaagaactatagaagggaagactacattttgaagaaacgagagaaaatataattgcatacaattgttttagaagccatttttaacaagggcgactatcgttgattggaaaatgaacataacctgtacaacttgaataagttcacaaaaagaacagtatagaactaggaaggagtcataaactagagctacgaaattaaatgctaagggcaaaagatgcattgcttcctttgtttttgttagccttttaaacaaattatattccttagcacagtaatgcttttccttttctattctttttccactagaaaagaaatggcataatagtttaatttctaaggaaaattaccccaactcgaattatttttaaacttgctactatcgcaacaaaaacaaagaggacgacatttatgacctttgatagatccatcactattccactccttgacgaaaagaatagtgatacacattacacattggcagagcatatgtggagtcaaatggcttaaattatagcaggagaaacattaaagcttactgataaaatagctgccaaaaaaaagttttaagactactcaaaaatcaaacctaagaaaaagtgaataaaaaaggcatgaaaacccaaaaaaaaaaaagtttactgaattcatttcagctcaagttcaaaatgagcgccttggtctctcctctgcaacatttaccctgattgatctaccaagcacactctgcacaagtaaactcaaattaggcattgttacatgatatttcatttactcttattctcttttaagtgatcatattaggctaaattggcatcaaaataaacagaagagagttgtggattcttaatgtccattcaggtaagttatatcttcacaaaattctaaaggaaaatttgtttattatacctgtccatctaaagcagcaatagcatcgttcatttcagcttcactggccattgttacaaagccaaaaccacgtgagcggccagtttctctgtcgaaaactacccgagcgtcaactaccttaccgtgttcactgaaaatctcatgtaggcgagcattgtcaaaatcccatggaaggtttccaacatagattctgaaagcaggttcaaatgctcttggggcacgctctgggcgtgatcctcttggagatgctttatttacagtcaagagtcttccttccaaattctatacaaagttaacacaaaaaaaatccagacataagatatttaaatgtt

SEQ ID NO: 307000 - DNA, 2073 bp, Cannabis indica
tttacctccattttcatattttttttaggtatacccacttttatggatgatgtccctatttagacccctgaggttatgtaaattatatgctagacttaagtagagaatgaggacatattaggcaatccactcaaaaaagtgaatatattttaataaaaaaataatatgaaggtatttttattaatagatacaagaaaatatgtaattttttaacttatcccgagcgtattagtacacgatatccatctcattatagcccaatagtagactcatgcattaccgattacatatagttatcattatatattaatagcaacactgtcagtgagcaacaatgtcatttaacataaaatattctaacactaatctgtcatactacaagttcagttagtttttttgctgttagttgaaaagagagaaatacatcactcaagataatttaaagatatatgtatgtctaaatgaaaaaaaaaaaaaacttgctaaattcgaatgtcctatgtacatgtttggtggttgatggatgtctagaaactgaaaagaacttttttatctttagctcaagcagggggaattgctttactcaaaatatcataactttgcattgtgtagctgtcttctaaattaatgtgagataattttccattctttagcaattacaaaaataatccaatcacgtgcctgtgatgttttaatttgattctcccttcattttagctttcttgagaattttatttcccttccaatccgaaaatggtatatgattaactctagagattcatatcctatggaacagggtgcccaacagatgaattttttaaaaaagaaattcataaaagtatgttttaatttttgaaccagtggctaatcaatcaaagggaaagttcggataatttgtcctcctactattgttggtttgaattcgtaaaagtaagcctctgtattcttgattttttagtcttatatgatagacacttatttctgtcatataaaaatcccttttagcaatattaatgcagtgctacacccactactttattagatgagcactttagtatatgaacgtaactgaaccaaattgttaaagaatattacaagatagtggtaatccacgtactttttaactattcgcacccaagaatgaagtcttttattcgcagatgatacattccatgcacaattttcactatttaaacctcagtgaattgttcttgccagctcatttagctgcttacttgtaagttgccaacttatttagttttcttactgccccagttcatgaaataatttgtatgtttttctaatcaatgacttagtacaatattagatagttggatacactgtcacccatggatcttcactgcaattgactttcttaaattcttgtgtgatttatgatcaagaaaaccaaatataggttcttgtatagtttgtatttcacttgaaaatttcatattagagttttattttttgctccctaattgtcttcaggaagaataagaaacagggtggttttttttttttattattttttttgataaaaaaaggactatatatggaaatgatagaaacagaagtggattaaaatgatgtgattgtctgagtcacttcttaaggactattattgagtataattgaacttttaagtacaaatgataactattattccatggcacattcaactggtccttgggcaatctgattcgtggctgccttgacaaattttttaaatacaagtgttaaaaatataaggttaattgacagtaaaatttagtctacatcatggctattttaattataaaagtcattctccttgtatataattcatatttgggttgtgaggcatttctttacttactttaatacctaattctttgtcaggattatgttttgcaacttcagaatagggaacttttgctgctgtatcagaagtaagatggtacttctgaactgttgaataaattccacttataaccactccagtatacttacaaatatccacatcagcaatatacaaacagaaacaagtaaaggaactcaattctaagtggcttcgcctctagtggatcaaga

SEQ ID NO: 307001 - DNA, 795 bp, Cannabis indica
tattttttcttaaaaaaaaaactcaaaacatatcatggttgcaaaactggtgctgtcactacttaggttcgacatcttttggtccagcgacggagctgggggccggagggtgtcatggccccccaaatattttaaatattttgtaaaattatatgttaaacctaatttaaaaaataaaataaaataattttatataactttacatgtattggctccttgctgaatttcgattgttttggtccttcgctcgaaagcttaaaagtagtctaagacataagaaatgaaataggcccttgcatggactttttttctgttaacataccaatatagcatcatccttgttcaccaattaagacacaggtgaagtccttgaataaatatactaaaaaaaaattgttatttctttccagtgttaattcaatctgtaccattttgttgatattgtatttaattggctcttaatgtgagttttataaattatattggatctagtttgatttgtacaacagtaaaattcaatctgcaagactgtaaagtgaatgagttaattttttttaatgaatataaaaaataaataaaatttaaataggggaatacttttttttaaaatttttgttcaaatttacactttgtgtttctaaagtgtttgtagcgctagttgcaataggtgtttctatataattttttgatacaatttaagttgcagcgctagttgtaataagagtttttatgtagaattttgtaaaaatacaaaaaaaaattgttttaaattgtaaaaatgaaaaaattccattt

SEQ ID NO: 307002 - DNA, 1044 bp, Cannabis indica
acatttttttttaaaataattatagtattattccaaccaataaaactgttcatctcgagaatttcgaccagccaattcacgtgacaaatgcaagttgatcgataagtctaattacagagttgtcgaccaacctgcatcaaaatggtgtttcttgactgcctcgtgttgccaattcggtggctcacaagcttgcagcttgggctgctgtgaataatgtatcacgggtttgtactgaaggggaagtagcaccctttgttgctactggtttctagtttgttgtttcaataaagttctctgttgcatcaaaaaataaataaaaatggtcgaaattctccatatgaataggaggattctaacatccaacttatccaatacattgaaggtttttttttttcatcaattttttttttatttgatttagacactttatttgaataggaaagagtgtaaagaagtttgtagtgggagatggtgtaagtacatacacacaacacatgttgtcacaacgaccaagaacggagagagcgagatcctccgcccacaccaacaactctaaacgttgtcgttttgtaaaaccaatgcattgcttctagacactcttgtagcatttttaaccatcctttctaaacacgctttttaattaaaaaatgactcttatagacacaaaaatattagactactctttaaaaataaaataaatattattttaaatcatctattttataaatattattaattagtatgagacaacatgacccatttttcttaaaatatgtataaatatgaatcaactttgcacgacacccacaaatttatagcactaatacactatagtgagtaaagtaagcactaaaccaaaagcaaacctacaagattgactattataagtctaataatgactacatgatgatactatgtatccttatatgcagggatgggacggacccattcacaataatgtggagctatagtcctcactaacaaaaatattgcattttaaaaaattaaatgtaaattttttaatttaataattataaaacaaaa

SEQ ID NO: 307003 - DNA, 1239 bp, Cannabis indica
atcttttctataaccgttgacatttaccatctttaatttttcttcttttcttttctttttctttattgttctttaacttcacttactgtaataactatattttctagaatttatttatttttcttggaccaccaccacactgagcacaaaaacacacacaccatcaatcagtttgcctttctactcatgcttacaacaaattttacaacttctctaccccatctttagaaaaaggctctaatcaagttcctttgaaattcatgcaatttctaaaagaaagtaaaagtgaagagaaaaagaatttcttgggaaaacctcattcttgaattagtagggaaaaaaacagaggaaaattataaagaaagggagtttctcaaatttccaatccttattgctcaatagttaatgctcccgtggttatgatatgagctggaaatgatttcatctttcaatattcttcattaaataacaaataaagtcataatgataatgacctctatcaagacaccccctttgagttttcataattctttatacttggaatttgatttcatcttatcagtgtacaaaatatatattacattgcgaatttacgactagtccatgtgataagtgtgattgggtttgaagatttctctattcatgtacttatatatatattaactaaatgtgacacagttttcttggtaaaaaacaatgacttgacaagttttgccattttttttttcaatgaagttgacaagttttgtgattgaaatgtccaacttgcttaacatgatttaatcaattattattagaagaaactatcttatatactactttttaaggttttttttttaatttacagtttgggttattctggtaattttatgtgtattgttatgtaaattttaattgtaatttaggttgcttcgttaatgttaattgctataagaatttttatgtgaaattctttaaaaatactaaaaaatttgttttaaaagtgttaaaaaaaaaatctattattattattattattattattatggtatattgtagatatacacacatttcacatattttttttaaaaaaattatgaataatttatagcataaaatataaagtttaaaataagtacttgcaccattaaaaaaatgaatactacttgaaaatgtatacaaaattatttgtgaaactgactttttgatatagtaaattttttttttttttaaaatgggtcaaaatatgtctaatatata

SEQ ID NO: 307004 - DNA, 3246 bp, Cannabis indica
ctcttaatggcaaggagactcgatggaaagttgagaattactcttcattttgtaagtcttttgccttattttgtgggttgtttattttcctgtattgatcgactatgtaattttattgcccataatttggcaaagtagacatttacccacaatcaatatgattgcttatctatatcctaaatcttgataaacattttatgtaatgatgctataaggtttaattttttatttatacacaaactattttaccttaaaaaaaaaaaaaaaattgtctacttaccaatttggggctgatcgggaaaaggatttgaaatcaaagcctttataaagctttttaatccatatgttattttatcttaatttttctgaaaagaagtccatgtgttattagtttaacttaactaacaaatttgatcaaacagtttggtaatatggtcataatattcaacaagcttgatattggactaacattttggcagtcaattactactcctaaaattcaacttgaatccattacaggaagacttgttaagtcaacttattagtcctttgaccattgattaaatacacattaattaatgacatcatattgtgcctgtacaaatacaaaaccaccaattaaaaagttacctaacaaacctcactacatttaaagtctcacttgtcttgctgacccaaaaaataaatattcaaaactaataatcaaatcatttatttcaaccaaataaataaaataaataaataatcaaaacatttaactaaaggattaaaataactacctcaaattttccaaagcaaaaacatgcacaacttactccaagtttttcccccaaattcaacaaaaaatcacaaaatggaaaggaagagagagagagagacagaggcggattgggatgaagaaacccaaaaaataaatctcattttggctgactattttgttgaaaaaataattaacttagttagggttactaattcagttattaaaccttagggtattacaattcgtatctttagagaagacaatcagcctagatttcctaatttcttcattgtaattacagaaacatgctactttcctattttatttcttattgattaaggaaaatcattactatataattatcccctataaatagtggtctcatctcactattcaagggacacaaaattatttagagagaaaatactcaagagtggaatcacaagctaagagtaatttgctcagagatccttgtaagagctttcgaaaggaaatacttcattctttactcacaagttaatacaacaaaaagaggagtaggctatattaacactatcacagggtcaaacctctataaattctggtattttctttacttattactctttgttttctattatttatttattcttatcacttcaattaagactcactgttgttggctaaaagcgaggtcaatattttggtactttcattgagagcaaaggcatccaagttttttgtcttaagtcttttacaagacagtacatgatggttgtaactcaaaaggggaatcaaactgacacagtcaatccaatggtgattgatctgatcgtgcatacacctagaaatgcaagagatccagttaaagcagcccacgaacaagttaatattgaaccaccaacagcaggccacggagtgacttaccctctggctgggttcactccaggtgtgcaagaaacttggaaaaccagtataataactggaatcccatccacttcaaatactcaaaggccagtcagagacgacactaagcttcagaacttgcgagctgcactagggctaatgtagggccacagtaacactctataccatgatcaacaagatatccaagcatctattaatcttgcttttgatgagcagagacgccagtttgaggaatgaagggatcaagagatggggatcataggagcccaacaagcggccattgataaccgctccaagcaagccaccgtactgatcataaaggcctatcaagtcaccgaccagcaaccagggattgatactagtattcccatgggatctcagaatgggtcaggagagtatatagatgatcacactgcacaaactcaagtcgttcaactatctaatctaaggccacaagttcaaactgtgggccaaatggtagatagacagatttcacctgatttttccctagaaaggaatggtcaacttaatacccacactcagacggagatatcaagccaaccccttgatcaaactggtcagacacaaagacctcttggcacattaatgtgtgaccaattgggtaccgtgcacgccttcagaattgatctgaatcggagaagaggacttgatagaaaaaatgtttctcctaccatccagccaaataatgcaaacaattatgtccccgatccaattctaagagatcctaatgtgacacaggtcgttcaaaagacagttaagttgatccattagtgcaaacacaattagaacaacttaagagccttgtaaaaggcttgaccgaccaaaaaaatcatagatcttgaacttgattgggtaagaggatgaccattctcattagaaaacaatgctctcgacctaccgctcaagttcaaaataccagcagggaagatgtatacaagaaaagaagatcgtttgtctcaccttaaatactttgagatgcaaatatacttgcaaggggtgagaggaaatgtacggtgtaggatcttcccaactactttggcaaaggccgctcagcaatggtaattcaaattagctccggggaagttcagctcatggatttctttctcatctgagtttcatgcacactttttctcttctcgtcagcttcctctcacttagaagacttggtagaagtgaagcaaataccaagagaacctttaagagcttactgttgaaattaaattcatctaagcctttcctacccataagtcagttacatgaaaaacaacttgcactatcacaacaaccaaaatacagttacaaacaaagatcctaactgtaattaactaaaataacagaacaacagaagtattataactgcctaatcatcacccaaggccacttactcttctcctattgcagcagtataaatatccactcccagtttcgatttcggcctagatctgaagactagagagagagagagtgaaccctgtaattcctctgagttcaaagataagaactcagagttgagaaaaagagagaaagagtgagaatctgtgagaagagagagattgttc

SEQ ID NO: 307005 - DNA, 1309 bp, Cannabis indica
agaatagtaaccatcatgactccattcccttccctctttggtacgtaaatttatttatatatataatctttcttattcttcttcttcaaataaataaataaattcacatatttgattcttgatttgggcaaaaaaaaaaaaaaaactgactgattctttcttgacactatatagtgaatatgggcactgaatcataaaatttagggccttattttgggatatgaaacagaatattgttgattactcactcactcactatattttaaacatatatatatatatatatatatatacacatacatttagattttgtttatttttgttattgttgtctcactcttatgttatgtgtatgatcatgtacttacatactacagccgtaatagaagtaaaaaaagtgatgaaaaagtgacaaaagaagtgattatagtaaagaaaattacaaagcatcatcatcatcatcatcattagagaagaagaagaagattattattatgaatatggaagaggagaaagtaagtggttcatcatcatctattgggattattaataatagtaattcaaaatcttgtatatgctctccaacaagccatgctggctcattcagatgtcatcttcaccgagctaatgtgtctaattcatgcaatataaacattattagtactcttaataatgataataatagtaagagttttgagtccaagaattatgtccgtaccaatggtgatggacagggtaggttatcaaggttcggcagggctgcctgtgatcctggaaagtgaaaattgcccatcattagtattggccttctcaaacactgacaaactcaagtggtcatcttttcttttttaattccttttcttgtaaatacaaataaattctgtttagtttttattttagcagtaatagtattgtgtatttctgttatttggattaatggaatttcagagcgtgaacaatttatttatttatttatttattataatataaatatttgatgtaacaactaactgtctattgatagaagatgaaaagttcaatcaaaaagtaaagttatagaaaatatttgtttcaattttattatttggtgactagaatgacattgccaaccttttagagtaactataatttctatcctttcattgtaagtctattaaacatctctctctaagggctcgtttggaacgccgtattaagtcgtattgtattgtattatattaagaattggattatatatcatatttttatatagtactatgttaaactttaatttatactaaaatattatatatttaggtgtccataaaag

SEQ ID NO: 307006 - DNA, 842 bp, Cannabis indica
tttactagtcatcatgtcattaggtgcttgttttagagcactcacagtgatttctttattgtattttttaaaaatatgtcagttaaattcttttttatcttttcgtttttttgcttgcatagttacttttactatatcatttgttccttatattatttaaaatattttatctaaccatcaatgtatataggaaatatatagggattttgatgatttctgatataacaaaattatgattactaaaccaatcacaggaaaagtatgcttgtaattactcttacatttatgtttataataatacaaaatatgtatcatgctattgtgtcaaatttagtataaattttcaaaatttgtccatttgacataacttttgatagagtaagtttttttctttccaaagtctaatttagcacattattagagatgttcttaggctccaactatgcatgaggttaagtatatttatgatttgcagctcaactaattggggatggataagagcttctactatttatacgaccatcacttagtctttagtgtggtatctaatactggtaattacaaaacatggtacttttttgtgaaggggattagaggcctacacgggacatccagggaagttagtatttacttaaataagcttctcagtttgtcaggtttcaaataatcaactggagtttgtgggtcgcttagaaaaccaagatatcacccttgtcatattagtaactaaaaggaatacgtttccataaaaacaaagaactaaggaggcgtttggttgagaggaatgaaaatataggaataggaatgagaatgggaataagaataggaatggaatggaataa

SEQ ID NO: 307007 - DNA, 3261 bp, Cannabis indica
aaaaaaaaatgaaggggttaacttaaaaaaaaaacaaaggggtttcgccgcaaattactccaaaaaaaatatgatagtagactagatgagattaaattacctggcccaccagtgagagcacccggacaactccccccaagagtctgagatgagaggctgctatgtaagtttccatctcccttgacaagtctactgatcttccagccgcctcaagcagtttcgcagcctcttctgccttgcctagatcatcctcgcttgttgcactctctgaaacatactcagatatataaacaccgctagtttatatatatacatcaaatttttttgctgcagtataatggaccacaattctgtacgaaaacttcatttgcaacttcactatagaaatcaattgttatatcaggaacatcaacagaagaagcaaatgtcccaattctattagctttgtcgaatttagaaataaaaaaaggactttttattcaaaatctaaatggcattggtatgattggaccttagatggcgtttggttagaaggaatgaaaatataagaatgtaaatagaaatgggaataggaatggaataaaatttaaaatacataaaaaaattaataaaaaaatcattaaatttttcctcttgttacattagaatggtctttccttcttttttaaaatggaatagtcattccaccaaaatgatggaaaaaacattccatcggaatgtcattttaatactttgctttccatttcattacctccaacccaacgccaccttaaagttgaaagctttccgttccaaacacacatcaataattggaacaacctgaacaaaacttagaatcagaaacaaaacagagaaatatgaaatttcggtaagccttaagatttatattatatatcacataagaattaaataaaataatggtgtctagttaggaataataaaaatataagaatagaaataggaataagaataaaaatagaataaaattttaaatgcataaaaaaaattgataaaaaattattaaattttttccaatcatgtagtataatggtctttacttctatttcaaaatggaatagccattccactaaaatagtggaaagaccattctattggaatgacattttaatactttaatatgcaactaaacaaaagaatagaatgaacattgtttcctttccatttcattacctcaaactaaatgccaccttaatcttttatgtacataggctgagttgtattagtattttaattctattcatccaattgtaattcttggtggcctaagagaccaacccaatcaaaagattgggaatttcgagaaacaagcctctcaaaagctcgatattgtaattttttccctgttttttagaataaaaatcactagagaaatttattacatagtatttattttgaaaaatagctaatagaatatttttactctaagattattctatcaaatttgtggaattttaaaagcaactaaccgataactagagctctaagttgggtaggagctcattttgggagacttgagatcctaaagaggaagggtggcagtagcgaaggctccacaattgcaatgactgttagaaatcaaaataactaaaaatacaaaatttaaatataatctagaatacaataataattaaaaataattaggtatacatacctgattgatctatggcaattaccttaaattgatagtttaatagatgaaacaatatgtatttatagagttagagataagatttagatacataattctagttggactgagtcaggacattataggattcaattaactagaaaagttaacacttatacttcaactaaattttatacacagtttataagcccattaactattgataactaacaatatagactaacataacaaagaatcatctaatcaactcatattttattaagaccaataaaagttaacgtaagacaaataaaatatcgaacatttttccacttggactacattaattttttttaatacatatatgttatatcaaaataattttctttaaaaacaattcatggattgaacaataggaaaacatttgtggccactttataaacaatagttctttaatagcatttcaacatactagtccaaatttaacttttaatatttatgataatcatattgtttttcaatcaacaaaagtcattcataataacaaatattaaagtattaaatagacatggtcaataagtctaatagtgtgggaaaaaaaatatgttcgacatgtgatcaataaaataatttaatttctatatcaatcctcaattttactgattatataatgcttaataaataagtcagtgaaattaaccatttactactaaataaataagtcaaggccactaaacatgtttaaaaaattaagccaacaaaatatcattgtccgtaagcaattaaatttaaaagacaacaatcacaacaagatatgaactacataatttcaactacatgttttcaatgcaatgattctcgagaatataacaacacacaattgaaaacataaacatccaataataaaaaattattagcccacaaaacaaaccaatcaattcataacatcaataagaaaattacatataaattaatctcaaataatataacaagaaactaccactaacccaacggaacaaaagattattaaatgttcatataaacaacatatttactaaacaacacgacacttaaccatgtggttagagaatctgctaacatcaacacaacatgtgtacaacaatattattatcacaatagattagtataggagagaaaatataatcaactagtcgtatttctaaaatcaaattctttaactacaaagcttgcaaagatgtcccataacatgcgaaaaactcggcatacatagtagatgatgtgattaaagtttgtttaacactttttcaagaattagttgtattagccaaagtgaaaatatagctagaaattgacttcaactcatctacacaaccaccaaaatctaaatcttaataataaacaactcggggatcgtcgacatgcttatacacaagcataaaactattccctctttgaaattattccatgactttcttggctgcaaaagcattgactacaaaagcactgttaggcaaaatgcaaacctgagcataaatcaaattccctactacacttacatatgtgatgttcatcattgtttttctttccaaatcgttcttaggacattgttgttcagtaaacttgttcccctt

SEQ ID NO: 307008 - DNA, 4141 bp, Cannabis indica
aatatcaaagtagacttttgatacaagaaactatatagatattcaatcgtaagatcatcacattacaaatataaactacaatctcaacgctcttgaacgtttaccactggttgggaaaaataataaatttcaactgcaacgaaataataaagtaacgaatagtaaatttttttaactcatcagtttggtaaaattaccgcacccacaaaaagaaatatatttaacttataacttcaaaattcgcactcactatcttaatctttctatccaaattttcgatacactttactttttcctcactctcaccacacaacaaatttatacttacttttcttttcacagatccacccctcttacacgcaaaatacatatttataaagttagtcatcaaagactctaaaatttgaacaccaaaactctcattttcacacaattaataactatcccaaaaattacacatttataaatatagaaacaaaattaaacaaataatttgagtcaaactttaatgagtaagaatagaaaaagtaaaatttttatgaaatgttttaaataatagaatataaagaagttgttgggagtgtttaagtattattaaccaacatgtcactactacaatcgaatcaatttagttttatttcattaaaaattataaagaaattcattcgagattggtaagaaaataattgaatgaaaccttctgagctacattgtttaattgcagaataaaaataaaataaaatgatattacatatattaaaaattgaactgtttcgtttgagatcttcatcttcaaaaaataaaataaaataaataataataatcataagttttatgaaaaataatatattttttttgagaaaaagagtcatgtaaaaagatgattaattttgaacccaaaaaaaaaaaaactgaagtaaaaagggagaaaataatctgtcataccaaattaatatacataaatcttaaaacaatatatatttttttaatttgagaaaaatcataaaaaatatgtttataaactttaaaagtgtagaagtaaataattttctattattaattaatgatctcttcaaaatgagtatgtaaaaccataaatgagtatgcatgcatgtggtcttgatgtaatgttagcttttattggtttggtttgcatgggatatggcgagagagacatgtaacaaatgtgacacataatatcttatcatttcaatccacacataaaacaataccatataataataataaaaaaaatactatacatataaatacatacaaaaattacaataaaaaataatatatattatgataaatttatcacatgatattttatcatgaatgacatgacataattattattttattaatttatattttaagttttaggtaaatattttaaatataagggttactatatatcattcatgatagtttatcaacatttataacattgtaagtgccattaattatactcaaatcaacgtaaaataattagtatttttgcccataaactttttacactgttaaattgtgcctcctatagtatatagaccattaataatattctttataacgtcaccgcttcaagccttcattggactcttatacccacgaaatgatgactcttatacacgagtatgtcactcccttacgggatccgacgtcctcgtcgaccacatttctagctgggtcaaggctctaacaccatttgtaacgtccccgcttcaagcttccattgagcctttacacccacggaatggtgaatcttatacacgagtacgtcattgtggctacttccagggtcggccctgaaacaaagtgggccatagggaaaaaaaaattgggcccttatgttagaaaaaatatggtattttttaaaatcagtaaaaaaaattgtataattttaaaagagagaaaaaaaaaattgggcccctgggctgggtgggccctaggcacaggcctagcccgcctatgcccagggccgggcctggctgcttcctagaatgatgactgaccctacaaacaaacatgagtgtttccagtatgctttgtcctcagtcacacacttcttgggaaaacttcccaggaggtcacccatcctgaaattatcccaagtcaagcacacttaacttgtggagttctttcgtgatgagctacctgaaaacaagatgcaccttgttgatataggtagtaccaatatctatttaagctttcttcaactatgtagttccatacctacacagtctcaaaatcatcacacttaaccttccccaggcaatgtgggattgcacagcttacccgatgttttcctttacggatcacgagactactgactgtcacactcttgaaatataacttttacaataacgtagcctttctttcatattctatttaattttctcataaaataggtgaagtatttaatttgtatccatttattaactatcatccaaaacttcatttattttatgataaaattgaataaaatatgatgaaatgtagaagcttagctatagcagaaattaatggtacaaaactagtggtacaaaccagtgcgaaagatggagaaagagaggaagaaagaaataatgaaaatgccaaagaaagcttaaccaattggttagcttagttctcttatttatataatttttttttataatgttctcttatttatatattgatgaaaaaagatacaagttgcaagaattagaaaacaaagtttaacagagctaactaacttctaactaatttttgcaactaattaactaactgattagtttgttggcttaaatctccctaaaatgaaatggtgaagtagccatatgaagtttgttcttaagatagttgaatttgtctatatagtcaatgacttagttagagcattcgtaactagatctaaagagggcacatatcgaactgaaagtcggtgagctaaaatttgatcttgaataaaatggagataaatttctatgtgtttgcaacgggcatgaaacactaaattagcatcaagagaggtggcagattggttatcaacccaaagaacatgagtttgaaccatagggagttgaagctcacttaacaaagatgtgatccattgaatttcagcagcatcattggtaagagctcaaaattcactctctgtgcttgatcgtgcaacaacacaacctgttactttttagcagttcatgagattagattacagcctagaaacatgacatatccacctattgatctcctatatcattaacacaactggcccaatcagcatcactaaaaccttgtaggcatatagaatctattagatgaagccacaaaccatcatggatagtgcccttgagatacctaagtaatttcttgcaagcctcccaatgtgtaatagtaggagcatgaatacactgacatagtttgtttaaaatgaataccacatcaggtcttgttaaactgagatattgaagagcacctaaggtgcttaatgttatatcttcaaaaggctccatatttgtaagactcaattttgatgtggagcttgtaggattaggacaactctttgcaccttccatatgcagccttgttaatagatcagtgatatacttattttgagttaggtatagatgcctgtagtatctttgtaaatttccacacctaggaaataatgaatggtaaatactattttggaccttgtattttgtaaatgttatcaatgaaaccttcgatcctattttgttaaatgataaaatagaccatgtattttctaaaattgtacaaataggaccttgaactgattttttgtcaaaataaaacttaataataatttaatctaaagtgttatgacaaaactgattacattttgtgtatctgttcgtgttaaaaattatcttaaaattaattatattataaaataaaattattgaaacaagagaaagatacaagttgtaagaattagaaaacaaagtttaacagagccaattaacttttgattactttttacaactaattaactaactgattagttgatcgatttatatggaaggactacgttattgtaaaagttatacttcgagggatattattaacaagtcgtgtactataggagacacaatttaataagataaaaagtttagagagcaaaaatactaattat

SEQ ID NO: 307009 - DNA, 1121 bp, Cannabis indica
gggcccaaataaaaaataaaaaaaattattagggttttatttaagtaaaattaagtgtattataaataataaatattcatagcttagttggttgaggtggaagctataatgtccaaggtcatgggttcaaatcccataacactctttttttatatttttttttatgtattttttgagggccccaaaatttatttcgtcttgggcccatatattttcagggccggccctgtttggatctagatgtatatatataagaagagcggtgagagatgcaactgagcctgtagtagactgccacgtgtccaagtaggtgttgtcattcatttctgtcaaccttgtcaagattggttggctgcgtcgactctcattattagtagtccctttctttttccgtccaagccctagggctggtgattagcaaaatcattgtaattaattaactatgttaattagtattaatagtgtgtttaccacttacctatcacgtttagaattaccacatttaaataccgtctttattttttaaatcatatcatacgtacactaaagaaaacaactaataagtaactggaaaagtaaaaatatcactgtcatggttacctgttaccaatacctagcacgtttagaatgtccagtatgcttttttttcttacttggtaattaaaatatatgtaaatatctttgttgagctggatacatatactgaaataaaagcctgtgcaataatttagaaattaataaacatgagagagatgagacctatataggggttttcacgtactatcaaatataataatttaattgtaattatatagagtcaaaaggtggtagagaagatgtttttcctggtctctaattttatgtggtatccccactacaatagctttcagctgtgtactgtccaactttgtatttaataagaaactttgaaaattcgtagttttcgactcccaagtcaaattgtcttcggttcaccaattaacctacattattagctcatcaccatattagatttgtattctgcaatatatttatatataaagtcgtttaaagtaattatgttaacgagttaagactatttttcttaaaaaaaaaattatacttttacttttaattttttt

SEQ ID NO: 307010 - DNA, 2370 bp, Cannabis indica
tttcaatgcttcatttcattgatctcaatcatagttactagcagtgtttgttagaataactatatcataatagtcttgttttgataattttttgctaaatggccttccaaacacttttaccaccttgttggaaattctcaaaaccctgtcgagaattgaagatatcccattggaaatgctcgacaccatgtctgaattggaggtcattttgcaaattgacaccatagagttgtctgtatagtttgaagatgaaaataacatcgatttctttttattagtaataggagagaattgatctcagtttccaaaaggatgttctttagatatttctgcaaaatggcctctagattatgtcttaagaatttttaataggttctcgaatgtgtatggaaggtcatttttcaaattgattactaagaataggttattgtgagaaacacttctatatttttaagttgctttctgttagccttttaaccaaaatccacaaggcaaaagaaaacaaaatgaatcaccatttggtatccttatatctcaattgtctttcattgtgttagactattagcgatttcgaacttcccggctcgtaggcaagcaatgatggacaaagtgaacaaaacagccgatgccttggctcgtgaacttgaagaggccatgcaaaaggatctcattgaagcgctcgacaacttggaacacttcgtaaaagtagttgctgagccttaccagaacgaggcacggagtaaactagagaagctacttgcagttcaggctgaaatatcagaggttgggaatgaactgcaagctttacaggttgatattcaaaatcttcatgtatcgtgatcctgattttgaaaattcaccagatgtggggtggtgggtggtgaatgattagattagcaggaggcttatctatctgtattaaatttctttaatgcacaagcttgtaaagtataattataattatatatatatatcaataaataaaagcatatatgattctcattctgttttaagctatgttgtgatgactatgaagaactactgtttttagttcaagtcaaaagagttgtatatattaacatgacgtttccgctttaaaaacaccattatcattatatatatagcctcttaaacatcaattccattgacccttttaagattaattattattgttctctttgcataattaagtgagtagtgggagagagaaagagaggtcatattccaaagaattggcttaattggtcgactcgacaaatacaatcgtaaagtatagtaacttataaaaatattattaattaattaatgggattgggaaccgtccaaaaagatagtatttttatataataagacacaccatttaatactcgacaagtgtcctaaatatttaatatttaaaattttgttatagttgccagaaaagtaaaaggaggttgagtacgtgagtaaagggcatggcactaacaagtattggtcaaaaaagggtataataaacagagtgcgtcccgttgacatgttttgctgcaaaagttatgaatttgataccttctctcaactttcattgtgaagaacataaactaaatttcaaaaagaaaaagcataagagcaacgattttaaattattagtattttttttgtacacaagcacaataaagaataacataactttaacaaaagagtctaaaaagttttaaggttttctatttagagctagctggtgggatcctaacccctttttctcttggtctgggatagccaatcttaaacaaaagaaaatatttatttatatatatatgtataaatataacgatagcaaaataaaggcatgcatggattgcgaaagcaaatttgatggttaggggtttcctagtaagagaaagagagagagagagcacatattctttgtcatccacctcactaaaaaacacttaagattataaattaagttaatattttatgtaaattttactcttattgggattgcataccggcttcgaaagcgtcctatatttgtcttaaaccagctaagactagaatcttaaggtccttttttagtcaatacgtacataatattagtgtgcatgtttaatcgatctccatattagctaagcatgaaagcaacctttcatcataatatatttttatttgtaaaaccctaacgacaaaaagaattggtacgtatctatatttgaagattttattttttaggaaaaaaaaaataaataagaaagaaatcgaacatttggaattagtttgtaataatagcatattatttcaaaaaaaagaattagcttgtaaaatatttttacgaaataatataaaaagtaactggtaatatatgctgcgcatcataaattattaattaaaatt

SEQ ID NO: 307011 - DNA, 1381 bp, Cannabis indica
aataaaaaaaaaaaagaaataaaaaaagaaagaaaaatacttcagaaaaacttgataaaagcgcctgtccttaaaagacacagcttggcaagcttgtgagccttttcgttgaagacccttgagcagtcaaagaattctaatatgggcatctcttctgcacttgccaagtatcatgtttgcacttgtcagattaatcgctaactaaacatgttttctagagattcccaaatctcataaggataaactgtctcgactatttctaatttctttatgagcacattgctcatatttgcaagcatataatgtgttgttagataagattcaagtttcatactttttcttccaatttaagtaacacttgtggcagtaatctcaggagagccatgtagtcttcacttattaaaataatgttcgtgtttaattttcatttcatgtagttatcatcagtgaagttttgattagcaagttgtctatatttttttttaccaaaataagggtcattcgagattcaaccacgtgtccagtggattcacgacgaaaggagatgacttattaatattaaaacccggatcatgcaagcttttggaaagcatatcagcacttgagagttagaggcaattctggaggggctccctaattttgattatgactaaagcctttgatacattttccaagacaaagcactatagatgaccccttccatccagatgataaaagccctcaaaaagaagactcttggggacttacccatacttttctaacattatgtctcccaatcatagcctgttgatggcttatttttgcactatcccatcagctgcaagcacatctagtcttgtctcacaaaactcttattttagaccttgtgcaatacgtctgtttacctaaagactgactctgtgacgtggacatcaatgtttgacacatggcaagaaggaaaacatcctagagttgagtagtctcgaatcatggaagtcgacctaggaggggtccctagccctgtgcccatgttgactctgggaactctggaataggtgtttggatcccactaagttgtttccaattcactatctttcagtatcctataccatgaagaactcaaatccaaggtctggaagctgaaaatacacgaaataacaatctggaagttaatttgagtgcccagcgcccaagttcacaaccctactagggttttggattttgggcccgtcttagtgaaatgagtcaaactttgtactgagacatgaattaggcctgtcacgaatatattttaggcaacgaaagcggaatcggagcactgacaattttgagcacccgaagcacaaggtgctccaggctcccagcgccaaagtcgacacattgtctgttgggttttatgccc

SEQ ID NO: 307012 - DNA, 1281 bp, Cannabis indica
gactctcctccaaaaccacatagttggcaagaggtgctggaggcgatattccgtctaaacaaatcattacgcgtaggtagaatctcatgatatcccctccatgcaaaatgtaagattttccttacaatttttatatattttaatttaaaataaaataaacatccttactcaatttatatattttttaacattccttttattatcgatctagtcttaattattgtaatagtactgggaacgcatatttcacaatctttctcttggtgagtgatttgagatctcatcataggaaacattagtagtacttgtgctccttttattgctagttccctttattattttttattttaattaagatatataactttgaaagaaaatatatagataaaataagtacacagtagcttttattcaactttttaaatattgattataaaagtttcttaaactaatatataattacttaactgtgaataacataaatattcatgcatgaaatattgttttcccgagaaggcgaatttgacatcatggcaattgtgaactcaaagcaaaaccccttttattatacttaaaattactcaaaactttgtgtcttttctgctttgtttcttgatttattactattcatacaaaaccacgcgaatttctaattatcaattcaatgttatacatggcaagtctattaaattaaaaaaaaaattaaaaaatattattggtgtctaatattttttttggtatcttattattattggtgttagatattattagtatctaaaataactagcattataattaattaataataattctttataatgtttattaaactaaaataaatttaacacggtattaaattacattaatatatagcaatgtcgctatataccaatactaaataatataaatacctttaaacatttttcttaaattaaacacaccgcgtatattctttgcaagctgagacaaagattcaataatttcgaggatgtacatctctccaaaaattaagttgtaacatataaaataatacaaaactttaaaatcccaataaagcaaaaccttattattaataaagaaatcgaaaacctagctctacttaatgtaaaattaaaaaacaaacatccaatatatatatatatatatatatatatataatcttcaattgcggcgataataccgtaaacgcgacaatttccaatattatcgaaggtcatgaatttggagtttgggattaatcccctcctccacctccacacaacaatattattgtttacttta

SEQ ID NO: 307013 - DNA, 2718 bp, Cannabis indica
aagtggttcacataataatctcaaaactaaattagctcatataattcattctaatcatctgaaaattaattgaacataaaagataaaaatagatgatgaaaaacacgattttggaatctccattggtattctcccactttcatccgtcacttctagcctttaatattcagaaaaaatcgaatagccccctttaacttagtcccatttcatgattttattgaatttacactatgtttggtaggagggagagatgagtggatggaaaggggtggagggagagtgatggaaggagagactaaatcttttgtttggcaagagggggagaaagagggagaggagagatggagggagacattgtccctcaaaactttcaaaatttaatccctccaaatttggaaagattgtagaaaaagacaaaatacattttacaaaatacaatatctacccttaaaaatataataaaatttatttttaaaaggataattttgtaatgttactaatcaattttttctccatcattcccaccttacacctaataccacacaatacaaaggagattaacaatcctctctatccctcttactccccatcctctctaacctctccatccatcctactctccctccctcccaccaaacatagccagaatgttgtccaaaatagttgaattgtttcgaaagtcgcaattcttgacttttttccgaaagttattttctataactttgaagagttgcgacctttgatattgaatcttgaaaacttgaatttttaaatcctctaaaaatgtaccaagtcaaaaaattcaattctaatattctttttgtaaaatttaatcatttcatcactaaaaaactcaagaaataccaaaatttcaccaagaagtgaaactctcttcatctcaaacttaaaattaatataaaaacaaaaacaaacgtaaattcaaataataaaacattataaattgatgagattcatgtggttccatctcaaaactaattagtaaggagtgaaatgactcgtgttcttatatatgttagtaaggagtgaaatgactcgtgttcttatatatggctcaatacttttacatttaattcatatggaataatattcttcaatccaaataaatgactttaaaacaacctcaaaataaacctaaaactaaactaccctaattttagacacaatcaatcaatccatattgtattatatatgatattcactcatttcacagcaaaggaagaatggaaagaaatgatgattttaattggttcacctagtgtagtcgatatatttcaggggtcatattttacaactaaatctatccaatgattccttttgatcacttacaacaatatctatcctattccctttcctacatagaaactagaataaaatcttaaaccaacaaaccaaaacaataatattaaaataaatgatgaaaaggagggtggatgacgtgtcaacaataaacttgttcctaacagtgggacccaaaaacaagcatgactgacggtaacacaatcaatttttattgtttattttatagttgaagaagaaatataggtggggaaccatattatcttttatgcaactaattaaaattaaaataaattaataaaaatcaatatttataatacatattatattaaaattatttagaaataaaatcgtaataattttattttatttactttatcagcaaatgtaataaaaaataatgcttaaattaactatcttaattaagaaataatataaagtattaattattttataatatatatttttaaggataaattgtaatttaaaattttattttattttctaaaaaagtaaaaataaataaaaatcattatctttaattaatgacatttaattagggaatatgtagagaaaatattcttttttaccccttactaaaccaattgacacatacatgtcccatttcttattttaattaacaatagaattaaaattattaccatatttacgatttgtttgtaagtaatttaacattcctattaaatacttgtagtttctaatattgtcaccttgcaatacttgatatgtagttaactattttttataataattattaaattaaaataaataaaaattaatacttaatcatcataattaaaatataacaatcatctctaaggattgcaccatttttttcctaatttagtacattatttactatttctggttcaacatcttcaatcgtttatcactaaatatgacacaaaataaaataattttacttaaaatatctcatattttatattatttacggtaataattaatttataatacagtcatatatattatcataaataatttatgattattttaaattaaattaaaaaaaaaagaattagaatgaaaaatacactgtacattaaaaatccaacatcaatttagtgaaattaatagaatggaacactcttaggtggtgtgtttggttaaaggtaataaaataaaataaaatagaaagaaaataatttttatttcattattttgtttattttgtttagttgcatttttaagtattagaatattattctaataaaatgccttttttatcatttttgtagaatgactactccattttaaaatagaaggaaagactattctaatgtaattagagaaaaaatttaataattttttcatctatttttttaatggaatgaaagattattctaatgtaacatgagaaaa

SEQ ID NO: 307014 - DNA, 1692 bp, Cannabis indica
agtgcactcacaatctaaaatagttacaaatgtgcaatcactcgacggtggataatttttgcattggtctaaacccgctttaaataaggttataaaggtaaatgttgatggcgttattttgctttcgagattggttggttttgggggtgttgctcgtgaccataatggccgtattattgaagctatttctgttagtaaacctagacaagtggatgcggctatggttgagatttatggcatcaagaagactctaagttggattaaaagaaaaggataggatgatgtgcaacttgaaattgagtgcctagttgtagtccaagctttacaaagtatatttcatatgccttcttcttttggtttattaattcacgattgcaagctactcttagtctctttaaaatctattgagatttattttgttaaacattttttaaataaaattgcttattgtattgctcgcaactcttatttctatcaagctcgtatttttaccgagagtaatgctccgactaattttttatctattataatggttgaagctttattttaataaagtgtctatttcctttaaaaaaaaaataggtacaaatgttaaattatattatatacctaagattaaaaaaaaaattgtggataaagcacatctattagagctaaaatagctcaaaaatttatttcataaatagtacttatttaaatttaactaaaatatttattgactttagtgtttagctataattttttattatttttataatatattttggtgtaagtgtaaaaataaataaataatatattatattttattagataaattttccaaattaaaaataaattatttttttataatatataatattttattattttgtctgctataaatatattatttaaatggtttataaaaaatataaagtaattgatatataatgtaatgtaaatatgtgagataaattagagaaactaaaatacaacaaaggaagtgttgggagtattcacaaactcgctgtaatttttatttttgaaaaataaaataaaatatggggacaacatatatttttttgggaatcactaaaattttattttttttttagaaaacttgtttagctaggtaataaaatttttggatggagaatattcctcttaattttttgaatcataatctagctaataagaaaagatcaaacatgaggttgaggagggttgtccttttggtggagtctttgccaaaatagagattcatcttctgttttcttgcagcttttcaaaggcatgttaggagcttgtagaccttatgacagaaaggagtgactttagcttgatccgaggttggcttgaggaggttgtgaactattttgatagttgttacccaaaaatatgatagttatgaaagtgtacgtaatcaagtagtactcacacatgtgagatcgatcacacagagaattaaactgaataccactaaatcatatttataattctatttggtaaccgaaaatttgtaattgaaataaaaataaagattaacaagaaaataaaattatgcaataaaaatatttaatcaaagatgagaaattagggaaaaaaatcatgttgatttaattacccaattgttaatatattaattgcttttctctttctcaatgtgaatgacagattataaaaattaacctaactcttttaagatattttagg

SEQ ID NO: 307015 - DNA, 1956 bp, Cannabis indica
gaggagacatatattccgctgcacccaatgtaagatttctgatactcttatgtgtttaattttctatcgttttagaagttcatatttaggttgttaaatcaacatacttgtgagtagatctaagttcctggtaaaataacttccaacagctggcaccaacataatgggcaatagaagtaatcttagattgaaaaaaatccagcctcaaattttactaatgggttttggggtttcctagatttactttcttttgaaggagccataacctggaagtcaaaacatctaggtgaaaaagaaacaataatgaggtaaaataaaggtttggccaatggatactttatcagatgaggcaggttggaccaagccacttctcgcaaataacgacgcttaccctcaattatttcatctataaagtgtatatggcgagcaaaaatatcagttcgatttaacctatcagcatgttcctttattctctcatcgttcttgtctaattttgtttttaaaaatttgggttttggttcaaagggtaaaataggtaaaaattaaatttcttgcactaaaaatgatgagttttcacattcaaaattagacgaagacattttatctaaaaaatttcgttaggttctataaaaattgaaactaaattcagagtaataagtgtcaagtaatctcaatatctactgagttaaaaaaaaaacttgtaaaacgattataaaaataatttcaaaaaagaaagtgttgatacttaccgactcttggaataaaagtcagtcttgaagaatttctcagtaggaacctacaatactagggatttggtatgtagcgtgatctcagttttaaaaaaatagtggcagaaactcgaacaaagtataagagaggcaatgatggcgtgcaaaaaatatagaatttcaaaaagattgctggattccttttatctaaagatggtgaaaaataggaaagaagatgaataagggtagaaatgatgaaaagatgaaaaatgtctactaataagttgcctcgcgagcaccatttgatcatcaatgatgattaatcaatagtgattaactcacaaattaattgaaaagacggctttaattgcccttagggattttctcaaaaaataaaaatcaccaaagtaaaagcttaattactcaatatgcataaaggaaaacccactcctcaagagaatgagtaaaaagtcttttcgcattaaaaagaattttttagggagtaattgttatacccatatttagggcagtaaataaagggtttagttgcataacacgtgtacaccgaaggcaataaattaactcaattaattaaagaatcaagatataagtaacctcctcgcaatatgaaacccatgcacgatcttctcagagtaagatgatatttacaaacattaaatgcaagatgctcaacacactcctaatatgaaactgaagatgctaagcttattaaggaatttaggaacattcttggccttgatattgttaatgttaagagacttaatttgctcaaagttaattcctaatagttgcctgggaaggtttgtgatctaaaccaagtctgtttacgagaagtctacatttaatatacacctccttcaacgagttctccatgaagataaatccttgcacaaaacatatttgttgataacatgttatgacttagtcaaagataacggttatctcttttattttatatacaaaaaattatgtatatttcccgcctattaattaaatatatgaaatatgggaaatacctacattccataactgttgtacgaattagatcaaaaataaatgttatcttactcctataaatagcagagtaaacattgtaaaagggcatgaccaaatttttgacttagaaaaatcctgccaaattgtaatgtcaacccaaaacaatttacaaataatatagattcatagagtatgtagattttaactataa

SEQ ID NO: 307016 - DNA, 1650 bp, Cannabis indica
taattatgttatttttattgtacatttatgaaaaaaaaaactcttaaaacattctatataaatacaatgttaaagttttaatgacttaaaatttctaaaaataataacttattgttaagattttctttgatgtgagactttgaaggttagttaataacatctatgttttgtgggtgtctttgttaaaaatataaaattaaagaaaaactaatttttggtatcattctaagacgagtctaaacaataatccacacggtttctgatgtggacattccacatggcttaatgggtatcctcctttgatctcattctaacaatttgactaaattaagaaaaatataccaaatccaaaactccctcatttttctgctttcttcttcttcaacaaacaaaacattttaaccaaaatcagatcacaatgatttactttctctctctctaaacatgttgtagagagggagagagaagagaagaagaagaagaaaaaaaaagaaagaagaaaagaagaagaagaagacattattagaatttaattcagttcacaaaagtgatgacattcatttgacttgctttgttcttgatctattttctaaaacaaagtcagttctctttgattcatttagctctgtatttgttttatcttcttcttcttcttcttcttcttcttcttcttcttcttctccttcttcttcttcttcttcttcttcttaactttatatttgaatcaaaaccatgtaaatttcagactcagaatagatgttatcataacacttttttctcttttgtaataaaagaaacaaagaaaattcacaactctttctcttgctctgttttttcacaaagaaaaaacagagcaaaatgaaaatggattttccaatctcaatccacctacattggatttggggtttcctaatactaaactcattatcaaatcattacattatcaacgctataaagatccgaacgagcgaagtggggcgactctgcggaacatcagagtattctccgctcacaaatttcatcccaaacttcatcgtagcaatggacaatgtccaaatagaattaagcatcgaaaattggggtgtttctaacataacagagcctaatccacctgtgttcgccttcgcacaatgcttcggcgaccttcctccaccggattgtaggtcatgcttcgccgtggcaagaatgaaactccccaactgcttgccttcggtagcagctagactctacctcgacggctgctacattcgctacgataaccacagcttcattcacgagactatagatgaaaaacatgacaagatagcatgtgggccgccgacggatttctcaaatgatgagctgatgaagtcggagtttgcgaggaaggtgaaggaggttctggcgattttgacgcagaaagctgttaataaaggaggttatgctgtggatgaagatagaggtggagttgagggtgtttttggtttggctcagtgttggaaaactcttagtaaagatgagtgtcggaactgtttggtgaatgctagtgcttcgctcttgaattgtgctcctgcgtcggagggtagagccatgttcgccggttgttatgtaaggtactctactgataggttctttcatttggctcaacgcaacaagaagaagacgaaggtc

SEQ ID NO: 307017 - DNA, 1125 bp, Cannabis indica
tctcctctttgcggacgacagtctagtgttcctaaatgctagtattgaagaaagtttggcctttaaagaaagtcctttacagttactctcagctctcgggggcagagtattaacttggagaaatctgacctttgtgtggggggaaaaatttcgactgagctggcggaggccttggctaccaatctaggagtttctcttgtgaacactcacaccaaatatttgggcatgcctacctttgtggggaaaaacaagaaagaagtatttggtaagatccgtgaccgtgtggaagctaagctccaaggttggaagatggggcttttttctcaagctggaaaagagattttaataagggcaattgtccaagctttgccgtgttatgtaatgagttgcttccggatttctaagggtatccttcatgaaattgaaagcatgattgctcgcttttggtggggcgcttcttcaaaaaaacataaaattcattggggtagttgggagaagatgtgtaagcttaaagaacaaggaggcatgggctttcgggaattagaaagctttaatcaagcgcttttggccaagcaaggttggaaaattttgaccaatcccgattgcctcatggctaaggtgttgaaagctctttacttccctcataataattttcttgaggcgaaagtgggtcactatggttctcatatttggcgtggtatagtgtggggccgtgagcttcttctcaaaggataccggtggcatattgggaatgggcttaccataagaatcaatgaagatccttggcttcctaaaggggcaccctttgctcttcgatcaaaagttaatgttcccgagggggttactatccatacacttttaaaccatgatgggtcttggaagggtgatgaacttactggctggtttcaccatgaagatatcccttgggtgctgggaataaacccaaaccgggagcgagaagatatcatcggttggagcttcactccaaatggtcaatatacagtggccagcggctacaagcttcggtttagtgatcctcaggtggctgaatgttcggacaagtctatccttaagaagtggtggaatttcatttggagttctaagttaactctaaaaatgaagaac

SEQ ID NO: 307018 - DNA, 915 bp, Cannabis indica
tcatttattatctttatcttaaatggttttaaacggactagcgagtgtgacgtctcgggaaatcggggtgttacatctcaagccaatacgacctataaataacccattctcaaatgtgagagcgggtagaaaatcatatttgtaatcatcagctaaaaaagtaatagaagaatttttttgtctccattataaaatcttattatcatttgaatttactctttatcatcatccccatcttatttatgaatttaagtttagattttgattttctggccacaaaattagcatgatgagttctcaccgtcaacaatttagcaccgtctgtgggaacgataggctaatgcgcgttgtttcctcatacacaatccctgtaaaatatttagacgctcttgttgtctttaggatgtggaagttcgtctcgacggtaatcagttgatcgcttcgacacataatgtatatgtgttgaggcttttatctttgctaggctccaagttagttgttgattaatgaaattatcttttcttgataaaaaaagaaaaaaaaaatagatttgaagttttttgaacgcatggtaaactggaatttcagctatcttttaggaactctgtttttaatgatgtaaattattcaattttttcaaaaatccaccgagataatattataactataatgaatacaattatgaaaaaagattgaaaataataattcaagcatattattttgaggaaaaaagttgactaaaagttgtaatagccactactcaatactaatttaccttatttaaaaatatatagtaatttcttttatatcgtttggtttgaaatttaaaagtgaaggtggataaagaagaaattaattatattaaatttagggaaatttttatatatatacattatatacattaatattacagaa

SEQ ID NO: 307019 - DNA, 3311 bp, Cannabis indica
aataagtcttatattgtgttccatggtccaattcagggcagagattatttttggattgaatgctcttaatggaagaacaatacagcgtgatggttctgcaactggtgcttgggactcctccaatgctgaatcttttatccgttacacagcaaaaaacaactactcaatttatggttgggagttaggtatgatcactttttgttaacaactgagtaaatttatggtttagagatgaactttgcacgtttggaaagggaaaaaaagtggtacaagaaaattgaactttcccacctaattaacatgcaaatttcacatgaattgttgacaatagtaatcttacatattaatattaaagtcccaagtgaatatttttattgagcagggaatgaattatgtgggagtggagttggaacaagagttgcagcagctcagtatgcctctgatacaatttctctgcacaacatagtgcagaatatctaccgggaaagtgactcaaagcctcagactatagctcctggaggattctttgatgcaaattggttcaaagaattttttaataagacaactaaatctttagatgtggtaactcaccacatatataatctaggcccaggtatatatatattatatatatacatatattttttgtaataagacaaacacacatttgtcatatgcctgggttgagttctaagttttaatttgatacacataggggttgatacacatctcattgaaaagattttggatccaacctatcttgatggtgaggccaacacattcagaaacctccatgacaccctcaagagttctggatcatcggcggtttcatgggttgggaggcaggaggtgcttacaacagtggtcggaatcttgtcactaacgcatttgtctttagtttctggtaagttggcatttatttaatccttttaaaatgtattactagcatagcataatgacattgcaagtgaaaaaaacaggtatttggatcagcttggtatgtcagcagctcatgatactaaaacatactgtagacagtcattgattggaggaaactatggattgcttgatactaataacttcataccaaatccagactattacaggtatttggaatcatagcaatcaccattacctaagtaaagaagttatgcagaatttcattcttgttattaacaatgcttgaatcttggttttctttaatggcagtgctctcctttggcaccggctaatgggaagaaacgtcctatcaacgagcttttctgggtccaagaaaattcgtgcttatgctcactgtgctaaacaatctgtatgtttaaaccacaaactttcatttgttgggcaaaagttgttttttcaccctctttttctgagcttattctttgtcttaatacagaaagggattatggtgctactaagcaaccttgacaacagcaccacagttctggccactgttgcattcaatggaacgtggagtttccgtcgaaaacacaggagtcatcacacatcaagtattacacctcacaaaacaaggacttctcataaagcaaaggcgatcaagatgcctcgacctaacaagagtgagcctgtgagagaagaatatcatcttactgccaaagatggtaatctacaaagccgaaccatgctgcttaatggaaacattttaactctagattcatctgggaacataccttctttagatcctatttatgtaaattcgtcaacacctatagtggttcgccctttttctattgtatttgttcacatacctcatgttgtcctcccagcttgcaaataggtgacctaaggaacagaaaaactggttcctttgcttataatatagcctttgacaataagggataggatacaaatcaaatgtatgtcattttttcgcaacagaatacaaaaaagaaaaagagttctcaaataaacaaactccttccccttctttctaatcagacaagtaaaccaagttattcactaccagtcaactctcaaacaggtaatttccacaagtcatcttcaagaaaatgagaaatgtagagcttgtaatgcttaaaaagctgctatacaatatgacatttcaggcatattcaatacatcttttgggggttgcagaaattacttggtatatatgaaaaagaaaaaaaaaacgaatgtgttgtacagaatattacaatgagatttgtgtataactgcaagagcttcctatgtgaatatacaaaagaataaaatctagtggaagaagctaatttccatgctaatgcatccaaaaacgtttctcctattggtttctagagatgcaacctgagaaaaaaggatcaatctctttcggaaaagctttgaggcttactgctggcaaaagccaaccaaactacggtaccagttaagtagaagaatattgatggtgcaaataatgacaactgcatgttacaagtatgaatggattaggagtaaaactttaaagagaaaggtctataacagaaatagtaagaatggcaacttacactccatgaatgagttatatcaaggaggtagccagtgagagcaatgcctactattccaggaactgctccgacggtgttggtcataccctgagtgaagaaaaatttggtcataattcagaatttaagttatatttattttcaagactgaattcaggggacattgcctaatgcttagggaagcaagcaagattcaagttttatgatgatcctaacattacaaaatgaagagttctatcaagtgcaagttcatggaggatggtatattatgattcaaattcaaaaggagtgtcgaagctaaaagagctcccatcaatcaaaattacaaatgcagatctatggaaaaaaagcaatatctatttgcattcctcttgaaaatgaaagtttccaaccttgtgaaagtatattcctacttccgtggcttacatctttacaaacatgtcatcaagaatccatattatttgttacaagaggttaattttgaaatactgaaaaaaaaatcttatttctcattggaaatgggagtcataccccataacggagaaagtccacacacacacaaacactatcctaggatgacatgacccttttaatcaatctctctcacacacacaaacacacatacactcctttttaaaaaaaattattaatatcctgaaagtctaatttacccttaaaaaatcattttgataatatatgcagggatgtagttttaataaatttgagcatttttcacaattatgatttccattcttgtgtcttactcccctcttcttgtattccaattgctgctaataaaggatcatc

SEQ ID NO: 307020 - DNA, 1886 bp, Cannabis indica
ccacatgcttggttagaggtatccctcttgcgttggaaattaatagaaatattctgcaacacaatcatcatcactaataaaccgtccaccacatctttgttggctaccagcatagcatgcaatattcaaaagctctacatgatacaatgcaaactttatatttgtgcatataggttgtaacttgcatgaataagagttgtgaaaaaaaaaactatgacaaagagtcaaagaatcaattataacatacagcttaccaaactacaggattctttaaacacaagtacccgtaaaaataacaaaatctaatatccattgttcctagaaacatacctatctttccatgaccaatgtccacagtgcaacccgaaattcgtcccactgcatacaatgacaatactgcttgctctgaagcatagaagcctgatatgttaaatgtttcaaacatcaattgcaccaactgttctctgactgcctgacaaacaatttgtttcatttattattcagaatgttttacagttatctcttctatttaagttattatctttcagggtgactaaaagagtacactacacatgaatagttgacataaatacttgaataacaagcccaacatacaatctcaagaaaacactattctaaccttgggggtacaaagcggatctgtaaataatatctgcccttcattgccaatttcccatccaaggccagtatacagaacatggtgcaacaaatcttccattgcatcccagtctctaataacacctcttacaacaggatcaacggtgatatcttcgcataatgagctatcagtcgctaatccatcgtcaggcatgcgcttcatttgagtaggaataatctatataaaacgataaacaaagttaaaagtgaatataagaacaatgcttacagttttaaacggaagttgaaaaaaaaaaaaaactctcctttatgtccctgagctgtgaagtaaatttgtaacgagatgactaaaatttgcaaccatacaaaaaatggttcttcattttaatgtaacctttacatctgtttcactgtacccagtttaccataaatttgccagaaattacagtgatctaaactccaacccaaaaacattgacactgtaaaacagaaccacaccatctaggatttcatttttctcccaccaaagacttgaactttagtgtgttatctttcgctcaaacacttcaatgcatataacaatatgactggaaattatggaaattatggaactttccaaacaaaaaaaaaaaagtatagacagcaaaacatgccctagaagaaccctctaaccccatgtgagttttccattaattcggtgagtccaagcaataataggagagcttgagaggggaaatagagtaaaaaaaaataagagtgagtgagtgagttgagtaataaccatggcgggagcctggtcaggaatggcgggaccggctttgaggagcttggagccagcgtcgaccacgacagcctccatgagtgttgaggagcgaaaccctaaggtaggaggtactcacttgagctctgaaaatggatttaattaagcagaagtaacagaatcattcttcattaaagatcattctccctcctgctcagctctatttgaaaactgaatggcgcaccttagctttctcttccaccaccaatgagggctttgatactggttgggctcagtggcctgcgttgcaaaatgtggtaattttgtaaactataaacaaatgatattattcatttattctccttttattttacctttcaaaatgggaaatttgtcatgcttaaaattgatttaccttaattttcaaaaaaaaaaaattgatttacctattaaaaatatgctaccctattttgtatcatgcaaaata

SEQ ID NO: 307021 - DNA, 2559 bp, Cannabis indica
cacaaagatttttacatttttacaatatcaagtttacaaaaataccttgcgagtaagtgcaccaattcaaacctataagcctatgtaatgtcatctataaaattatagctaaatgccttgcgagtagactaaaagcttctctaacaggagttatcttagagaaccagagtgcctttgtcggaggtcgtttgcttcaagacaatgctatcataggacttgaagggatccattgtatgaagaaaaatatttttcgaaatggctcaaagtttgtgctcaaactagacatggccaaagcatacgacagagtcgaatggggattcatcgaaaaggttaatcgttataagttgtccaagttgccaagaaatagttccttgataaagcttgggtatgatagaagttgggttaataaaattttgatgtgcatcagttcagtttcgtattcattgcttttatatggggaagtcaaaggtgaaatatttccccataggggactgagacaaggagacccactctccccttttctcttcttattttgtgcagaggccttctcggctcttatcctcaaggccgaaaatgaatctacatggattgaattttggtagatctgggtttgtaatatctcatctcttcttcgtcgatgatagtcttgttttcttcgaagcaaaagaagaggaatgctattgcttcatggaaattttagacaagtattccatggcgtctagtcagataattaattttagcaaatctgaactttgctttgggaaattagcttcgaaaactctcaaggatagacttactggtattttgggagttaaattggttgagcactttggaaaatacctgggtcttccatattcgatagggcgcaacaagaagggtgtcttccaaaccattatcgacacagtatggaacaaacttaaagggtggaaaagctccctcttctcaacagcgggtagagaagtactaattaaagtcgttatccaagccattcccactcacactatgagctgctttaaactcccaaaagatactattcgcaggattcatgggctcattgcaaaattttggtgggctcctctaaaaaaaagaagaagacccattggtgcaagtgggagaggttgtgcttgcctaaagaaaggggtggtctcaacttttgtgacttagaattgttcaacaaagctctactagctaagcaagtgtggcgattcatccgtaatccagagtcactatgtggaagagttttaaaggagtgctactttcccaatgatcatatcgtagaagctaagtctggatatagagcttcggcaatttggaagagccttgtttggggtttggaaatcattcgtagtgggtacagatggcgagtgggagatggtaacgatgtgcaaatcctaaaagatccttggcttccaagaccaaacagttttaaactctacgacaaacctgatattccgtcgaatttgtacgtgattgaccttaaacttgaaaatggtgcttgggatgagacttttatcagaagaatcctcaatgaggaggacgcaaaacttgtattggagctcccttgcagcgagtctcacctgaaagatagggtgctttggtactactccaaaaatggggagtataatgttcaaagtggctataaggtagctgtccaagacagagttcaaatggaaggttcagatttgacctcctcagaggggtggtggaccactctttggaagctgaaaattctcccaaaaataaacattttacttggaaagcttgccacacatggctcctaactaatgatgctctttatggaagaaaatcagtaacaacagtacatgtaccagatgcaatcacgggttaatcgaagatactttgcatgctctttggcgctgccaaaggatcaaaagtgtttggaagattgtcggtttttggaagcacattaagagttgccctgttcaggactccattctcttcctttctagaatgaaagacctcattaccaaagacaattttgagttgtttctagtagatatcgtggcaactgtggtatgttacgaaacaccgtcaatcacgggggggtggcctcgaacccaagtcttctgatcgagtggtgccatggatttcttctggactacaagggccacaactccaatgtaccttctttcaagctcaatcggaacgtccgatggcaacctccttctggaagtattatcaaggttaatgttgatgccagtgttgctccaaacaaagacgggattggaacgggattggttgcccgtaatgcagaaggcactatggtggctgctcgatctctattttggcccaggaataactcggcattggctactgaactaatggcgatcaagcatggtttgcagctagctaatgagctgaagtttaggaatttcatgctggaatccgactgcaacaaagccgtagattaatcaaatggccagctgaacatgtgctctgatcttgacaatattgtggtagacattaagagtttgctttctaagcatgattgtaattgcactagtatttcctttgcggttagtgttgggttttgtgccc

SEQ ID NO: 307022 - DNA, 2632 bp, Cannabis indica
tatatatatatatataattgtgggtacgtacttttcatgtttgaaattgaaatagcttactaacaaagtttaacacgcaatgtcatttgttcttactattttaataaatctaaactcttaacatctaatatataaaattaaataaattcttatgaaagttttaaaatcttaacaaaaggtattttaactgtcaaaaaatttacttagctatttaagtaaaaatttaaagttagacttcaatgttttcgttacaaattactctaaaaaaattcttcaaaaaaaaaaaaaaaattagaagcctcttcgaagggccttgggcaaccgcttcagctgccctaccctaaaatcgatcctatttataaaataataggtttatatttttattgtccaaaaaataaatacaatcttatgatgtttatgttttaaaagatacattttagttaaattgaaacgtaaagcataatttattaacttttttttttaattattattacacaatgttaatatactaaaagaagagtataaatctcttattataatctcttagttaatttttatgcttgaaaatatatgttagaatattttaatttttttttatgacaactttatagttataacactatataaattcttgaaaaatttcaagtaatttacagtgtcaaaaataggtttgaacatgtattgtagactggaatattatgaactctattttccatatcgtaaactatttgaaaattttcaaaattttactagaataataatattgtaattataacgaatattattatgaaaaaaatattggtatataattttaagcgtcgagattgactaaaaaattattattattagcactcctagcttgtacaaaaattatatattttttacaatttatttatttataatttattgtaaagaccgttaatacaaaattactaaattagtaatgacagttttataataggtttttatttagtcaataaataatattttttacaaaataattatagataaacttgtagcttttgtaatatccttaattttttttttttagtaataatatccttaattttattgaaataatatttgtctcaattatatataaaccaaataattaatatactatttaatacaaaatacttattaataatttttgtttattattattttttaacagctatacttctattatagattaataataattgttaaagttagaccataggagcaacaatttaatcacccatatttaatttttttattgatgattattatgattaaatcctccaaaatatcttcgtatcttagacttttaaattacaccactatttttttttttcaattttctgaaaagaataatccaataattatgttttgtacattttagggaataatcttatccatgaaataaaaatagacctaacttattgagttgggtaataacccaagacaaatagcactattttcttttgttgcaacttgcttattggctttatgactttttcaatttgcccttttttctttctaataaacttaaattctacccaaaaataataaatcaaatgatataaaataaagaaattttatcgtctattctctaaaataagtgtatcgatacacccttttatattttcgacatcaaaatatttttttgtatagtagacccaaaattaatttagtacatatgtaaaataacttaaccattatataccaaacttgatactatatatgtatcacttttaattataaatatatgttgtaattaaccaaaatacgtacacatttttttctcgatttttttaggttttgaatgtttccttgcctctatgtgagtacacccgcctatatgtgtgtgtgacaatgaaaatcataattttctaagacatcaacatattttcgaaaaaaaataatagaataaataactcgtcaaatataatgtttaaaattataataagttgagaggtgtgaaataattaatttaaactcatattataaattaattcgaatttttcaaaatttaacaaaatagtttaaatatactattatattattatgaaaaaagaaataaaagagattttatttatttatttattattattattattattattttgaaatgaagagatttttagattaggtacttcaatacatttggtactttgaattcgttacgcaattcgtacgattaggctttgagtggctgagtgagttgccgcagtgcccacttgtactttactttgtgctatgtatgtttttttctattttcctattttgcccctctgacctgctcagaccccaactcaagtaattgtcctaattcgtaatttcacacaattccattaaacgccgccactttgactgaggtctgcaattccattttgttgacttttttcacaacctcactattaactcaattaattcttattaaagtaatttgtagcgtaaatatttaagtttagttctcggttacaaatatttaagtttaattttttgcggcaataatacttaagttatatttttagaactctgtaaatttctaaccattaaatattaagtcattattcacgtgtcattttcttattgatatatttaaactaagttttatttaaaaaataaaaaatttaatgactttgac

SEQ ID NO: 307023 - DNA, 2535 bp, Cannabis indica
ctcttacaaatttacattttgcttagcaattaatattcataatatataaaaaaatcttatctgtggaagcaaaattaatatttgaatcttgtgatataaattattgtataggattcaaaaaagaaaatttgagggttcaagtcaacaccattggcatcctaacaattagtggtgaaaacactattaataatactcatgttgacaacaaatgtaccaaaaaaattcgttttcgcaaagaaatcaaaattggaaaagagtacaaaatcgatcaaattcgagccaaatttactaaaaacattctctacataacaattccgaagatctttccaataaataatgataataatataacactagcaccaccacgagctgacaaacttgatcaaacgatcaacaaaggaagcgggattgaatcaatacgaggttgctcgagcccgttgggagaatatggtatgattggcaaaaatgtagctttgggagttgctgtggtggttgttgttggtattattgttgggggtttctttgtatggaattggacttcaaaaccacctattctaatatattgattatcatcatcatcataattataacatgttaagtttgtttgatatttgaataattgtgttgattaataataatgtttctaataaataattgatcatgtatatactttaccaacatatttctaattattgattgtttttcattcaatgttacaagttctcactatgatcttatttacccaagtgggaagtggaggtgtgttagtgtgagccatatataaaaccaaaatagtttaattattttgttagaaattagaattaattgatcttaacaataaaatgaaacccattaacaatatctggtcattgttagtgtagtaagtgtaataaaaaatggttatgtaataaaatttttggtttatgatattttttttatttttatgttaactttaaatttaaatttaaaatacttaaaacattgtagatatttttaaccacaaaaattcatcttgattatagatatagctcatattaattcatatcatattaattcatatcatatgtatagtgataaaattgcacatagtatagctttcaactattcacactaagtaatggaagagtggcaaaaacaaataactacatagtattaattgttcgaaggctagtttggcatccaaatgctttgttgacaagaaaagttaattaaatatgttaattttaatagaaaaaaaaagaatatgtattttggaaagctacaaatgcaagcaaaatttataccattttaaaggttataccaaaagtaacctaactaaatatttatatatatataatgtatatttaatcttagagcttttttcatagaagatcaaattaaagggtgaacaaccttcatttaatggacactaataaaactaattattatgatgatttcgaacccaaaatcgaatgggaatggaaggataccttcgatgttctaaagatttgtcttcaaggtatgtatatttaatttattaattttcattttctaagagctataaagccctaatttatctaaaatatttttttattgattattaattctccttttacaaacaaatatagaaaataataataggtgtatcgatttgttgtaatgtatatttctgattttacagataaaaataaataaataaataaataaaaataatatgcttagaaatattttgtctaattttgttttaattttatataatcttagttcatgtactttttaatttagtactttttcaataattattaaaaatcatttgattaattcaaattcgttatgaacataatttatttattttctaattaaattctaaaagggattaaacgattagaacttttatccaacaaagtattaattggataaaggtcttgatatgtatgttttaatattaattagacttttcctaattatgtttccttatatttgataattataggttttgaaatggatcaaataaaaatagagaagaaacccaacaacgaaataatcattagtggagaacgtccttatgatggatcaaattctaaccaaattatgaagcgatttaaaaaggacttaagattttcatcaaaagaatatgatttgagcaaaattgatttcaaattcgaaggtgattatctatgcataaccatgccaaaaaagaccatatttgttgaacaaattatcagcttaaagcatcgatgtcgaaaagctcataatcagattgccaaaaagagtaaaactaccaaatttttggttgtcgtttcaataggaatagctcttggagtgttcttggcttttaagtattccaaaaaatcatctgaggatcgaaaattacgtagtagctagctagaaactgatgatatagtatgcacaaaaatattacgcacaataaaacaacagtttcctttaattatattcatatttatttcgtataagatttactatttattaagggaaatttacacagtttactgtgttttcccattttctttcttttatactgttacactccaaaaa

SEQ ID NO: 307024 - DNA, 737 bp, Cannabis indica
ttgtttgtcaagtcatccttgaccttcatttgagtgcgtggattaagatctggatcgcacgacccgaccaccaaacatgattggaatagacaccaccggccactattttcttttgcattttttgggttttcctccctcatcgattccaatctatccatgaactttacttccccatttttggcacgaaaaaaatatcaaaaaatcttggactcgaaatgggttttcaccattaataagcttcttattatatgtaatgacagcttagcttttaaatgagaatgagtagataattggagtttaatttaaaatttagatttttaattattatttatgtaaatgtggagatatatttaaattctaggtgtgctaattatattatacgtgaaatttcacgtttttcatattttatgtctggtaagagtagaacgcaatatttagatagtagagtcacgttttcttatgatttagtaattttagaaatagcagagtgagttagatacacattgtgaatgtcgagattattcgggatttttaaatttgaccaaaatacctttaggtgataagtttatttgttggtaaagcaagagataaattagtaatttaccttgttttgtttttagtgagatattaactttctaaatttaattccttgctcaataaagtagagtcatctctcttttattcattttagaaaaaaatacaaattggaattttgaaccaactcatctctctctctc

SEQ ID NO: 307025 - DNA, 2122 bp, Cannabis indica
agggtcatcgtcattgtctctccggctgataccctgagacccaagtaaggatttgggggctcgaatccggcttctatgcttctctctaccccgatttctcttgctgggttttcagaggatttgctcaccgatacgcttagtacgttgttttgctgaattgggttagctgtaaagatattcgagatgggaagtgcttttctgttgacccaactcctcgttctgccattagtgtatcgctcacaagcttgatcacatcacatctgtcagggaatgaaagaaaaaaataaaagaaagaaacgaatgcccattaatttgttgcgaagattattgatttattctcgtgtattgttatatatatgtacggtaccttatgttgtcaatattaaccatgatcccgacccaggtttcttgaggtatgactctgtagttgaactgaatcacaccttccaattggtggtaatcgagagagaattgaagcttttcatcagccgaaggagcactattattactcgagctctcgagattcatggctatgagaggacagtacagttgaactttccataaccccaatgttgaaatagcataagagaagagtggcgagggtgttttcagggagctgccgcggcgagtggattgcacctccgatatccaattggttatggcaaggtttatggagcgcatccacttctcttctaagttcgaccccagaagtttcatgagcaatttggttgctcttcttgattggcatttggccaaggtgttcctaagagtgtttagacaatctgatcggagatcaactggagtttcatagatgcaaatgaggaaaaagagagtttgaaaagcaaggttaaagatttctctaacttcgggaatggaatctactctttggaacttgatggagttgttgctgttgtttgagccatagcgaaggacttcttcaatgagattaaccaatagagacaatatggcctcttcacttagcaacttaagtgaattatttgagctgaagttaactggttttgaggtccaaagatagataggaaggttgaaacttgcaacaatggcgaaacaaagagttgggttttggttggtttttgatatggtgagattgagtgatggttgatttgaagctgatgaagaacttaaacataaggaaatacaagttgtttcgccattgattaactggtggaaggttctgaatccaggaaaatacatcgggaaaggcagaagctacagccatatctctgttttttcttggtaaaagggcttgagttttgaagcaatgcatcgccatatttaaagacttttttcttcttttccatgatggaagagtgtagcctagattctggctacttaagaaagatgagtttagaagtcaaaaagcaaaaattcgttacataacttatatgattggggttgagagagagagagaggagaatttaagtagataggaaagttgtacaagaaacaaatcaatgcatatttgctcaaagctaaaatgagatatgattgattcccaaccaactatatacttttttgaagaatttcgataatgaccatttattccattggagaagcatacattaaaataagaggggaatatcagcctaaatgtgtgataataaaattgttgaataggaaacttcatagactttggctctctattttacatttcctaatcttgcaaacatgaaacaccaaagatgttcattattactcttttcttacattagattatatgatatgtgatcctttattatttgttttttccttctctagaattgttatctacaagtttgaaataataatctatcattaattggagaccacctgaagatttgcacgacacttgtacaatcttattcgaaattaatatatatagcatgcatattattgaagacttgaaacttgatagatgttatagcattttaataaaattaatcaagcaataactttatatgaatgttgattgctttacgtgctaatggtgttaagtacattgtattgtaaaataatatactatagaattaactctatttaagtatatagatatagattagcaaaaaagttacctgcgagtcacgtatactaaattttatgctaatttttttatatgttattt

SEQ ID NO: 307026 - DNA, 907 bp, Cannabis indica
ggtatgtttcaattaaatataaaattaaaagtaaatttaattaattgattgataaaagtggtatttttcaacttaccccgcgcaattaccagtggcgagtattgtccacagagaaaatgggccttaaaatgggccgactacgaacccaatactgttggcccagttagaataactttctactgaacgtggtcctatcttattccctcatcgaccctcctcctcctcctcctctctctctccctctctctgcgctgctttgtgctcctccggaacaacccaccaccgtcgaaaaagagaatctcactctcacggggtcagctttcggttcaccatctcggccacgtaagtgaagtcctcctatatctattgattgttttcatgttagaaacttgtctgttttgatgatatgcatatggtatggttagtattgttcttgattggtatgtataacttatctatacatataaattgaactatcgcctctcggctttgtcttgtgagggacgagtgatatcatattctggttggattttttcttaaaactttttaggcgtaaaaatgtgtgaattacagtaattcatgatcattatgataattgtgtattagaactacatgaaggctcataatgataaccctactcatttcttaaatgtaaccaatgctaatgtaaaattctagcactatttgtgagatttcttattctaaaagcttcaattcaatgaagcatggaagctggtaaatggcaaataccaaatagaaatagtgtgagagcaaaagtagtaataacttccttcatttgcagaagagaaggggtatgaacaatctctaacctaatcctgaaaagtgaaaaccgaagaggcttcagagtccagactacacagattcaaacaatgttacttcgaaaccg

SEQ ID NO: 307027 - DNA, 1270 bp, Cannabis indica
gtgttttagttttataacatggtatgactattttccatgattatttttagctgtttcaagtgaccatttaaaggtgaagataatttttaagaaaaaataattgcaatttttaaaacaaaacagtgtggggagacaatggtgtgtttcactttccaatccttgatgtaattttaccctactaatttctcttcagtaatgagttttgtattgttcatgctctctaattttaacgaattcatggtaaatgatggtatgtcttgaatggtcattggaagttatgaagttatgctgtatcaggtgggatgcatcttgtctgaaggttcagatgttgatatggtgaacctgaaagctcttgcgaggaatgcaattgggagaggagtccaggttgcttacttgtattccaccccgccccacttttatttccacttgttatttgattttgtttatctaattgttaaaactagagcccaacttatcagaaggggtggaataaaatcaaaatcacatactagctgcagaaatcctacagtaattcaaaaaattaaagttggttaaggtggtcttatagaaatgaagcaagtaatgagccacgtctacggagaagataataattttgtcccagatttgtttctcattcacattattttctggcttcctgcagtttattgtcatggggaatggtaatatgtcagataccagcagggggcttgaatctcttgaggatgagcttatggtacgaaatgctatcatttttcttttctttttttgggggtagagggtataagaaatcgagaaagaataaaagaaaaatgataattaaaacattagaaaacactgagtttttatttacttaattttgatgtcttggaatattttataaaacgtttatttaaaattctattgaatatacgttttatgaataacagataccattggcagtatcctttattgattgcaaatagactaatatctcagtcaccaattctttccattagaactgttaaagtctcttatattactaaaaattgctggttttctttcctttttggtactaaaagtattcatatattcttaatatctgcaggataaagatttaggcgttgttctcagatatgatgaagaattgtcacatttaatctttgcagggtctgatattatcctgtgccagtcttttcatgatcctatttttcaagctccggtttgcctctcttcccttgttattgtttttcatttttcattttctccagaagtgcctggaggctggaagtca

SEQ ID NO: 307028 - DNA, 2620 bp, Cannabis indica
taaccatatgcggtctttacatttagtcacaaaaaaattatgttgtagctaaaaaattgtcgctaaaagtaataattttttgtagtgtcagctaatatatataactcatttatttatcactttcatgagtaaaattgtaaccccaattttcgaatttatattgatattgatattattttttaaacaatattgaatattattcttagttgaatcttatgaatctctgtaccatttattccaatatattttgaacgagtcttacttaattatatgtattactattatgatgagatgaatattaaacaattatctcattggcaacttgcttaataatgatcccaagtcttcaactctctctcccttaatgaaaaatctataaatctataaattaatagatggatatagtatagctatatatattgtatattatacatttattatataatacgaatacctaatacattcttgtgagcgcgaccacgattatttctgtgtttgagtatatgagtgtataacctatagctagggtttgcacaatcatatagctatatgtcttaaaacacaatgaaacaaaaccaattatattagaatctgaaaaactgaaaataccaacaatcaattatccactctgaaaaatttattaacactataatctcacttttaaaaaaatgaaaaatgaaaatggacactttttttttttaaaaaaaatatttgttagttattaaacaaacaatatttcgtttacaacaacagagtaaatttgtggaaagataaaaatagacacacttgtatgatagaagttattttttttttttctttctaactattctaatttttctttaaaacaaaattatagaaaaaaaaccatacaaaaaatgtgtaataaaaacaaatccgggaaaaaaaattatatgttaaaaacttcatatatttcttaaatcatatatttttttattattagaaaaaaagaaaaatactacaattgactttttttttcttaaattcccattcatcaatatttctgacttcatctccttatagcttgtatttatggttcaaattgtaagaatacatgcttaaaataggaagtcaaccatcataacaatataaatatacatacatacatacataaatatatatacataaacatacttatatatttttcaattgtaaattacaaaaatctatgtccatctcaaacattcataaaaaaaaaaaaaaccaaaattctctcttaaaaaaatgaacattcccaaacactttatactaattatcttcttcttcttcatcatcacatccttctcatacattggttcaagctcaaaattagtcccatgttttaaagcagcttgttcaatccacgaaccagatatccaattcccatttcgaatcaagaacttccaaacagacacatgtggctatccaggttttgatatatcctgtgataataactcaacccaaacactcctcaatctacctaattcacaacaattcttagtccaaagaatagactacgacacaagaagaatatggattaaggatccaaacaattgtttacccaatcgaataatacttcattctttgaatttgtccggttctcctttcgacaatttttacaatgaaaacttcacatttttcaattgttcttcttcgtatcattcgaattatctgttgagtactcctatagcttgtcttagtgggcccacttatacagttgttgcaacgacgtcgtcgtatactattgaattcttgtctaaaacgatatgtcgtttagtaggcacttttcaagtcccggttgattcgatcattaattctgagaatttgtactcgtgggatttcggtggtggtgacttacttcgtctcacgtggcgagatgttcccacgtgcaatcggtatgaggtcaaccctactcgtggaatagtttgttcagaatacaatcctcaacgaggtatgtaattataaatatgtaaggatatttgcggcaaaattctttaatttttgtaattgttatacatacgactatattaaaaaaaagtagtgagaaaaatattttattttacgattttgttacagttgtatattttttagctgttaagtgtcaattaaactcgttaagtagcaggtcagaaacacacgacgatatattttttcaacttatttaatatgtagtctaataatatgtcaccatgtatttttgagttgatacttgattatcaaaaaagaatacaactgcaataaaattataaaataaggtacttttgtcgctattttttttaaagtatgtgtaataattgtaaatattaatagagtttcgcctcatatatctcgattatgtatgtgtaaatttcttttttttttctttaaccaaaatattcttttattattatataaaaaagatgtaaaacctttaaatttacactttatccccaatgaaaaataaaatatgcaaggattgcttttactcacaatgcagtaaaatctagaataattttggcataaaactaattatattttaattataggttataactaaataagagattatttcataaaaatattatgagaaatacggtattttaatgtatttttatgttaaaacttttgttaatttgttattgat

SEQ ID NO: 307029 - DNA, 1846 bp, Cannabis indica
cttcttattattattattattattattattattattattattattattattattattattattattattattattattattattattacgtagaggcatgtaataatattaattgtgtacataattattatttttattatatatataatatatgatcattattctataattttctacatataatttaacaaaaacatgtagcatgcaccaacatactcactcactccaataataatgatgatacaatactatattatctataagtagagtttgttcattctagctaatgaatacttatacatcaacaaaatgatgtgatgagctaatattttatggggtgtgtgtggcagggacaacgatacggtctaagccagcaggtggtgaactttgagattaatttaagcgagttgagattaatgatgggtgcaacgaacctaacacagtatttggctaagtctatagccattgttgtggctggaagcaatgactacatcaacaattacttactacctggcagcctctatagctcctacactcctcacgactatgccaacctcttgctcaatcattatgcccgacagatggtggcgctccatagcgtggggctacgtaagtttctgctggcaggcataggaccattggggtgcatccccaatcaaagagctactggtcgagcaccgcccggaaggtgcgtagactcagttaatcaaatgcttggtagcttcaatgaaggtctaaagtcacttgtagaccagctaaataccagataccagggtgccaccttcctgtatgctaacacttatgctgtttttggtgacattcttaacaatccttccttatatggtttcaaagtaatagacactggttgttgtggaatagggagaaatcaaggacaaataacttgtctaccattggcaatgccatgcgctaatcataatgactacctattttgggatgcattccatcctactgaggctgccaatgctgttttcgcttggcgcgcatatttaggtccacccaacgactgttaccccataaaccttcaaaagttggcatttctatagtttactttattttgcttgattttttttctattattgttcttcttcctttgatatatttatataagtatgtttgtgttagattttatttaaaataaataaatctgtgtatgtgtgttgaatttttgaatgtagtaccaaatattgaggctaaatgcaaaaattaataatgtcttaattcttttgaccttgtattttggtagtttctcattgtacacttttcttcgagtactattgcattcaagaaggttgaatttgttttattaatttagttgcaattacttcaccgaatttatgatttccattagatttattattttgatggtatgaaaattggtttttaaggcctaaaatgggtacttttttaatattctcaattcacctcaatgttagctagctccatgggggaatagtttcatctttaattttatgcttctgatcaattgatcttgctcgatgagaatttgggggcactcgatctcatgattttttgttcacttatttcatcttgttcaagaaaccttataggtgcttgatgatagggttgaaaactttggccgaggctgacctgatccgtgatcaattcgtctgaacatgacttgtaaatttagtctattgaagaaaacttgtataaaacgagttgcacctcaggctgatcctattactaataaacgggcagggtatgggttagtgctttaaaacatccacgagtcaggttagactcagagccacccgtaaactgttaatatatattattatatttttaattattattttctattttt

SEQ ID NO: 307030 - DNA, 2761 bp, Cannabis indica
gagtaagcaaacatttttcaatcaagagggtagggcggtcaagtgctctaaagctccctcccatccaagccaaaggatggatttactataggagggagactgctcaaaaagccaaaactcccccaaagtatatgcctgcctaccacgacaaaaaatggccttgccaaagagtgacctccagagttgcttcgccaatgccagatacgaaggtggctcagccagagagtgaccccagagtcactcgacccatgccagttataaagatggcatggatagagtgtgagcccagtgtcactcagccaacgccagttacaaagatggcttggcaagagaatgaccctaaagttgctctaccaacgccggttagaaagatggcttggccagagagtgaacccaatgtcactcggccaatgccagttacaaatattattgggtcaacgagccaccctcagagacgttcagccaaggccaagtaaaattattgcttgatatattagcgcaaagtaaagtaaaaccaagggaagacccccgtataaagggagcactatctcaaagatagttgagaagatcgcaagcctcggcaaggcagatcccccaacttattcagtctacaagagcacttaaaagaattcttgtagactgagggcaagtgttaacccaaaaatcggaagagttgattttcgagattaatcaacgatcgaccccaacagtcgagagacatcaactataagatttggtcgaagaatgatagagatgggcgtggaatgggcagagatgtgaaaagatggataagtagaggtaggcctacgagtcctcgcctgggaacgatgtgggtgtaagagactgagatgggcgtagaatgggatacgacggcataatctgcaactgatgaggggatggaatctgctgctgctacggcagtggcactcacttagactaatactatcgtggtggttgttgttcttgtggttgttttgttgttgctgttgtggttgttattgttgttgtagttgttgttattgtggttactgttgtcgttgttgttattgctgcttttgcagtggttgttgttgttgttgttgttgtagttgctgtcacgggtgttgttgttgtggttattattgctgttgttattgtgattgtagttgttgttgttgctgctatcgttatggttgctatagttgctgttgttgctattgttgtaatggcgaatgggttggtggtatactggacgcccctaggtccaaggctgaacacttgacccttttcgtactgggacccagaggggtctttgatcccttctgcttggacttaacagaagtctcttttggagagaagacaagcccgtctaggctgtcatcaaattcccttgcgtttggtgtggtacctgggataattccttctagaggagggatgtccttcaaggtctgctgccctggggtagcaagagcttcaggggcctttcaagaggagacagaatccttctttccaccagttgaagcggaaggaccagggactgttcgtcaagccttggtgggagaaggaatctcccgaacattcgatgacaaagttgaggggggacgcagtttctgggtcttagaagccttggtcttagttttccccttgccctttccttgggagttcctggccttgtccatagcggctgagatcttgctactccaagacttcaacatcacagactcccgtgtacctgcacattaagcaacaatatgtgtgagtaaaaggaacaatcatagatcatacaactataaagaaaataacaatagtgagaagaggaatctagtaaagaaacttgtgcatgggtgcaaccattcagtgaagtgctatagggttgcccgtgagaaaaagctaaaatgcccctatgaccaataaagctaccatattccttaaacttcagtggagacatagccatcaaagggtgtactttaacagtgtctgaaaaagttcttgaatttctaggactcctaactatttgttctactttgtctatgtaatccttcatggggtatctatgacgatttatgcttaggaaatatttgtcgaatcctccctggttcctccgagacatgcgactcagactgggggtacagaagatgcgaaagggttcattacctcttcttgaagtactagcactcggtgtccccacatcaagataaacaacgataaaccactccgagatctcttcttcctcacacaaaggattgggattgcgtgacacccaatcagagttcagggcattgtcattcttggccgcattggtgattataactgccaagttagtggaaatcgtctcgttcacttccttgggaggttggcgctgtcctcgaaggctgactctattaatactttggaattttgtaatcaagcaagacttatggaggagttcaattgtcaccagttccccaactttcagttgctcttcctagaaggttcgatattgaacctcttttttgactatcttctcaatcctaatgcgctcagagggaaactctgccacgaatcaagtatattagtcagagtatcgaaattagtaaaatttaaaaaatagaaaaaattcaaggcaaatcatcaaaataccttggagatgaaagcttagagatggctccctgctagtgggaaacctggaagaaaagaaccaatattcctggaggtcatgagtgtgatctgtatgacagatggggcagtacgaatctgagcatttattaatcaattcataaaaatactaattgtattacataca

SEQ ID NO: 307031 - DNA, 3120 bp, Cannabis indica
gtacaattgattgttgatcagtgtaaaaaaaacactgacaaatattctcatgacgatggccattcaaattttttgtttctagttatatttaagtttattagttgaataatagttgtgatactacaatactattattttttttttaaaaaaaaaacagggctcgaaattagcaatacatgactcgtacaaagaaaactcgattgtggtaagtattgtttatattatatagggcattattagttattttaaagtttaatattagttgcctcacagcaaatataattgtcgcattacagtttcatgacagttatctcataattgacttacaatgcttaaattttcaaattgtgaggaaaaatacgcaaatttgtttctcatattttgcaatggacagtttgatcaagaaaccaattgtgtaaattacgaagctactgaaatacatctcaatcgattgtaaatatgaagaattagtacacaagctgaaataggtgctggaatgcaactaagaaaatactcagctgcaactgaaataccaagtgaaagaagaataccaaccattgaagataaatgatgatccaagcctattcttctacatacaactaaaattaaaagaaccttacttcacaaggtatccattgtgtgaacatggtcaacaacacaacaacaactaacaacacctccttctttgcaatgagcaactcattagttatacgagttccaaaatttttcttattacattgactattctgttgaatcttcaaaagttttttatttctaaaatagagcaatttttaatgcccaagataagtgttaccatgaggactcgaactctgaagaacaaccaaatgaggaaccttatgcaaaatattctagccaactacaccacatactcggatttacaaatgaatcagtcatttaaataataaaaaataatcaatatttttgtatatatatataaaacttataatccttaaagatatttataaatataagaaatatgatttttgcctcctaaaaaaactagtaataagaaaaattaggacaaaacgataaaaaaactaaaagaaacattcagactctcatcaacttggtccttttatttttaaactttagggagggaaatattctcagcaacattaaacttcgacttcttcttaacatggcgacaatcacttttttgggtaggcagaacaaagtctaaatcatcattttcaaacaatggattgtttacctttagatttgtcgacaagagatttaccacacatcagagtgtaataaatcaaagggtgcaacagaataagtagtacttttattgaaaggtaaagcagaaattttgtaagtttacattcactacaatcaaaaatatcatgaggttgcaaattttttaaggttcttttaaaagctagaatttttaaacgagaatctgaaacatgaccaaggtgagagtgcgacaaataaaagttagaagacgaaggagacaaataaaaagaagacaaatcaacattgggagctgcatatactagtaatctcagttcatccaaaatatataatccccctcgcctacggccggtccaaatcagcttctaagactgtggatcttacacatgacatgaagtagaagaaaaagataccgaataatcagaatcaaacaattgactaacatatgcaagattcaatgaataattaagaatatgataaacattagaaagtaacaaatttgaactgaaaatagaaccaataccagctaatggtatgggagtaccatctgcagtcatcacaagcataaatgacgtaggactcaaagaaataaaaaaatgtagaatgcgaagacatatggtgtgaaacaccagagtccaaaatccttgtaaaaggtgacatacctgatgtaccggtgggtgtttgacctaccaaagtagagacagacatgacattaggttgagtagcaaggaacttttgaaactgttctgataaagcaacaatatcgtaagagccaggtgaaggaacagttgcagcagtactaaattgtggaggtcgaatttagttgttacactgtggttggttacccatatgaggaggcttggactgatatatctgttgttgtagagcacgatccacaagcttaggacattgagctttacaatgacccttctgtttacgaaagcttcacatatcaatatcaacctttgtgcaaggtttgttctcttgtggaggaaacattacagtaggaggaattgccaaaataaaagaattgggcattgagagaatgtatttccctgactgagacttgagacgaatttcatctgctaacaattcactgactactaaatcaaccgaaggaagcagagaacgatgtaatatatatagaaccacgaagttcctcaaaatcactacgaagagccattaaaaattgaaccaatctttattcctctctacgagcaatatactatgcaaaagcatgtagctttgctgattcagttagtgtcaattgatcccaaagatatgtcattacagaatagaactcttgaatgctcatatctttctattcaatagctctaatatcagtttccaactaaaacttttttgcgaaattagactgtatacagtctcgcaagatggtcacaaaattcttttgctttcacatactttgctaactgggtacccataaattgttcgaccgagttatttatctaggtgagaatttttgaattatctacttcccaattttctaacagatctgcattaccatctgctagtttcctctttgttccagaaatataaccccacatcttttttcatttcaatttttttttcataatataattccaatacgaataattttttccatctaatctcatactgatcgcttgaagagaatcatcttttattggtagctactgtaaaaaaaaaagaacaaattgtaaaaatttctaaatacaaagctgataaaaattcaaaattatactgcaaaatcaatacccaaaaatgcaatgtgaatcaagtaaaaactcgaaaaaatcaatctgcaaaagttgtaattacgcttaagaaatttactctcataaacattatttttatactatgataattatttgtgaagagaagaataaccaataaagaata

SEQ ID NO: 307032 - DNA, 1589 bp, Cannabis indica
agtcgagtactcgccattctaggttgaatactcacatttgtctttccacataaatttcttcttgttactaataatattatataatttggtgttgcgaaattcactcgacaacaccaaccacccgacatatccaactaaaacaacttatattggaatagggctcactagagaaggaaaggaccagattttgaaactgttgaaagactgtttccaagtttttgcatgggatctttctgacatgccaagtgtagaccccgcgataattacccacaagctaaacgttaatcaaaattatatcccagttacacaaaagagaaggaaaatgggggtagatagaaacaatgtcgtaaacgatgaggttaaaagaatgttaaaaaatgataccatcatgaggtacaatacccgccacggctttaaaaccaagtagtggtcccaaaaaataatgggaaattgagagtctgcatagactttactgatctgaataaagcctgccccaaggatactttcccattaccccatatcgacattataattgatgccaccgccagacatgagttaatgagcttcatggatgcattttcagggtataaccaaataatgatgcactcacccgactgagaaaaaacatcttttgtcaccaaaagagggacgtactgctataaggtaatgccctttgggctcaaaaatgctagagtgacttataagcacatgattaacaaaatgttctcccaacagctagggttgacaatggaggcctatatcgatgatatgttggtaaagaccaaggaaggttttaaccacattgatcatctccgggaatgttctcaaatccttctagtccactccatgagactcgatccatcaatgtgcacttttgtagtcggctcagggaagtttttgggtcacctagtaactcggagaggagtagaggtgagcccagaacaaatagaggctattcaaaagctgagggggaagatcaccccccttaaccgtttcatttcaaaactatatgataaaaacctatcattttacaacctactcaacggaaattgcaagttcaattggtattcaaagtgtcaacaagtgttcgaggctctaaaaagatacttaagctctccactgatcttgtcaaaggctaaacttggagagacgttacttcttcacctatctctgtcaaaacacgctgccagcttgtaatgccctaaataattaggcacgctacccaagttatttatgaaaccctaatcccctaaatgggattactaatcaaaatagcgcagaatttaaacttttgcaataaacggaatgaaaataaaacttctaataatttaaactttacaacagtcgtgatcccaaaaaatatttacaaactttattacaagtctctttcagttagccggcctaagcggcaaaatagggtttcaaaaattcaacacttgtagaccccaacccacttggtctagtgtggccaaaacatatacattcctcatccagctgctgcactcatggctgatcaaacacagctttaccctttcctgcacagtagagcccctgtgagccaagcccagcaagacagtataaatcataac

SEQ ID NO: 307033 - DNA, 848 bp, Cannabis indica
taataataataataatagtattgccactctttatattgactattcagatctctaacatgtgagctacgtatattttttcttacattctagctagctacccaactgtcacactctaataataattcttataaactacttaaaatcgtagcactttagtgtaaattttgacattaaaattaaactaagagagaaatgacagctaacatgctaaagtcgacagctcaaaatagtgttatataatggtattttgttacttttttttttattttaataagtagtatttattttaattttcataagggttttcccataaatggtgaatcaatcataggggtgtttgaaaacaacatgtatatcattcactttacatcacagaagggtctttctctcccttcacacccatgtgattagtggctccacaccaaacagttcttaaggagagggagatctagagaggtccatatggtggtggtgagtcaatattgatcattttggggttgtacctagctacctattataattattattattattattaacactaatttgacatatagtctgtgacctgatgacctctctcttttcttttcttatttacctattaatgacctttcaaagcaaaccattaattaaaaaccaacaacagtcccaaaattaagattagtatatagttaggtgctattattgttactactagttagtgtattcccttcaaggctaattaattaagagaccatacaagatatacaactaaaattgtaatgctcatgcctcatgtcataatataaatatagggacatgattttgtctcgtggttgtacttttatggaatgtattccgtgatgtac

SEQ ID NO: 307034 - DNA, 2901 bp, Cannabis indica
aacaaaagtgggtattacaaccaacaaactttagcaatacacatagaagaaagtaactttattagagcaaaagtgccaaatgaggcataattctacattttggtattttcccagtttaagattataactccttgatctaatagctagtactattaacataaagaaatttgcactttttgttgtaatattattgtttaaaattaatcctagtgcaaatgtacactgtatagaacaagtacctagatgtcatctccacaaggactatttttatgcttctaattgtcaatataaactctagcaaaataattaaagtgtacaaaacttaaataaaaatcgattgtgatctaattatagaaaattaataactaattaaaaaaaaatacaaggaataaactggaaaaatagtagcacaatattttagatatgagatattaatctacaataattatctctctaatattcaaactgtggtagtgatactagattaatgctgcagcaactgaacatttaatagtcaaaaattctaattcattttataggattttgtcgaagtcacttcaaccctttgtttaaacaatatatgtctaatgtaatttaacttcaaggataaaaattttagcatcaattctataggattatggatgttaataatatatgtttatatcattaaaatattgaaattaaaactttaagcatggataactaaaattgtgtgtcaattaattctaccttttacaaaatttaaaattaactccattatttactaatggtgattaatcaaatatcaaagagtaaccaagataaatatttgaataaacaaaccttatattgcattaccattaacatcgaattctcaagatattcaaataactaccttctctctcttcggtagctctgataaatccttagtctgtcaactgtggccaaggcgggccctaggcataggcgggctaggcccgtgcctagggcccatactttccgggggcccaaaataaaaaaattaaaaaaattattagacttttatttaactaaaatttaagtgtataataagcaacaaatattcatagcttagttggttgaggtggatggcataattcatcttgggcccatatattttcagggccagccctgactgtggccatggcaggtcaagcttgatctaggaagtgaacatcataaggagtgtggaatggtagaatgaagggtacgagtaggcagtggaaacataagctaatagtgaagaggaaactgggaccgatgttccccgattttatacgtatgaccgaatccatagtggcaataattggagtgtcgaagctgtctgaatctgatggcaatgtcgaagaggatgattggaatgaacaaagaaacaaggtgtaaaataaaataaaactatttaagatgttgctaaagttttgtctccgagatttttggtgtaagctcttctgcgtgataaaatcatatttgaattttatagatttttggaggtggctaaaaggtgcaaatcttaggtgtgatcaagtatgaattgtttacctcatatactaaaaatttatgtcgttgatgatactggctgtgtcaatgatataatacaaaatttaagctctatatatggggaaaatgaatcgataaaaatgaaatcaagctaaggggttaaaatatatatggaggatattcaggatgaaaacttattttgaaaatctcctattgtatgctatgttttgggtgctaatctcctagggagattttttgaaagatttgctaaaagagtaaggaaagtcaaaggtgttgatgaggttgaagttcttaatctaggtgtctttattgcttgttttcaatctattaacataagatataattcttgatgaaagttttctatttcttgataaaaaaacctgtgataatgaagccttgacatccttatactaatcttcagaaagaggatgttagttcaattcttacttagattcaacttcatagtttgtatatcaagtattggggtgagtgttctcttttacagatagtgggggaagcttgctacttctttgcagcttgatcaagttacgaagaataaggatcaactaaatttttcttgagtattagttgaggtttgaatgtttcaagacttttccgatgccatctcttttactaacgatattcattagtaggttgacgttaattcaaaatatgagtagctgccaattatttgtgggaatcgtaaaatgggcacaacgggacctgccgactccaaaaaatggctatcaccaccaagtgttataaaaggagagctctataatctcattttccaagttcaaaaaactacccacaaggtgagagcttctctctttagaaattggagcttcgaacacttagtatttttctataattaccatcttgtgagaaatacaaactcgaagtagtcgtagctccattactgtcgcgatacagggagtaaattactatcaatttgatatgtgtctctcttataaacttaaatacttattcattcttgtcaatctagtaagcggctgtcgcttagtagtctttgtaagtcaacaaattattatgggaaatacaagggggagatcctcaccaattaatggatagaatcttcttttagaatgtaagggggatcaaaattccttgaagcaaaaaaagtcatgaaaataatttctcacaaggatataggttttgttgatgtcctagaaacattggtaaaggctaagaatatgagagtatcgtgacttaatatgttttaaggtcattgttttaccactaacttagcccatcattctaatgggaggtgattaaggctcaaaattttatattttaagccttttattatgcatgtaaaattaatataaattgaacattttataattttagtggtaatttttttta

SEQ ID NO: 307035 - DNA, 1443 bp, Cannabis indica
taaaatatttccaacaaaaaatagctccaatcaatgtggaatagatgtagtttgttgaatgaaatcatactttctcctaaacccctttacatactttgtttctatcacttcattgttgaatcaatgtgggtacctttgctagtatattttaagcataaataaagtcaatttgagtccagtcctgttagtgtctagaagcaccaatgaaacttcaaaattatcatcagtatcaaaatagtcaagtcaactacaatgggttgcccagttctggaaggtaacttcagaaacagaatcttaataaactaatcagttgctatttagcgcagcaaatgaaatcctgtattgaaattgggttcaaaagacaatattacgattcaagtaactaaattccatactaaacaaagtgaatttccataactaagtaatacatcatccaaaatttagttaaattaaataaaagggaaaggagccagagaacggtacaggggcacctacaatgatggttactctatgatgatgcatgtaaaaaaattgtaattagtctgttatacaaaattgtatgtacaatagtacactttctatacctttttgattaactttatccccaaccattcccggccactagctgtacatacaatgtgatcgctttcaccgcctttgccgtatacagcctcagtgcatattctctgtgtttactgccaagtggtgatagaagtcagcataaggactaaaataacacgggtgtaagcaaaattgtcatttttgctatatgttcaatcttgttcctgagtcgtgacctgaatttttggtcctatgatgcacgaccttctccacgaggcatcttctttgtactcgctgccatagattacaaaagttagcacataaatttcattcagctcaacagcacgaaagatcaacaaaaaatattatgtcacaacaaccctaagcttgactagctgtaaatcaatatcttacataacaagaatcaacctaaaatagaatcatcactcaaaagtcaaaataacaaattctgacagattcaaagttgaaaatttcacttaattatctagtgctgttgaatgatcattgagcattttaacaaaatagtcatcagaaaacaaactggaccactagacgtgagtgtcatcataactaacgcaaatccttgtaagtcatcctgtgagtgcaaggaaacacctaatttatttgaatatggtaagaaatactatgagttgtaatgcagactcaaaacaaattttgtgccttgtactctctcctcatgtacaagacaccaaacattggtataagcacgaaaaatgatacaaccaaataccctagacgttcacagtagtattaggaatttcaaagctgtaaaatatgaacttgaattgcagtactatatatgaaccccaaacaaaaaatcaaagagagagagagagagag

SEQ ID NO: 307036 - DNA, 1526 bp, Cannabis indica
cagctgtgccaaactggcccatagtctctatgcctctttccttccatggcccacatgatactaactcaagttctttacacaactctatataggcaagaagctctaatatattggagcttgaaaacaatgttgatcctaaaatttcgggcccttagactatgtgggcgtgggccctaagcacaagcttaacctgtttatgtttagagtcaagcatgcttagatgctagctagggcattttttcaatgaataattatgttgatgttattaatcgcaaaaatagtttaaaggttgattactgataaatgagtcccaattaattgacttttcaacaaagagaatagcttaatataagcaatgttggttattttttttaattatttttatttatcttattttttattaaatataatatttaaaattttaaggcaacattaaaagtggtcttgtattggagatgccttaaagtatttgtggacccaattgaagtctagaagggtttgcccgttctactttttatttcatattttattttattttaaagtttaatacaaatattttcaatttagttgttaattgatgtatatttgacatttatattctagtgatttgttactttttatttaaattaattttgatttgtattccctctaaatttttttttattctagttaggaccgaaaatttaggtcttaggaaaaaataaaaattggggctcaataaaaaaatgaggttagaatttaaattctaaacctcttagttgttaaactaattaatcctaatgtgaagtcctaaattttcaaaagttattattattatatttaaacctcactctactcttaccacaaaaaccgacctaagttatatattgaccacaagtcatttggtgttcaatctcaagttagggataatatcttcccatgattagcttattatgttttttaatacctaattaggcataattaaaggtattttgatcatggtttatttatatatattaaaaaaaattgaaaattatcaaatgaaaaaaaaaatgtcatgaatctagatagattcaagccataatttacgaaatggatcgaccctaatcttctcaattccactcttcaaacttcaaagggataaaattcgacaataatttaagcgataattaattattaattcgcgtaaataaaaactcataaggtaatattttagagatctaattataatttataatttaagggaacttaaattatatcaataagtaaaagaatagagatggaattgtattatatatcaagtgatttaaaatagtgttatagtgattaattttctgaaaagtaatgtgcggtgtaaatatttaagtttaactttcagttacaggtaaatatttaagtctaattttttatagtaataatacttaaattatatttttgtaacttccataagtactaggggtgttcacaaagtatccgatccaatccaatctgcacgatccaatccaatccaatccgcaaaatgcggatatccgcacttgtgcggattg

SEQ ID NO: 307037 - DNA, 1414 bp, Cannabis indica
agagacgaagagagaggagaggggggctggggggggttgagggcttcgggggttgagcgttgatggagttgggtgggttgagcgttgatggagttgggtggctgtgagagggatgggtttcgtgggggtggttcgggctgagcaagaggaagagagaggatgattgtttgaaatgtgaggggtaatttaggaaaattaggaaagttgtcatataagaccaattttaataactatgcatttaggagaaaaattaaatggtattttaagcatagaatttcaaatttcccaatacaaaatagactactttttcgattataaaaagaaaaagaaaaagaaaaaaagcctctatgtttggtaaaaacagtaaaaaatagtctcacaggtttaattttggtcaaacatatttgtaataagataaatgtccttgtaatttttcttttttaattttgtttgttaaatggtattatccacatttttgtaattaaatttggtttgtactacaattttttgtgtatttattttgttcactgattttgacttttgatatttggtgtatcaattatttatggcgatgaagattagaaagaaactctaaaaaaattatgtgtatctttttgttttcatttcttttattatgttttaaaaacacaataaacaaaacgataaaaaaaaatatatatattaagtattattaccttattacaaataggtggaccaaaatcaaactatttctcaccatttttaccattgtgtgaatgcttgtatttcgacaaaagggaatcatttcgtataaacttttttttaataataataataaatatgatgggttaaaaaatatcgtgatcattatgggtaatttttatgtagatttagtggattaattatgtggtatgtagtggaataaataactataatacacgtgtgagaagtgtgaacaggaagtctataatatggtcaagattgaagaaagaccagagatgagattagattgagagagacatagctctaaacataaacatttgattcttgaaacagcaaagcataacaaaacttttgggaaaatcaacggctgggattaaatatcttcattcattcaccttaataactctctctctctctcacgcacacggcacgattgacccaccacctttatttttccaattatatgatgattttgttagaattacggaagtacctatctactctattgccctttctttgcacaaacaataatttctctcccaactcaaatcaattcctcttgctttttcctttatcttttttttcttgttggttttatttaaaaagagtaaaaaaaaataataaaatcaatgtttgtaatcatggtttttctttttgctaattaagactaagattttggtgctaaatttggtgttacactatcaccaaattt

SEQ ID NO: 307038 - DNA, 1608 bp, Cannabis indica
gtactataaaatgaacacctaaataaacaagatccatatttgagatttttctcaatgtccaacactaagttcattagtgaaatatcgcctgcaaaaatatttgatatgaacaaaaaaacaataagtaactataaaaatttaagataaatgaatacaattaaatcaatttagatctcaaaacataatattgcaaatgtatttatacccaagataacctagcgaagcaatccaattaccttaaaatcttaagccagttcaaaagttcaaagcaaccaagcaatccaaaagtatgcaaagccacctaaccaataaattcaaaagaggtatagatgtttcacagcacataaacaaattatatgtactaaaacaagaattaccaaataaattcaactaatattgctttaacatttacagagagaaagaaaaaataagattataccaagggtcaacagaagattcaactcaaagaaggtacctagtcacgaatggcagtgactcatagagatgaaagaagcatctgggccaataaaagcttgagaaaaaggaacatctcagagaatgatttatgtttgagatgcccctttttcaagagaaggaggtgtctgtcttctgggttgatatacctcatcccaaaggtgaggcggctgagcattttcaagagaaaagagtgattctgcaaaattgtttaggatttagttttgttctcatagttatacattttaattaaataatattaatacataatgataaaaaatatatataattatattataatatgatgaaatggaacgatacttaggataatataagaagtattagtgacatgtaagcattctttatttaaataaaatgtaaaatatgaaaaataattaaagagaaaaatgagcgttataagtaaaagtgttttaaccaatatatatgtacatgtaggaattattattttggaaacttatagtatttagtaatatttatctgcaaatagtacctacaattagaatatttgtataaagcaacttatatttacaaataattatctataggtataatatttgtagctaaatgttaaatttcttgtagtgaatccacgtaggaagaaaacaataactgagaataatgtcactagtatcaacgtcagtggtgaatggtacaaagatgacccatatgcttactacccaagctaagtaagtattttatctcggtgatctgctaagaggtagaaattagaaaatagtggaggaagtaaaccatcgacaaatttgggacattgaggaggatgaaggtgatgaagatgttgtacatgatttaagctcgtcaaatttttggttgactgtggatctaggagagttaattttgcaaccttctaaagtgacaacaataattgatactacataaaatttgattgttaatcagattgatgaaaatgttgtagatgatgatgttgatgataaaggtggcgagttgctaattgattgatgtgaagacgattttatttctaaaaataatgagtgtgactgtgactattagtttacttatgtgttaaatattttgtaataattttataaatggcgaatatgatgttaattttaattcaaactaattatatttttt

SEQ ID NO: 307039 - DNA, 835 bp, Cannabis indica
tttttttcgaacactttattaaacaacataacaaaatattattttcgattaatttttattattttaaactattttatttatcttattataattattttaattccagttactaaacataccaagaggtcggcaatagcaaaagaaacttgtaaagaataataatttagatggaagtgggtttgaaaatatcaacaaaattaaaagagactttacttgcaatctctaacttaagttgtgatatgagtattatttggactacggttgctcaacttcttaaacaataaaccatatatatgcatgataagaataaacaaaagaaaaagaaatacaagttgaacatttagtgataacatgggccaactcctctgcctctggtctcagattaggtaatggttggtttgatcttaagtattataatttaaagattacggatcaattactgggtttaaagatagtttctctttttcttcttttgaagattgaaatatcattttttaattaagtatttccataggtagaattatattacattatatataattgtcgtataacaaaaaaatagccggacaaccgcgtggcttaatgtttcttctaactaattgttacttgaagctttcgtgcacatcttatatgtatggactgagccataaagtgctttttccatacaatcaatatatagctagacagcaaaaaatgaaagaaacacagcaaagctggagtattcaaactacgttggtatcactggaccactcatattgcgagcttataatcaataaacactatttttagtcacaacatcattttttttgtgacaaaatgtgacttttagtcacaa

SEQ ID NO: 307040 - DNA, 1030 bp, Cannabis indica
aaagatcaaagggtgaaagcatcgctgggtgtgtgacagacctcaagcaatccttccattccgagaagaaaggttgaagacctatcacacccccagtgatctttcacgcacgaaaaactgtatgcgtctcccgggctctgggaggcccaagagacgcgtgcaacctggtttgctccaagatctctggggaaatctgtcttttccagtggattgcaaggcacttactgtggcttttgaagtaaaggctcgggcttccagcaagataatcaccattccggtagaggcttcttaactggtttttaatggcatccgctactttctccgatgtaactccaaagctatagttacatcgtaatgacagagatctctgtcagcaaactttgccaaaaatggttggcctcgtccaatagtaccataactaggcctgactggaaacccagcaagtgtgggtggtattgatggtctcctctcagccatcaccattacagaattagtttccaactatcttctgcggctttatcgaaaaggcaagggaagtagccgttagcgatggatctggcccttgcaccggcaccgacactggagtcatgagctggatagggtcgttgtatctgatgacccttcgtgagttgtttgtcgtaactgtacagggtcttaatttcttcacctggccccaacacctcttgcgcctattgtgcctgcatagttgtgccttagctgacgacggggaatttgagcttaaggatgctagtggccggtcacccttccagagagttggctggccagatctaagctttttgggacaagtataagtgcagggagagtttcaagaccgtatgcacgcatcttcgataccttctttgggtggatgagggcatagaccttcactccgggaaacgcctctgatcagtgcgttcttgacctctggtcggacctcggcagaagatcaggcggtcttccttcttttctagcacgggttctcctttggatagacttgcgtcggtgaccaccgtgcatgtttctttcttca

SEQ ID NO: 307041 - DNA, 2740 bp, Cannabis indica
aagcatattccttccctttttttttatttttttttcttttttgaacaatatatatgcaagcatattctttgatcccacacaccctcaaatttacaataactcttccaaaaaaaataatacctcgtttcaaaccaaacgtatatatcccattaatttacacaacaatcgtggtataaacaaataaacttacatacagaaaaagaacgacagtcgatcccccaaaccaagattaacaacaattaacaaatggacattaaacgacaatttatatagaagagagtaggaatatgaattattagcctattattattaggctttgccttcgacccttgcatgggtcatgccaacgcaggaatcaacaaaatcctcttcgatgaagtccgtggagaaaatctgcaacttatcaccacaacctttggcaaaacactgggctatgaacagtctcgcgtacccatggatccgacccgttaccggtttaacgcacagaacagggttatctgctttgggagtgacagtgttctcaactctgtaaaagaattttcttgaggtgactggaggttgctcgctcaaatgcttcatgttactgtcaaacttggtcgacggcaaatccgtgtcgatccagttgtccttcaaatgacccgcgtgccaaaacgggctacccgcttttggtcggggtgattttctcggcttccaaacgcagatgatccttttaggcaaaagctcagctacagtcttaccgaagacgtgttcgtcttggtggattagatactcacccaattgctcctctaagtacttctcgaactccggtggatcttcgtgcccgaactctgtgcggatctcgagaatgatgatctcagattgggtctctgacaagaatttcttgacgtcttggataacgacgtcgatgctgtacgtggcgagaattccatggcagactcggcgatcttcttggactcggatatcaagaactcgtgtacctaaaaggagttgtttgtatatggataaggattggcattgagcaaagggtcgagagatgagtgggattccaatcttgttggtggcggaatcgtgtgttcctggccacacaatctgattgatgtgaagcttttctgggtttagtcctcccatccagtttttccgatccgatggctggtaatcactgccgggataaacttctccggtgttctgatgaagatcaactagaaccttcttctccgttttgatcgcttttcgtctttcaacttgtttagacacttgagtacccatattgttcagtatcagagaagaacaaggaagaagaagacaataatggtcttctaagttgttctttcttccttctcctctttctatctttttgcagagaaaaatattaggttggtggggtttctatataatgcatagtaacatttgtggtttttcaatattgggtaatcttcaattattattttgaatattgaaaaattatataaagaatattgtaattttattttgttgataatgattggatttttgggaagaagacgatctagctgtattgtttttaataattatttatttttgtttgttagttttcaaggagagctttcataattgttggagagttataatccaagggtttatattggtacacgtgtatggctgtacaatatattatcttgtattcttgttagtttgttttattatgagtaattagatattaaattatagatttttaagcgtagaatgatcacggttaccacgtggcagaattagccaatgtggatgttttgtacccatctggcgttttcccaaaggtggtttaaccactcttaaattcttacaaaaaaaataaaaaataaaaagaaaagcacacgattagtgttgaaaaatgagtgatgttgtttaatgtgaagggggtgaaacacaatcctcaatatggcactcaaatatgcatcacaattcgatttggttaatccaaataaagtcattgtagccacaatgcatctttcttatcgagaaattattaatcgtttttggggtcaataatgtagtaatcatattgataatatatttaatttttgaccatattgatggagacatatattttataaatataacatattcacttatgaatatttatttataaagatagtatgatcttatcttagaaaattgttcagaattatccatatatattaattaagaaatgtctaattcttttcaacaaaaaaaaaataaataaataaataaattaatgtctaattctttaatatataaatatattggaagtttttaattctttaatatatttgtagtcaccttttattttacttattatgcattttttcaactcattttataaaaaagaaaactaaagagtgtgataatacccgtctgaaattaacatatagaggcagttttttagtaaaaatcgtaagtatagatattaactataccatttagattcgattgggggttagaaaattttcaggattttttatatataggtccactcctttattgacacgtgtgctcctatggcgtgaattattccctaataatcgacgacataaggttatatagaaaaccctaactttcatcttccccacatcgccttcttcttcagcaagaacacgatatcagaacccagaacccacacgaaaacccactccaaccacctataaaaatccatatatctccctcatttatataccatttcaccccatttttcttttaaaatcttctattttcaatacctaaa

SEQ ID NO: 307042 - DNA, 1707 bp, Cannabis indica
tttttttttgttaagaaataaataaagtttgtgcctttatggagctgactcactttacttagctgtattctaccattatatgtgtgtctatatatactatgttggtcgtgttgtggtcgccgcgttctcgttttacacgtttcatttttttttttactttgatttttcatgttttcatgtaataaagctaaaatctcccctaaaagaaaagctcaaattcatcagtcgcgctagtgcaatgtgtaattaagtattcacttttatataacttactctaattctaataataataataataataataataataataataataaagtattaaagaatatgtgcgctatttttaagtattactcgtgttcaataataatactctattatagaaatataaaaatactatgtatggtactatttgctataatattacaagctaccttttattataaccttttaattaatatttgtgctcaaaaatatatgttaaaatattttttttcagtgttcgttataattttaacatcatttctataaattaaaaaaaaaaaatcgctaatttttatagtgccaaaaataaatttaaaatttttttaacacgcgtagtaaattggaatattaaaaactttgttttcgatactataaaatactaagagattataataaaaagttataattagcactcctcatctcactagttatttttggttttatgattagcacatatattttaagtaattgttatgacatttgttatgatcttcactcttaaaaacattcaaactaataaatttagaggatcattgattaaatgtaatctcattttgttaactaggccatattaatatcaaatctttcaattaaaaaagattatcatatattaaactaaagaataatacttcgggcatctgttcaaatattttttaaactatatcatagtttaaaatataataaactaaaaaataactttatttttgtaatagttattttcttttaagaagcattaacttaaatatgtatgattacattattttaacgctaaaatcatcatcaatctaaattaataattttaatataaaacgttaaaattatataaatacctttaatttagcagtttctcattgatttgatttgattatttacatatattttattttatcaagttaatccaactcaagtttataacaatatttatacatccaatattttagtacatatattttccaaatcataaatctaagcacaataaaaaataataacattatcctaacaattaatataaacttaaataatatgctataaaaaaaacaataattattttttattgagatgtactttcatttcatcattgagaaatgtacatttgaatatgagtaatacatgatcatcttttaattccttggaagacgcttctaaatctttctctattttattgagatgagattatacaaatttttcataatatttaacatctaaataataaacaataaactaattaaaagtataaccctcttcatttaaactctaaatagggaacacctttacatttgtatttttgaaaagcttccttgcgtaaagttaactatgatttgatgaggatatttcatgttaagcaagccaatatgcaaaagtatttagaaaaatcatggttataagaaaaatgacttataataagacgatgagggaaaaatatttttgtttttttttttt

SEQ ID NO: 307043 - DNA, 2049 bp, Cannabis indica
tggcaaaagtgacatttcttgtagttgtagtatggtatttttgcaaattttaatatataattatattattttttcacaattagttatattttcgtgcatatgggaagagaacccatgcaactaccacacacttaaattgtttggtatatatcacaaattgtgaaaatagaaataatgttgtttctaaaaattagttatttgtgcacgtatgtaaagaaagtaacacaaacccgacgaccaccacacacgtgtgggagtactcataatctaaccgagcttaggttttagatgggtgttagtatgcttgcataatcatattagtacacgagcgacttaattcgtaactcaacttatataattctattggtatataatttaattttttttttatttgtgtatatatagcaatagtaagcaagtaaaatggatagaccaatagctaaataacaaattatatacatatagtactatagattttagttctggtatgtttgaggaaattacattatatactcactttgttttgcatgttttaatttttatttttatttttatattctttatgatatacttacttttatagatgatgttcccattatatcacttagattaatgtaaattatgtgctagacttaaatagagaatgaaagtatattaagcaactcactcacaaatgaatatattttaataaaatttaatatgagaatattttttattaataaacaaaaaaaatattcctcaatttatctttatttagacaaacaaaaacaaatcataaaatcgtcaattatattcaaataaataaatacataaaatcttttctttgttgacatttaaaatacaaatgtgatgtaatattgtatgtatggcttattaatatatataattttaattattacttatgctaagacacaaaaacatataaattaattattacttaatattatattatacatattcgaatatcatcatgactctcgatcaagttctaaaatcccacataataatataaatttttcatttaattttctatttttctttactataatctttttataaattttttatgaagttacacatgacacaaaaataaaaataaaaagagcttttataatattctagttccaattcatggagggaagtcgaaactgtggtgtattattattactattactactagtactacgcaaaacgccgtcgtttacagaaccagctgggatggaattattctgatgatgaaacgacgccgtttgatttaatatagcaacaaacgacgacgtattagaagtattattaagatcagcatgaaagcgctttgatacttgatcgtgtaactcatttgtccaaaacgacgattgctgttgtcgtttgactcccatttgaagaagatcattattattggccgtttgatctgaattagctgatgatgatgataatattccttgtagaaaactacaatcttcgttttcaagtaataaagaagtaaaattattattattatttttgttgttgtgattattattattatcaataataatatgatcatgatcatgatgatccatattattcatcatcaacggtggtgatcgactttgctgctgtccattgtttttcttgtatattcgacataaaacccaatcatccagctaaaataattaataattaaattaattaaaattcaacaattatttttaatcaatataaaacaatataaattattcatgaaaatacttatatatatatatattataggttattatttagttatattgttgttatatgtatttttaaaattttataaattaaagaaaatcacacttattattattattattattattattattattattattttagaaaaaaaaacaataatcaaagttttaaaattttgaagaaaataataaattaatataaagtttaaatattaaattaaacatacttctaatattaaataacaataaaaaataataatgatacaaataatatattaatatttatgtatatttaaattaatttaaaattagtataagttaaattaacctaaaa

SEQ ID NO: 307044 - DNA, 1103 bp, Cannabis indica
tttttataaaaaaaatgacaaaaattagtatactatgtaaatttccctatcatttgacttgttaagtggcaattaagagagaatagagcattgattttgggctttggttgttattattgggaaaccttcaacatcatgagatgaaagtcaacacactaaaataatcaaaaagaaaaaaacttccaagggtaataatgtcttagttttcttcttcaacatctcttcttttgtttgtgatcaattgaatatgttatgttggcatgtgaataacttattttagttattataattcttattagtcacctttttgaattgaaattgaatattacttattttgatgtcttttttaattgagttttggtgttagtggagtacctaaatgtccaagtccatcaaaaagtgtgagtcatcttttttcctttttgagcaaaagtagaaaagacatgttattgttagcctttggcccttagacacctaaatgttcatctctttcccacacaaacttatcaagtgatgaggttgttaaactcaccaaaaaaaagcaatttttttactagccaattgagttaatatatggaaaaacagaatatatttcgtgacattgtttgttttatgtattttgattaagtggaaatatattctaagttcaatttgatatactttaatttttaactgttagatcaactcaatcttaattcaataattatggagatcacatcatcttatactcaattttaaggttttttatatctattggcttgttaattaattgttatatatagtggctaagcctaaaatcagattccaaattagtgagagattaggagaattggcttggagttctaatggcttattctcaaggtaggcactaagatttatagatataaataggttcaaaacaatactatgatgtaattcatgaatgattggtcctccctatattaatattccctttattattagtctaattaagaaagacagagaaagacaaaaagagtggtcaactcaacatattcttccaaacatgatgtattataaaattctctacttaatgatataagggaagaaacccatcatgaatacaaaaaaaaaaaagaaagaaa

SEQ ID NO: 307045 - DNA, 1048 bp, Cannabis indica
aacattaggtacttatgccgctaaaaataaatatttagattataccacatataaacttaaaactttagatacttatgtcgctatttatccttaatcaaaattaaagtatctctcaagtatacactctcccttttattctatatagtcgaacctatatatatcaccggtcaagctttaattttcatatttttgcttctcaatttttcatcaccgtgtattgataatttttctaaaaggcactttatgaacattcttgtttttagtcaaactttaataatgttgtattttatattaaggatctggagtctaagaatctagtcatctttaattataagaagatgaagaatgaagaaaaagaaaagaaaaattaatatttctttgaattttataacaaatttttatttttaattatatatctttaaatttttaaatatattttttaatactaaataattttaaattttaaattagtttttatattttttagtttaaattaattttttaaatttttaataaagtttctaaatatttaaatgacttggactaatataaatttgcaatgtataaatgagtttatacgtggacaatctaacacgtcactacttaacaattaaaattggatataaatgataaattgctaaaataacacatatttggaatgttttacagtcaaaaaatcaattttgggggataattacaagtgtagtgaaactttaggagatttggctataatttactcaataaaaataatattgtttaataaataattttaaaaaaaacataatattttaataattatactcaatccgcatcgggactgaggaagaatatagctaaaaccctcaattattttttattacatagttattatacacataaaatatgtcctcatcatcactaacaagtgttttatgtagtagtaaattttttctaaattactttatgataataattttaagtgactcgaaaataattggaaaatttatataagtgaaaattacatgaaatatgagatttcataacaaagttagaaaaatatggcattttt

SEQ ID NO: 307046 - DNA, 1332 bp, Cannabis indica
ttcaattatatttgttgaaacagattcggaagtgaatgttcaaccaacacaagaaattatcaaaagcaaagaagtgaaggcaaaagatgatgatccactcgggagatccttgcctcctttcaaaggaaaacaatggtatctcaatcacgaagatgaaagagttgttgcgtcttacaaagtagtatacgaagtggctgatttcaaagtacaaatcaataaggctttaaaccgattcacaaacaccattttatttcataaaaagaagactgacacacaaggggaaacaacacctccatcttcttctggaacagatggaatcagcgagataggttgtttttgcaagtccctgtaatatctttttttaatatttacttttgtgatgaagatttagaactcaatttagtaatatgtttcttcctattgtttcttatgtaatttttccatataagttcttttttatattcggtgttattgcaaagacttttataacttgaatttttatgaaaaatgcaattttacttacatattgttcttttttggaattggttccccaatcagaagaaatgcgttcatgttacacgttagaataagaattaagatatttcttccggtatgatatactcaaaataacaaaattataaataataataatgaagttgttaataacatagaaaattacaaatatatacacaccattgttttaaagagttaatgtaatgatatttttactcctctccctcaacatcattattttcctcctcatcattctttgcatcgtccacttcagttgaacctctacatggtctttcttctgttcttcctgagtcggaatgagtagtgcctttttctttttctcgaaatatcctttaaccgcatcatctaatttacttgctgcattaaaaaccttatgcaattcttggatgctaatttcgagtgcatcatgtatttcatcattcaagggttttgatggtggaagacttacactagggattgaagattgattgccactttccttctccatcataacatttttcatagaggagttatcttcatcaccggatggtaattccggcaacttggtaatttcatcaaaagcttcacaagtatcgtcatttagagacatgagtgtttgtagatagttgtaaagtctttttttggcaagttagttgacaaaataatttttccatttatggtaagattgctatgcattcatattcgatttcttgccttataaattcggattgtagttgccattttccttgtttggaaagttgcactttcagctgaactttcatttgttgaaaaacttctcaaaagagaaggaattctctt

SEQ ID NO: 307047 - DNA, 2287 bp, Cannabis indica
cccccattaacataggcacccaagttgaaatttaatttcatacacatgatttctttactcgaataaaaattctatcttgggtattgttgactaaaatttttgccaatgatacagagtcaatattacaataataaaattttacgattgtaagataaatataagcaaataaatgacaaaaataatttatagaggttcggctccaattgtatgactataacctactcctcttttttggtattacttgtagaattatcaagatcacttgaacctctctcaagtgagtttctcaataattctctaaggattaccaagatatcattttagcaacgaaagagatctcttgaaaattaaaattcgggtcctcacttcattgaaataagccactatttatagacctataagtcaataaatagtactaattataaaatactcaataaaagctgaatattcttccaatcccttgattttagggaccaataatgacctggtctttaggaatttgagagttaattttatcgatctagaacaattcaatcctcactggtgtgttggtccatccaggttgttgcctttcgttattcttgagaagaatctagctgatcctagttggttgccatatcgctagttaatctatctcaatcggctgggcacttggttggctattatgcttagaatgttctagctgattcaatatttctaacatagtacgttgtacttccctatcttctagttactccacactattttagccttatggatgtattttgtgtcgaccaaatgttcactttttatgccacacgtcgatttatcccatgccacatcatttaggcagtttctgggataacaggaataattcttgtttttctaccaaaatagtatatggaacttataattagaggaattcatcaccaaagtagcaatttggccccaggcattgccttctgacagccatcagcgcccaggttgatatagccttggtttatgtggttttgttcatccaaatgcaattctatttcagacattatgcttattttccactaaaaacaaggtgtagtactcatgaaaagtcaaattctcacttatgtcatcctgcaccttggtagacatacctgcacttaggttacctttggtcgtaacctagtgcgcaaccgagttcaatcaccacaagatggtgaattacttcatcagaatcaagaaattagcttagtgatgcactactatcaccttgacactcaaaatatattaagaacaagataaaaaaaagttataggcattgaggttgaagttggatttcaacctgggtgccaatatgtcaacatggttgccgattgttgaacaccttacagtgattcagccaaatctcgctcgttgcaactcagatttatgcaattccaaatgcattggaaaactctttaaggatatttcaacgccaatctaatagtcatattgaaattttgaagatagtatcaaagcattagaaaacgatctgatctctcaaattgacgatcaccatccaaaaatcaagatgagcgatctcaacctttaataaatggtatggcatccacaaatggtcttatatttactcaaaatgaatattcccaacatttcctaatatttttaatattttattattattttaagagacctccattcctataaataggaggctcttcgagttaatttttcacattctacattcactcaacaagccaaagcttctctctttaaattctgagtattcatgctcttttctgattttcaagctttctaagtctgctcttgtaaagcttctagatttttcgtagttctcttatttctttaactcttatcacttattcgacgatatagtgttggccatttttcagtgtcgacactatgaaataaaaaagaagagttttagttatgtatttttaaggataaaatatagaagttgataagagtgctctaagcaattttatgtaaaacttagcttattttctatttacccaaaaacatggtgatgttgacatcaatgtttgacatctgacaagaaagaaaacatcctggagttgagtagtcctgagtcatggcaattgacctgggacggtccctagccctgcaccaaggttgactatgggaacttcaaaatgggtgtttggatctcgctaagttgtttctaactcactatctttcagtattatgtaccacgaaaacaagaaaatgcaaatccaagcattggaagttgagaatacacaaaacagcacctcgaaagtcaacccaagtgcccagcacccaggttgacattcca

SEQ ID NO: 307048 - DNA, 584 bp, Cannabis indica
tattattattatgtaatgaaaaataaattaatttaaatattttttccatttgtttacgtgtttgtacatttaatgtcaagagtcattaacattaattaagaggacattaatatataattaatgaagtgagggtgattgggaattgagatgagaccaaggtttgaatttgcatctctgactcttaatctcaattaagtacaaataattatcttataacatgccttgcaagaaaaaaatatcttataacatgtgtaagactttattaagaaaagaaagttaaattgctcaaataataaaactccaatttattatacaatacaaagttttttttatatgattttcattattacacaagagattacttgtatataaatgaagattgcctttaatataatttaatttggttgaatataagatgaactttatccaaccttcaaatgatttttgatctctctttctagaaatgaatttgctctcaaataatcctatttattacctttaaaacttatttatcttcatctacctagttcctacatgattattttcaccttttcttatacgaattttgaagagagagagagaga

SEQ ID NO: 307049 - DNA, 2200 bp, Cannabis indica
aataattatatatatatatatatatatatatatatatatatggatgagtccgcgtgcatttgtatgtatctatagctaggttaaccagactgtttggtcaaacgaaagtcttttcagaaaatattaagcctccgcgtgagtccattttggacaaaaataataaccatcgtatattattactatcgacacacatgaatgaatatgaagatatatagatatgactatttgtatttaaagactataaaaaaaaatattttactccaaagaaaaaaaaaaagcaatcaaaaaaaaatgtaaaatgctcaaaaattgtatcaaatggacaaaattctgaaattaaaaatatttttagtcaatttggtaaatatgtttacctgataaatatttttgaacatttgttacattttgttagtattagaattagttaggttgttattctaactgttttggtagttgattattttagttatttttcccctagttgttgagtcatttttttggtcattgtaaggcctctttttcagcttcacaacataataagagaaatacttcttctccttcttctctctttttcttgctctgaacttgtcatagttagtgatgaggtcctaaattcaaatcaccttgtaattgtatgtgtatcaaaagtaggttacccttctctaccacatctaattgtaataattagacttaattgttagattgtagccctacaagggaccaaccgtggcatgtatgcgcccactcagatttttgaatttaaatttaggtataggcgtaaagtagatagagtgaaatcgatcgagcgtaagtaaacatctcatttttgttttcatatggatattgaattaacaaaatgttcatcaaaggaaatatatatatgcgtagtattgtgcacgagttttggttgattgtaagttgttcgtgaaaaatgtttaggtgtggcgtgtgggggatatgtgtctttttggcttgctatatagctagctagctagtgctactaccacacttgtcacatgcattatttatatatatattatatatatatatacatatactacatatatatttacaaatttatgtgtatcaatgtaatttaggtacatccatggccaaattgaagaccgccaaattggttcaggccacgagatacttgttctaatgtgtcaaacacattattatactctccaactaacccctcatatgcttccaatatctaccctatagaccatgaccccctttcttatagacccatccctaaacttttttatatatgtatgtatacactgtaaccagtggcggactcagaatttaaagtgaggggggcgtaaataaatttaaaaagaaaatataaagtgtagttagtgggatatgaacctttaccctctaatctatttaccaactaccttaaccattacaccaaagttactattatgtctataaatatcatcttttaatacaaatatatgttgtaactaattaaaatacatatacatttttttctcgatttttttttttaggggggcgactgcccccccctcgctacaattataggtacgccacacactgtaactatataatatttttgtatatatatacacgaacacattcaagtgtacatgtaaaatctactttataataatacatagacataaatccttttgcatactaatatataaatatatatatatatatttacatatattttataattttatatatacatcattacctttagcagatgacgaggagaccaaaatttctattgtacaccttgccggccggccaggcaattgtacattaggacatacattcacttttgtgttcgtgataatgtctaaacaataacaaataactttttattagatcatctcttgtaattttctatatatactttaattatacaaagtcaaatcttcatattggtatgaaataatagcctgttttttccattttttttttattttattttactatttatttatttaggtggtgtttggtaatacttttttaattagttttctgtttttaaaagtagaaaagtgaaaatatttttcaaaaacatgttctgtaaaactgtttttactttttaattttataattagaaatcaaaattttaaaaacaacaaaaatcactttcaatatttttttaaacatttttttttcttaatcaatcttttggattacgaccagacccgga

SEQ ID NO: 307050 - DNA, 2523 bp, Cannabis indica
attatcgatatgatatcgatagtttgtggatcggacaaaaattccacaacttaatattattaatatggtatcaatttttttttataaatttttggcaatttatcctaatttaccttttttttgttttaaattgcaagatcgattgtgttttttgttgtcttgtacgatggtgtttgatgtgtagagagttttaattgagtttataaagccgaagacaatttgacgttgacagttagaattgacacaaccgtacaacaaatgcgccaaattttatatgaagagttagaggttaatcctttgacgtatgatttaaaattggagatttattcgtttatgattatcgtttggcgtatcatctactttcatgtacaagcaagaaatctcaaattttaagacctcaattttaatgtttggtaacaaagtgcttccaataaattcgtagaacttcaatcttaagacctcaatctccaaacatcagatgaagttctacaaatttaatgttaaaaaaaatgtgagtgtagagaagaagaactaatctacattcgaaactgataacaatttttgagagtaaagatgaattgaaatagtttcgcaaagaaaaaaatctccattgaatcaaaataagagaatatcaagcaaaaactagttagaaatgaagcttctaaaacatacatcaatcaataattatagtaactttgagcatattgttttatagagatcctaactaagattaaattttccatttcttaaaagaaatgatattatatattagaagtctgctatttggaaattaaactattttgccatgaaaaaaaaaaaggagggaattacagaaatttgatacatacatttaacacaatcataaagttctgtaactgtaatgaaaataattgaaaacagagagagtttgtataacatttgctcactacttttatcaaatgctcaagtaccaatattcattctgttctaagctaaagacattttggcacaaaattattgcacatttgactgaaattagtgaacttttttctgaatgaacacacatgataaatgcaaaaccccatgacatacttcaagatttacataactacaatcaaagactgaacttgtagttgtgtggttcaaactttctaatcccttgagttttcaacaaaatcaggtctaactcaatcaagttaaaatagcgctaaaagattcgattcgttgaattagtttgttctcagataagatgatgttatatatatgaagagagaaagagagaaataaccccatatcgacttcgttgtaatcatcgtcggccattttcaattgatgatgaagcctttggtccctctctctctgctcgatggactgaaagagttttgattgtatggacacgctttgatcgtctgcgagtgtagagtttccgtcttcttcgatcgtcgtcgacagcgagtgcggcggctacggcttaggcttcaacttcaacatagaatagaataagaatcgccttctagataaaagagagcttcagcaaatgttattaaggtttttttattattatctatttggttcgattgcctaaataaaaaatggcttcacttgataattactctaaaagcttcttttactaggagtggtaaatttttcaagttttcggatttgaattttagaaaataggaaccaaacccacccgtttgtgatctcaatttttgaggttttaggtccgggtgaatcaagtacaggttggctcgagtttggtgaatcgaggtcgagatctggtttgagctaggctttttttttttttgaaaatatcactcgagtcataataaatggcttcacttgataattattgacgatacaattatttagttacatcttcaaaatttcttttagtaggagtgcacattaggtaaatttttagagtttttgggttcgggttctagaaaatatgaactaaacccacctgtttgtgacctcgattttttgggtttcaggtctggatgaatcgggtcttgattggctcgaggttgggcttttttttttttttttttgtaaaaatatcacttgaatcataataaatggcttcacttgatgataaaaccgtctaattacatctaaaacttcttttagtaggagtgtacatctagtaattttttaattttaaaaaataggaaccgaaccaacccatttgtgacctcaatttttgggtttcaagtccgagatggctctagttcgggtggattggggtcgggatcgggtttgagctgggctttttttttttttgaaaaagatcacttgagtcataataaatggctttacttgataattatcgacgataaaatcgtctatttacatcttttttttttgatgaaacacaaaactttattaaaaaccaaaaggcttaacagcccaagttcatagtggcaacaaagggtgccacttcccttgaagaaaagaacttgaaactgctacaagaagcagcccaagcagcaaggttatgcgccccgtgttagaaaaattaacaattaacccaagatctat

SEQ ID NO: 307051 - DNA, 2270 bp, Cannabis indica
ttcttttttttttaatatatatttggggtgataataggggaataaactattttataagttttataagttaataccaatttagcttttaaattaagatttcaattatacgagatcttcaaccgttccagccacaaagaaagaaaaagacaattatcattgatcatttgagtagcaaacacaaaaattatgctatcaaataagcagcgctcttataataacacgaaaaaagttaaataatttgcggttcaaatattacataagattttaattatatatatgctaaacttctagtatgtacattatctattctaaggaatcttttgttaaaatctaattagaacattaattcagacgtgcacttgctatctcaattaatgtatatatttttttctaatgtttttattattatgaacattaacaaaactgaatttaaaataaaaaaaataaaaataaataaaaaagaaagttcgtagtatacttgtgggtcatgattggttccaaatgagaccgtttggtcatgacttatgagaggattgccaatgtggtagggtgtacacatgcatcgactaaaaattaaataacttcaaattcaaagctttaaaacctaataataaaataatttacattataaataattaaatttaattttaagttaaataattaatatttaaatttaatttttagtaataattaataatacttaagttatattttttaaacatccctaaatacttagatgttaaatatcaagcaatcatttacatgttattttttattgatatatttaaattaattttttttcaaaaataaaaaaataaaaatttaatgacttgaattaattagggtttgtcacgtaataatttacttaacacttcacagccaattaagtacctaaaaatttaacaatttaaattaattaaaaattattatgtgaggtacctaaaaaattataaaattataatttaaatattatttatgtatttgtatataaataaaatttaaatatttatgttgtaaattattttaataaataataataataataataataataatattaagtagtgtgtgaaatgagatgagatgagatgtgatgtgggtggacccaccgaaacctacagtgatccaacagcaaaccaatcgtcgccggcaattggatatggattggacgccatgtaagacaacccttctctctatatccactactctttccttttgtctctttctttaatttccacactcatcaactcctatctctctctccctttatactctctttccctcttcttattcctttatcattattatttatataaattaaggaattattcaacttacaaaattttcaatactaaagatagtttcaaactattcacagaattataaagagatttttctcttaaattttgtcacacgtggtaaataaaataataacgttgcttagacaatttttatattaggtgtataatttaaaattaacatttaaattttaataaatcattaactaaaatcaattaaaattaaaaataattatgtaaattaatattaaaattttaaattattttttttacctaattaattgcattgtgaatagttcatggaccatttttaacaagttgaaatattcaggaggcataataatgtataggtcataattcaggaggtaaaatttcagcttgttacaaatgttgagtacacctatttgaagaattttcacattacgaatatatttctttttaattagtcgattgataatttgaaaaaattgattgttagttgacaaacccataattttaatttttctgtgttagggtatcaattcaaattccatatcgaaagaataggtaagagttatctttaatataagttagacacaataacacgacttaaaaactgcacaaaacaacttaactaaaaaaatgatactacaataacctatatttaaaaatatacacccttgcatttgttttaaaagaacttcaagttcataacactagaaaaaagaagtgggattcacatgatgaaattcctccctagaaatattaaccagactattacaatcaattctagtcttagaggttgaatcattccctaaggaggtaaacacttttttcaacaaaaacaaatatgatttctaatttcctctctcgaccaggcaaacctattattaggctgttcatctgatccaatctgcacttttttggtcaaacaacatccaatccgcactaagtgcagatttcatttttttggatccaatcaaatccgcataa

SEQ ID NO: 307052 - DNA, 1467 bp, Cannabis indica
ttagttttgtattgttatcaacttcaggctttggatttgttggaaatgctaaagaaagaggaagagatgctatcagcaatgaaggaaaaacaggaaaaggtactaatcttcttaatctgagaatgctgatgatgatgttattttttatgattacataataagttgtatctaaaacatttaagaatccttacaccattagtaactttttccttttttagaattagtactagggtatctatcatggacattttaagaagcatttcttttgtaagcttaattgtggtggattaacttctcctttggtagaccagttgagcagattagtttgccaatttgttgcttactttctgtgaaattgtctgatccatttctttaacacgtactataggagggtgatacgcaattttttcgggatcttcttgatgaccggaccagaagagctgagacctggcatcgtgatgcctcagttcgagcacagtacactaaaccagcaccacctatcacatgtgctacctttgcacaagatgttctagaaggaagagcaaaggtctcacaagcacacgagcataaacaccagcccatgatatttggaccacagagtgttattagtggaagcttttcaagtgaaagagaaaggatgacagcacaggttttccaaccgggtttcaggtaaatctcagtacagcgattaataaaacatcttacatgccaattggatttgtttgattactttagacaccttacttgtaatgctaatatctctttgtgaaaaggatgccaaccatgagcatagaagaagctggtttgacagagatggagataatgaacaattggcaggagatgaatactaagctcatggaagaagccaattcttcatggtacaaggacaataagataactggtcctagaaaagatgatgaagatgaagacgaagatgatgaggctgcccaagataaagcaagggcatttgatgactggaaagatgataatccccggggcgcagggaacaagaagctcaccccatgtgggtaaaaattgagacacaagaataatgtaatctgttccttttggggggaataacacagattctatgccaagaagcttagtagtttcatcttttacttaatctaattattgagtaaattttaaaattttgtaatagtgtggtttccttttagattcaactaatgtacaatgtcaactagatgttgaatataataattacttgattataaagagctctcttttaaagtgaaaatatgtggattacatttgttaagggagagtggtttctacatcttgagatccacattaataatgacacaatgagccacaataatttaagggcttattttacaaatgcaaaaaaattataaaaatacagttttataaaattttataaatttttacgatttttttgattttatttacagaaaatacggtcattttttgttatttatgtgttat

SEQ ID NO: 307053 - DNA, 4130 bp, Cannabis indica
aaaaaatgtgatttttgtctcaattttgatttttcataaaatgaataaaaaatgattagttttatctaaaataaacagccaagtaattaaataaaatttagattaaaaactaagcgtaatctcacaaaaagacaaaacacaaaacgccaaaatgaccatttgcccttccataactaaaaaccactaaaggtaacaaaggggtattttgggaaattataaaatcctgactattcccgacattcccaatgtataaattattgtgcttatataataaaaatactaggatgtgattctaatactaggatgtgattctaatagccaaacaccgcgttccaatgttgtcgggcacaaaacgtgcaaaatttatgaaatttctatatgtgacataaaaatgcattctcaattcaaataaatcaattataaataactaattcaatattaatcaataattttcataattaagccctaattatctgctaattcccaaattaaagctatgctgtctttacattagcccaaaaccctatcctagacatgcaccccaacctcagcttgagaccccggccccagcccagtctagccctgtacttagtccctagacctcagacccaaatctagatcttagcatcggaactagataattgacccacacctagtcctcgacccctacctcggacccaaacccaaaccaggctatcaaacccaacctcgaacacggacttggatcccgaccctagtcttggaccatgaatcccaaacattggccttggatcacaccccaaatcggacctggatctgacccaaacttgggcttagatccgactcgaacccagacccaaagcaaaagccaaacccgacccttgcattagccccaactttagacccaaacccaagagcttggactcaacctcaaactcggacccagaccctagaccgagaccctgaattgaatccaaaatcagacccaggtcccagccccaaaccagacccaaaccttagaccctgagttaccctggcgttgaacacaccacttggacccgaaccaaaaccctagacccagaccccagccccagccctagccctgaacttaaaaactggactcaaaccctagggtttggggatggagtctttggatggggtttcgatctagggccatgatcaaggttggggatgtgtttatagtaaagatagtataattttaaagaacatatcattacaagtcaataccaaatacactgtgttgtattataatataataatagtagtgtatcaaatattgtattttattaaataatactaatataatacaatataatctgatgcactactatcgatatagagaaatgctaaagggtacaattggtgcctagcaccatcctatgtgccaatatcgctattagtgcaattaaatatcgggtctcatatattttactctaataacatttatggattatcgctaacaaatcgtaaagcgacacgtctacaaggtgctaggcactactagtgcccaataacaatactcatcaatataatataatacaacagaatgtattaaaagaacctttaatgtgcctatgggaatctaacaagaaactttcttgttcatgtgatttggcgaatctaaagcgtttagtgatggctcacccatttaatgaacaattacttttagggtctcttatagtagacaacatgtataattgatgtttttcctttaaatttttttaaaactttcatatttattttgtgcacgacattatgtatataatgtaagaaataaaagagagattacaatggaagaataaaataagatgaataaaaaatcaaaagaattacaactttaagcaaaatattataaggacaatatattaaataaagagttacaattccaaaacacataatacaaataaaaaaaagagttacagttcaaaacacaaagatacaaataaatgtaaactatataaaaaaatatatatctaatagtatatatatgatatagaatatatataaaatagatgatacatagtagagatataaagagcatatatactatgtatgtatatataatatatgtaatactatatagtcaagatataaatatgttatacaggtttttgtaagtttgacacgtgaatcctaacctagaaagactaagtgataagtggcctgtcaactcgattgaccgatgttccataaagatggaagccttaacctcaagaaaaggccatcatgaaaggaactcccctaaatggcgacgatacgggagtcttgcccaatcataagtctcttagtcctgggaactgaagttgcttgcttctgtaggactgaagtctaatactcccactgtaatgacctcatttcataatatagataaggcaattagcactaatttgtgatatttttatattatttgcgaattttaattatttgtggggcccattgctagaaatggctattagagttataatttctcaatttgagagattttattaaaatctatgtgtattatttgtgttatatctgaattatgttatttttacaatttttgttcggcgacaacggaaaatgcgatggatggctagtttaatcacatgggtacgtctagaaccttatttcttagtggtatgtatgttggaggaaatagagtactgggattgagcggagttataaaatttgaacattttacccctaatcttgaaaatgcctaagttataagtttaagggcattttagtaaatcgccaagagaagtggtttggtggctgccgaggggagtgacacttggctattctaatttcagaaaaggattaattttgctaacctttattcaattagagtaaagcaaaggaaaaagaccaaaaatataaaatactcaaagaacactctcttcccttccctctctcttcgaaccagctaggaaaccaaggaggtggttgctaatttttttttgttttcagcaggaattggaggaggttctaatcaagttaaaccctagacactctttttatgtttttctcaaggttttaattaatttcaactagtgatttgtgagaattagggctgttagggtttgatttggttatggatcattttttatattcattttaggttgattctaagttctggtagctggtcttagtgtttcgtgttggaattgcacaagtttgaactttaaaactcaagtttaggtctttaatggcatgtttgaattcagtgggtctttttaggatttattggttggaatgtgttaattataaattttttaggtactctagaaagtttggtggaaattggttgagtttttagcaggtttgggattttttggggaaaacttgtacaaacaggttaaccggtttgccagtacctgtaaaactggttaaccggttttggcaggttccccaattatcttgttttctcaattttagtccatttcagtgccttagttgagtgtttccctatttcctgagatagtgtagtccatagtgattataacagaaccttgatttgtaggttcgggttctcgaattagggttttggacatgtgatttgcccgattttaatttgtgattaggacatccatccagcacaagacttttttttttcaggtcgaccaactcacttaaatttggaaaggaggtaagaactgcgtataatgtgtaatatgaatatgcgagtgtatgtatatgttaaaagtatatacatgcttatatgttagttacactaccaacacttgtacagttacggtacagagtgcattggtatagtgcatattgttgaggagtacattgcggtgataccagcacaagtatgggaaagtatagggtgtgtctggtatatcactcagtggtactcagggtacgaaacaaaccataccaacactcgtagagtgaggtacgtggtgtatgtggtatagtggttgtaccctagtatggaacgttcttagtcatctattaagccttgtcaataggtgtatgcgtgcctagttaaaagttggtattgtatgatatgtaatatgtgttggaatatcttttactaggatctagatttaacaaaaaagaaggttttaacatcctaaatatgaatctctaaaatgatgaaaataaacacataaaggtatgagaaacctgttgggttt

SEQ ID NO: 307054 - DNA, 3452 bp, Cannabis indica
atatatatatatatttacttcttagaattttttttctttagtattttccatgatatcatacctatgttgtacgggtgtaggtgcttccaaagtgatcaaataggttttaatctcttagtcacttgcaaattaacctgagtattccatagtatcctattcggactttatacctgagtggacatgtttgtacgcatgttagctagcttcatgacttagaaaataaatcactagtttttgcaagcaatcatataaaagattaacataattttaatgataaataatcactttattcatttatgggtcagaatgtgttgttccttcagtaacttacatttattgaaagtaaaaagttattacatgatcgaacagaccttaggttatttatacttaagaaccttttgaacatgtactccatccaaaagacattacttaagagtaacattttattacataaaaatatgctttgaaagtggtcgtccagaccttagcaccaaaacttttcaaacttttgaacggaaggtacgtccaaaagccaccactgaagagtgatgttgtggagcaacatgaaatttcgtggtcttcaaacctttacatttattagtaatattttcttagatgctctccattccaataccattgtactaggatgagtttcattttgtcaacatacctacccaatttatattctcccaaacttgtaacttcgatgacttagaatgacccttccaaatttagtctgagcacacctactacactatattttgtgttttagagcactcttctgaccaccatatctcccataaaaaactttttttcccttacttgtttgttgaaatatctagccactttctattgatgggcatgaagccttaagattgctagatctcttctttcgccaagtttatctgagcactatattaggacattccagttgacatcttgatcgttggatagtctcctaagggatggtggttccaattcgacttgtaataacattgcttcatagccataagctaatgcgaaaggagtttgtccagtagttgttcgttcaagttttctgtacgacaagagaactttgggtaactcttcatgcccatcacattagcttcttcacgaagtttttccaaagtacccttaagtattttattcactactttgacctgtctattttcttgacggtgcgcgactgtcgggaagcttttcacagttccatgtttcatgtagaattcagtgaacttggttgtcaaattgcttgtcattatctgaaatgattttttggggaagattgtactgaaatatgatatttttttaccacaaagtataggacttttttggaagttattgttgctaatggtttggcttccttccacttggtgaaatagtcaacagctactacagcatattgcactccacctttcccttttggaagttttccgattaggtcaactgcccatatagcaaatggccattaacttttcatatgaattaactccttgggcggagccctaggagtctttgatatacaacctttggcacttgccacacttctttacatacgcctttcaatcttcaatcatggtcagcaagaagtaaccttgtcggaatactttcttggacacactttgtccccaagcatgattgccacgaaaacctttgtgaacctcactcaggagtcatacaacttcttcttttgtaacacaccgatcagcaaaggttgggagaaccctcatctgtaaattaatttgtctagaatcaaataccttgcatccttcctcatcatcttccaatcttcctttcagtcacttgaaagtactctagtttcaagataggttgcaatattggtcatccaagtaggagtgtcatctagcattttaatatcctccattgaagagatgttatggtttgtcactgtgttgctcgctagccatggcaaagcgtcagcaattgcattttcctatattgtaattttcctaatagtgtatcccttaaaatgtgtcaagaggtcttgaattttgctcagatatgccatcattttttctccacaagccatgaattcccccagaacatggttgacgaccaactgatagtcactacagatatctaagtatccaacattaacttcccgatataacttgagtccgacaatgagtgcctcatactcaacttttcattatttgatgctctaaacccaaattttactgtccattatgatgttgcccctaacataatgagggtaattcttgccccaaaaagttgataggtagatgactcatccatgtgtaacttccaaataggtctgtctttggtctttttctctggtagggactctctttcctgttctcattccttctcaggcttgaactgtcttttgagagcattatttcatttcccatacactcggccaaaaagtcaatcaaagcatgaccttttatttctactcttggttgataagtgatttcatattgccctaacttaattattcatttaagtagccgaccaaatgcattagctttttgtaatacttgtggaaaaggttggtcggtgtatacccgtatggggtgagcttagaagtactgtcttaatattcttaaagcaaggagcaggcaataagtcaatttttcaattagagagtatttagtttaagcatcgactaacatcttggtgacatagtagaccggatgtcgggtgttgttctcctatctgatcaatacgacacttactggaaattcagtcactgcaagagatatccccaaatcctctctgtccagagatttgataagattggaggttgcgcgagctactttttaagtgcttggaaagcttatttatactcctcggtccattcaaacttttttacttcctcgaaagatgtttaaaaagggcacacacttatccattgattttgacatgaatctgctcagagtggctatccaaccagtgaggctttgaacttttttgacttttatgggcgacttcatatatatacagaagagcttgaatattctctaattaagttagcttcaattctttgagcattaacaataaagcccagatatttacctaaattgacttcagaagaacacttgaggggattaagcttcatgttgtattttttttaggattttgaagcattcatccttatcctttatgtgcccccagcctttttggatttgacgagctcgtcatccacataaatttatatgttatgcccgatctctacatatgatgttatgattttagattagcatggacacatgtgatataattttttatgtattgaattatttacttatcgttatcagttaaagtatgatgttgaaatactttatatattaagaatatgatggtattgtatatagttatattgttattgttagttccatttttggcatatttaattaacaaaaatattttattattcattgtatattttcggctggtatacattaata

SEQ ID NO: 307055 - DNA, 3455 bp, Cannabis indica
ctaattttttcaaaagagaataatggtatagtaaataatttgagtagagccaccactaacttttcagttaatttttgtgatgaaaaatacgtatcagaattcacaatatttttttcaaaaaaacaaaaatataacagtatttattataattataacattatttaatatgtatttataattatttagggtgttaaaattaaagatactttaaaattatttaaaattttgttgtaatataatttttctaccacctaaaggagagtagataccaatagaggatgattttacaattcattatcttaaaaaaaaagtatactgatacattaaaatttcaataaatttaaaataattaataatataaaataatatttaaataatttattttacacgtataaaatataaaggttatacgtgtaataaattatttaaaatttgtttctgtgtgtttaaatttttttaattttttcaaaattttatacgatgttgtaaataattacaacgtacatgaataaaaaataattagactaaaatattcttccaaatgctaaaataaataaaaatacattaatatatctttcttaaaaaaaagtgcattataatatttttctaccaacacatttcttttagtagttctcccacagaatttttaattattatataattttaattttcaaatatataaattttaatttttttcagttttgagagaatttatgtgattatgtacgtagctatgtatatctatatattgggtggctgatttttttagtggttatgtatttgacatatgtaatggattatatcttcttattacattggataaactttcaaaggtcatttttgttttttcaaaatacacattattttatattactattattatattctatccaacatattgtccttttcgataagaacgtacgcgaaaatctaaatcccataacattatttcgattaccgaaacgctgctccatcgttttgtctttgtgtttattattattattattattattattattatctttttttaatccattattatcattatcttcaaatcatattcactaaaaataaatcatatatgtttatactttgttaaaaaactattttaatagtgtattaaattgtaatataaatatattatataataaaaaattatgtaaatttagatcacaatatatcatagtgtaaaatttatatcacaataaatactatatttttaattttactattgtgctactttttaatattttattatgcattttagttaacatgcacttgcattaaataacttgtattattattattattctcttatcaaattttatatttacttttgtattattactattattttatattttttaataaattgttaagtgagcattaaaggatatatttaattttacatcaatagtaaaaattgatgtaaaaatattataaaactattttttgtatcaaatatagttcaaacttttatttcttccattagaaatagtctaagaacgaacctataaataaaattcaggtgagttgataatgtactcaaaaggaatagtgcctatcactcgtatgacttatgagatgttatattattattgatatattttaatacaaaatcccatttattttcttttaataacatttataaaaaattactaatcaggatgtcaccgcataaggcaccatagtgcctaatcactaaccatgcttatttatatattgtaataattgtatggaatagtaaataaatagtcaacatcttacactatcgtaaattgtttgtagtgatatattcatattatttgtattaatgtctataatttaagtaacatttaaaattaatcagtgaatcagtgagatttacctttctagtttgcgataggtgcatgtgtacttataatattattatattccttataaaaaaaattattttcttaatggtacgtactgggtgtgaaattactatgatatatttattttataaaaagagaggtcttgagtgctttcttagttgattgagttctgaccctacgtacctagtttgctataaataccacataacctcttccattcttcttcatcccgactagcctattacatatatatatttattgcttattagtccttgaagagttgtttaattacataattaaagatgttgcttgggaaaattggggacagagtgagtgggattctgaatcgtggtgatgatcagaaaagggtaaagggatcagtggtgttgatgaagaagaatgtattggagttcaaccccttaagcgcttctgtcaacgtcggctcttcgctgcttgaccgtgttggtgatttcttgggcaatggcatttctatccagctcgttagtggtcactccggtactaatatttactatatattactattactactaccatttacttttgataaaattaccactaccagttctatacatatatatataaatcccatttttatattatataagcaaataatatgtatggctaactatatattttcttatcaagttcttagatatatccaataatgtcatgccgctcttcatagaaaaaatgtcatgccactaatgttggatttggatggatttggatattggctgggtttttaagaacagttcggcttagtgtatacagtatgagttttattttatgacagttcgattacaagtgatttttttgagtcactatcttcaaatcacaagtattttctttgccccacttttggatcagtttttaaagtcacaaaagacttttgctgctctttgggtaaccaataaattattttagctcttaattttaaaaaactcttttaagagaaactaattttaataatttagtttgccgaaaagcagaaccaaaccagggctttcacgtcgctgtcttgcatgcataaaatattataataatgaccaattaatcagataaaactaatgatggtatatatacatgtagtatattatatatgcataatgaagttaagctgatctatattgaaaataatttttatgaagttattataagaaaaagtataattgttatgctattattatatataaaataaaatatgatcattctttatttttatttttagattctcaaattagaatttattattcttttaactaatattaaattttatcagatcccatatattattgctttatatatatttattttacttttcacttgaaaaataaaattttataaattataagtgaaagataggtcagttttgtaactgtgctgttaagaaaagtagtgtaacaaaactgtagaaaaaaaattgagctgattgtttggtattgtaaattttaaaatattgtgaattattaagatctattataatgataacgataatgttatactctagtttattataatcacaaatatataaaattatttataaatattttattttttaaatataaatttatatgcatt

SEQ ID NO: 307056 - DNA, 3650 bp, Cannabis indica
aatttattttggggtacgttgaaaaatactatttttattaatcaattaatcaaatttatctctaattttatatttaattgaaacatacctctttttatatgtattgtacccaaaataccttgacataagagagtcacgtggagagtatcttgaagtgacaggagcaaaactggtacaatgcttaaaaaaagaggtaaaaatgatatactttaaaaaagagagtaaaaataaaagaggacaatataaaaaggatatagagtataatttcctcatttatttttaggaataattacataaggcaccattttttgtaaaatatttacatttttacgttcaaagaatgtttttttacatttttacggttttccaaaaaataacacgaaaacaacataaaatcaacaagaaaacaacataaaagtaacatgaaaataacaacaaaaaaacaacaaaaaataacatacatataacaaaaaattaacaacaaatgaacaaaatttcaacataaaaagaccgtattttatgtaaataaaatcaaaaaaatcgtaaaaatgtttaaaattccgtgaaaccgtatttttgttattttttgttgtttttgttgcatttgtgaaattaacccttatttttttccttttttggtatttatgaaataattccagtattttaagcccatttagattttttttgtttgtagtggcccaattgatggcccatttgtaacacaacaaacgcagataacaacctctaaaaaccacgctagggttttcgaatgtgttgttgagctctctcgcatacagtcgatacagagagccattgcctcagctactgctcctctgagatcttgtagctcagaatcccaaaatggttagcatatatttgtctctctttaattttaccggtcttttcgacttatttttgtactactactatttacttttgaagaactagaacagatgatgtggctacaaccactgctagtatttttccccgtgtcactgatcgggtttgaatgtttgtgaaactttcatctttatttttgtatagtttgatgcattgtaaaagctgtatcgatctgtctaatgaaacatatattttttctcccaacaattcgtttgattttcttttccagttacaagaaatataaaaacggcactagaattttataatatgaagtgtatggatcgtgtataaataacataatggaatttgggttatttgactcctcaattaattcattcgttaaagagttgcacaaactacaaagcttttgttttgttctttgttctaaacaaaattagcttttgtatttgttcaccagtgctgtaatgtgatgctgtaagtgttatggggttaaaaaggcttaggcattctatacttaagatactgagcggctatggtgtgaaacatatattgttagttggtttctgaaagaaaaaaaaaaacaaaattagttccacgctgcttataataattgtatatatatatatatgtatatttatggttgtatgctgatgctgcattatttattttgaaagggttgctgaattattctttgtggatattaaatatatttttgcttattgttttcttgtgggcattgaaaattgtttttgtgactatttcaggcgagagggttgaagaagcacttgaagaggcttaatgccccaaagcattggatgcttgacaaacttgggggagcatttgtaagttaatttttttagaagtttatatatttgttaaatgatttttatgtcactttaatttattatatcttaagttcattttattattcttctccaggcgcccaagccttcatcagggcctcacaagtccagggaatgtttgccattaatcctaatcttgcgaaaccgtttgaagtatgcccttaattaccgtgaggttgtttccattttgatgcaacgacatatcatggttgatgggaaagtcaggactgataaaaaatatccttcaggtttcatgggtatgtaatttgaactttatgtgtgtatcacagtttaaaatgttacattagatagatggaaacagtgtcaatgtgtcatagattccgatatgagatattttttttctgttttacttgaaagacttcgttttacttgtgtaagtagatgtatgactaacttcgtttggaaattgaaagtctattttccactttcttatttatcaatttaaattgaatgcctttatctctaactatcaacgattcaacgtaactttatgtctgggatgtcttctcgatttttttaatttggcatcaaatttgagtaatggcatcaaatttattttggtattaggagtgaattcttttgtcttgtcctgaattatcattcttattgtgttccttactcttacagatgttgtatcgatccccaaaacaaatgagaatttccgtctcctttacgatactaagggacggttccgtcttcactcggtcagggatgaggaggctaaggtcatttatcttacattcctgtaaataagtctttagttttctgtttctttttgtaaataatgcatataattaacagaaagggtgtacttgttcccgttgacatccaacacctataagaattggccagcaagccatatcattggcgatgctttagtatcacatgtgattattgcaagtatttatattaatggcatattgtgaatctcatggatcacttcttcctattgatttatgtgttttgcagtttaagctttgcaaagttaggtctgtgcaatttggccaaaagggtatcccatacttgaacacctatgatggtcgaaccatccgttaccctgatcctctcatcaaggccaatgatactatcaagctggatctggagagcaacaaaattgctgatttcatcaaatttgatgttggtaatgtagtaatggttactggtggaaggaatagaggtcgtgttggagttataaagaacagggagaagcacaaaggaacttttgagacaattcacgttcaggatgccactggccatgaattcgctactcgattggggaatgtgttcaccattggcaagggctccaagccatggatatctcttcccaagggtaaaggtatcaagctgaccatccttgaagaggccaagaagagacttgcatcccaagcagcagccacagcttaacaagttatttgtagccataaatatgtgaggactttggcaggtgttttctttttctcgtagctggaccatattatggatttttatgtgccaaattttgctctttcttatggttggtactggtaaattaattgctgaattatgagcttagtactttgtattcagaaagctgtttgttgctgttttttaataattgtccggagggtgtgtttctgttattactaattgcctctgcctgatggaatggtcttgtaatttaaccttacgacttacgaggccagttccaaagttttcttaatcatcccgaagaattaattttaacatcaattaattaccatctggtttatatttaccgtatacttgaattcagtcgccaacgaaaaaattgcataagaattatgccggtcaaactctgatccataattttaggtcttgtttgaattcatgaaaataatttaacaaatttcatatacattatatacattttttaattatttttttttt

SEQ ID NO: 307057 - DNA, 2171 bp, Cannabis indica
acagactttcaagtttcaaccacgcacctgcggctatatcttcttctgcaacctttctcagaaccttatctccaagattcaaaatgatcgcactatgagcctttgtaagagtctccatcttgtctgttatcgaaacaggaagagacttttctcctagcagagcctcatacaactcttgatgaaccaacaacgccttcatcttcattctccataatccaaaatcattcgtactagtaaactttttgacatcgtattttgcagtagcgatgattacaaaccaagcaaaatctttttcgattctcacacaggttacaaagatttacagctatatatagatttacattgttgtcaaatgtatctcctaaatcatcttggcgcatttacattaccataaatgatccaactcatcaccagcaataataatccacatcatcttgaaacgcgtgctttcagtacggacaacctggaagctttataacacacaagccttccagatacgtacatgacttcattcctggatgaaccttcaagattgaaagagctatctgggagtacaccttcggattagtgacaaaccatccgggagagacatttcatacacggtacaagcttatctggaagtaccttcggaattcaacaagaccttctgcacaaggctttctagatccacactaagcttccggtatctgctctccggattcacagcttctaatcccggatgacaaaacttgtaaccataatcaacaactgtcatatagtccgagagaagattattaatggcactttgaagatcaatcatgtctcttccaagataaatctagctggcatttttactagaaaaaatgccaaatctttttccacctcattttaataatgttttaggtgtgaaagaattttacactccatatttaaggggcttattaaatatggattagttagttaattagacaatctattttgttagtttgagagtttgtcatccgctccactattgaacaaacaaaatatgcagtaataagaacatagatgaataattctctgatttttcctaacataaagagttggtatgaagtggcactataccaaattctaattgtaatttgttgatttttaatgcaattacaatttgtgaaaaaaaaagtctcactccaaattacacagtagaaaatttacaatgggaagcaacgtgaatacccattattatacagcttattaattaattaaataattatatagtatcttacttcatgtacataatatttgtggaatttaaaattgacccatgatgatggatatgaaaatgaaagtataatttcgaagaatatatattgacataaatttcgaatatatatttaatatatacataaaggtattgggtatgttatgaagttagaacaagtcattaatggaccaatagctggactagtgtgaagactacggtcgtatggcatgaaatgaattagaaaaaataaaataaaaaatgggagtggactagttctctgacccaacgggttgactcagtcctctaaaagtgaaactttcaaactttctttgtctaaattcataaattaattaattcattaaaaaaaatattaattaattaatgggtatgtttttgcttctgttctttcttcggcttattattcggtttctagggccaagtcaaatattgagacaaaagaactaattaaaagttgatccaaaaataataccaaaattaccgattttaactagtcaaacaaaaaaagaccaattaataaatgattctttagaagaaccagtaccgtactactaatctatgcaaatttataccgcgtaacctcctcggatcagactatatacaggtttaagtgataaaaaaattccaagtaaatattcatttaaacgtaaacattttaaataaaaaatattgtacagagaaaactgtgataaagacaaacaaaaactttaatttaatatttataaagagtaaattgcagtcaaattctgtagggggtttagaatgaggtgttcaaaataatttgattatagggaatattatgaaagagaatgttatggtagagaaatgtgtaaactgtatttagttgtgtaggataatatgtagttatattccggttaattgagttttagttgagtataagaattttatatattatttttaaaaataaaaa

SEQ ID NO: 307058 - DNA, 1784 bp, Cannabis indica
taatatataaactttaattgatttatatattatggttaagttgtttttgtgttgttttttagttgttttgtgctgagaaacgttgaaattcactttgtccgaattcgccacgtggcaaccactgctgcgttctgacgctacagtttgtgagcgtcaggcaactctgaaggctttgtccctcactcgcgtgtgagtctcactcgcccacatagccacatgtgtgtcacacttctccttgcgcatttgggggagtttttctaccgtatttttgtaaataacaaactttaaaaatagtatatttgaaattaataaacaatataaatgtttatttttgcttgtagtagtataaatgtttatttaaagtaatattaacctaaaatagaaaaaatcccaaacttaaaataggattcaaattttgtttttgaaaacactcaagaaattcttaggtagaccccaccatttttcaatcctaaacataatctctatcctcactcattttcgtgtttagatggagaatcttcacccattagcggcggatccccgcgggattcatccccatagataaaatgtgcatccctagttactagcaagatgaaattagagaaatcatggcaaatgtcttattcacgttcatacatcttcagagtcaatctcagagaaattggttctcaacaagccaacaaatccattttcccttcaatcgcagatcccatcgcgggatttgaaaccaactctgcatcttctcgcacatcctcttcctccgagaaatcaatgggtttaacctctaagatctcaaccatcgattttgtttgctgaacattcactgtagaggacggtccttgcttcttctttttctttgcagccgattttggttttccctgaatcttcactttcgttttcgccatggcaccaacgttcaagctgagagaaaagctagagagagaaatttttttatattatttattatatattcaatatttagttattttcctttcctgatttctttttatttattttttttctcaaaataattattttcaagatcaatggcaacagatgcattctaaatcgtcagaatttgaagtaactagatatatgaattcgatataagtaatttgtttattctcctcttgccttaatccgcaggtcttccatcgtagtactgtttaattgcccctactgttcttttcttttttttttttaagtcaaagtcttttttagtttctaaattcacacgtcttggttagaaattatgaatcacgagaccaaaaatttacttgacttactaaacttttgtttctagttccccgttcaatgaattgaattatttacaaaaaaaattgtcggatttgaagagatgacaaaagacaaatgtattaggcttcaaatagaaaacttaaaacaatgcattagctagctttatatatttatttaatatatacagttaaatatatacttttgaaagataatacatattaatttctgtcgtatgtgcacttaaaaaagttaaaaagaaaagcatgtaatatacatctaatattactatgaaaattttaattattagctctccagacataaagatatgaaacaggtttaagttatccttcactaagacatgttaatatgtttggtagaggggagaaaaggagggagggagaggaataaagggatggctaattaggattttttttttccaaattttaacatgtaataaattatgtcttttgaattttttggctgttaaaaattcctcttgaatttttgaaattgttaaatttaaggac

SEQ ID NO: 307059 - DNA, 1877 bp, Cannabis indica
cgaaggttgttcagacgaatgtttcaatcagacaaaaattgcttggtggttggccgaaagttggatcaaatgaaagtttcaatcagacgaaataattgttagcaaaatattatctgtactgacaaaattagagaaaaattacagttttacaaaaattgggtacttatgccgctaaaaataaacattgggtttatgccacttacaaacataaaactttaggtacttatgccgctatttactctaaataaaattgttatctatcaagcactttaaatacacacacaaaaaaaaaaaatcagagttcgaattcaccaattttgcttctatcaataaagatgtttttttcttttttcttttttatactctttgtcattctaaatcagcaagtggattgggctttaaaagtattttggattggaatatagtaattatgtttaaatatgtttgggcgattgccaaaaagaaagacaatttataggtgaaatgggttcataatgtctatgtgaaaaaaaggaatggtggaactataaagctccggctcaagctagttggtattggagaaaactggtcataatcaaaaaaaaaagttaagagtttggtagatataaaccagtttgtgtccaacaggattcaaattgccaaaggatattagttgcttgcatctaatccaaatagagtcaaatggagtaatattgtttggagcaggcacaatattcttaagtatagcttcatttatttatggttagttatgtttgggagaattgaaagtaaagatagattgttgaaatattactgataatgctacttgcctattaagtaatggtaaaatgaaacaattgatcacttactttttagtgttcattttctatcaactgtttgaaccaggtgaaagactagctgcaggttaaagatatgataaaagattggtccaaaaatgtaattaataggaaaaaagattggtttgacaacttgtaaaattttatagatcactaggtcctcttcaattttagaggacgctattagtttgtacattgtatttgttggagtaatgatatacttgttgattcataaaaaaaaaaatagaaatatttttatttgtagtactcaaaaaaattataactcaaattttgttatataatcgtgtacattgtagttatattaaatatttcacttagaatatatagtaccgaaaataagaatcaattattcatgatttatttaaaagtagataaaatgtttactataactataatataaaaattgattataatttctttaaataccgaaaataccccaaaacaacatcttacttgcaattatatatagtactataaatgttaatagaatagaaatgtattattatatttatagttgaaagtgaggaatagctgaggtaccatctagtccctttgagacataaagagttgtatattccttaaagtggacctctttgtagagtggtgggttggtgtgagagagaagctctttttaattgggccgtaaggtttcgcaatattgggaatgcttggataaaaaaagcaagctgtctgatattctaggcccagtcctaggcccattctcaggcccacctcccccagctgccaacacttctatgctccacgctcttgaatctcccattcgttattatctgtatattataataaatttaatcatactaaaaaaatggaatatgtaattataacatttatttgttactataacaaatttatcattatcgatataacattaaaataataagaaaatattcctatggggataagttgaaaaataccatttttattagtcaattaatcaaatttacctctaattttacgtttaattgaaacatacctctttttatatgtattgtacccaaa

SEQ ID NO: 307060 - DNA, 1836 bp, Cannabis indica
ttatttagcgttaagaatgttggaacacaatttggtcaaatgtctcatgtcagttatttatacagacactaactgagcatacaaactttttgtgatattttggcagttcaaaatgaaaattttaacgttgatgtgataggttttgcataattttattcatttatttgtttatttttattattataagaaacagatagtagttactcattgttgaattggccagctggggcttgttcacttcacttcgtaagcacaacacaaacccagtgactcgagctttgattttgcattagttaaatttttgagagcctgctctttttaattgaccccaatttaaatccatagccttttttttaacttaattgtttttgcagggtcaatataaatcaacattagtttgtcctatatgccgaaaagtctctgttacttttgatccattcatgtacttatcacttccattaccttcaacaacaatgcggacaatgactttaacagttgtaaataccaaaggaagttgtcagccatcaccatataccattactgtacccaaacatggaaaatttcaagatcttattgatgctctaagcactgcttgctcattggaggatggtgagatcttactagtagctgaggtatgccacatgacataattattctaaatatatttgttttatatgacttgtggataacacatctgtgtgtatttgatcaatctgtgtctataatttctaggatcatgtgtttgtaattttgatttctgaagctttatagtactccacagatatacaacaatcacattattcgttatcttgaggagccaactgattcattatcattaattagagatgatgaccggctagttgcctaccggttaatgaaagaaactggccaagttccattggttgtcttcatgcatcagagaacagaagagtaagtctgttttgtcttttttttttttctttttaattttatcttatttccagcatatgcttccttcagtaaaacaatttcaaatccatagtgtacagctgctggtgtagatgaggattgttttagtttaggatactttccattcaatatgctatttttgactgtaagggaaaaaaatgttacaggcagcatgatgctaaacaaaattgtgagaaattagtgggtttatctaaatttttcaatctacttgtttctataattgtctgctgtgtgtatatgcttttatacgtgaagcaagaaacaaaaaattgtattttattaaaatataataagatattatcataatttacaagtgctaatcagtatttagtactgaaaaagatagtgctttaactccttattttagagatccaaaccatatccctctttctcaaaaatgttcatcatgagcttaaaacttctatttagttgctagccatagaaaatactcatgaagctctgcagaaaagaagagtatattattattcaactcctgggtggtgtagtcttttaagagaaacaatgagtctgtggataatttttttttttaaaagtttacttttactgaagtctataggatagactattggctgaattttagccacaggaagactgtttgttgggccctccagataaggaacaataagatctgcgaggacaatgaagatagtggatggtgtatggaaggaattacttgtgtgtgtttttggttattggatgttttgatgttaaggaaagtattagtgcatgtttggcatcataactaaaaaactgttttttgtttttaaaaacagaaaattgtttttaaaaacaatttggcttgtttggccttgttttttaaaaacagttttcagaaaacaaagttac

SEQ ID NO: 307061 - DNA, 902 bp, Cannabis indica
tatacatatatatgagaattttttaaaaaagtatatattattattagtgtgtctagtacttttctcgatgttatactgttattgaatatataatcgggtttcatataattttaaaaaataacttttaagcaatatcgataatcaatcgtgaaatgtcacttatagaagatattgggtatcactaatgaccaataacaatactttatatatatacacatgtacatatatatatacatataattgtccttgagaaaaattctcattttttgttgagaaaatttgattagtttagtggtgtacaattgagggttcttattcatacccatgtgctaacaatttaggcaacacatgttgttggagacaattggggtcaacttatataacttatgttcatatttctcaaagcacaaacctaatttgatttaatggctattgttatatatgtatttttagaatgtagatagatatacttaagggattatatatatatagtgtagtctattcatgtataatatattgtcatatataataattaaataaataaatatgagttcattcttggctggctttgttatatagccattattatttgttataagtaacatgggaaatatataagaaaaataatatcaacgcacataagaatgtaatggtgaaataatatttccttttctggatataatatgagttgtgagaatttgaatttagttattaattgtgagagaatagaaataataatatattaatatatttatatactagtagataaatataattatctattatcatcagtcaactataatataatacatgaatgttgagttttatgacaggggaattatatttctttaatataaactgagtgaaaatattataagtattatttcataaatacacaaaaa

SEQ ID NO: 307062 - DNA, 921 bp, Cannabis indica
gatgagatcacaggccatgtcataaccaatctggacctatcattctctgtcttttctggccaaatcccttctcaagtttcacaactatccaaattgttgcaactttctttgtgtggtaactttggttggaaagtggtggcagtacgatatggatgcggattcgtgattggattgctcatagaaaagaatattgtgactgtgaggaaaccaaattggttagtgataatttttgggaaccaaataagaatgttactgccctagtactggtcgatgattctcaactctattttctatttaaattttgttacattattatgttttctgtacgtagctatattttatgctttggagtaattacttatctttcttgtttgtatcgattcagtttcttgttgaatgaaataatacatgtgcctagcttgggaattgatatccatgttaataatcagggttggtttccatgtgtgttcaaaattgtagctactattgctttcttcatgttaataatctttgttggtttccaacaaagatttgtcgtcgattgggttgtggattggtccttttgggcatcgaatggtcgattcagtgtttagtgaagttgttgatgattatgaagtttttgttaatttctcgagtgagctgtagctcagtttttgcaggttttgattctttatttctattttggttctgaaccagaggactgctttttgcagtttttgctaacttttgggagtctaccatgaaatctgttcttgttttctttcacttcatatatatgtataaactataatttagtgataacaagatgacatctggattgtgtatatatatagatgaaaagcaagcataaaatgtttgattcatgttgtcgagtgaatttcgcaacaccaaattatattgtattattaataacaagaagaa

SEQ ID NO: 307063 - DNA, 3756 bp, Cannabis indica
tatatactttttttaaaaaaataattataaatttaaatttttgctgtagtcttttatttagttaatagagtagctacatatccattttgaacaaaggtagatcaagttcagctcacgcttacagtctaattaactagatcacaagaactccatatttgaatttttactaaaatatatacaaatctattaaaaaagtacttgcgttactttttattaagaatttaatttaacataggaccccgtaatttcagataagttaagctatttaattttcattttattaaatgaagtaactacgcgtcggttttgaataaaagtaggccaaactcacgtttacactatatttggtagagggaagagaaagataaagagaatggaagggagggattaaataatttatttgtttggcaagagaaagagaaaaagagataagagatgaatcttaatccttctgaaaatggggatccaaaaaaaattttaaaaaaattatataaaatatttattttgtcctttaaaaattaatatataattgtattaaaataataaaatacttattttactttaaattttactctcatatcaaacaacacaataagagaacaactatcctctttatctttgatactccttatcatttttaaacttttcatctatcttatatatttttcctacttcctatcaaacataaccttagagtccaaccagatcctaataactctaaatttaaatttttactgagatacatgcaattctatttaataaaaaatattcacgataaaaaaaatcattatcgagaattcaatttaacttagaacaaaccctaatttaaagacgagttagagtaagatctaacctagctagaatccaactatctcaattatgctaaggtcattcatttcaaaaaaatttaattaaattacattcaaattttatttacaaaattactataatgaaatacattaatgactaatattaatttctgtttattctaaaataattacacaatccaactcagcaattacccaaaatttagaaagaatcaaaatccaagatgttgaagtacaaggcaaatccagttaatatatttttattttattgtctaaatttaatttattattaaaatatatatataattttgtttgcatttaattggggtccacatctccattttcttgattttggcgtcctcttcgtatatatatagcctcttcctttggtttcgccttttaccgataagctcacacaaatcacagcaacaaaaaccaaaaccaatcgtatacaaatccacacactctctctctctacgagtcagttatgaaaaattaactcgaataaagaaataatggcatttcagaggaaaaaaaagttcaaaatacaccgtcgaatcgaagagagagtagatttctttgatggcttaccggacgatatcgtaacgtgtatcctcgctaagcttagttcctcagcttcttctccttctgatttcgttaacattcttgttacgtaagtttttattatttttttttctggaaaattttcttgtttggatgaatagaaagtgagtttgatgaactttttttttatgatgtagatgtaagagattgaatcgtttaggtcttcatccgttggtgttatctaaagcttgttcgaaagtgtttgatattaaagctgaaaagtggtctgattctgctcaccggtttttgaaagagtgcgttaactccggtaacgctgaggcttcttatacactcggaatggttagcctcaattaacagctttactctttttgatttatttatgtatttatttataataataattatttgactttgttgttgatttttattttgttatcagatccgattttattgcttacaaaatccagggagtggtgcttcgctcatggcaaaggcagcgatgaaatctcacgcgccggctctttactcactcgctgtgattcagttcaacggtagcggcggttcaaagagcgacaaggatcttcgcgcgggagtcgctttgtgtgcacgcgccgccttcctcggtcacatcgacgcactacgcgagctcggtcattgcctccaggacggttacggaaccaggcaaaacgttgcagagggacgccgcctccttgttcaggcgaacgcgcgcgagctcgccgccggtctccgttctccggtgtggatgtccaattactaccgccggtgcttatctccaccagtgccggtcggttgctcgctcctgagcgatttcgggtgcatcgtgccggagagagagctccatccggcgaaccggttcctgaaagagtggttcgagccagcccgcgacgaggtgggagagaagctcagactctgcgcccatggcgggtgcggtcgaccagagacacggtcgcacgagtttcgaaggtgctcagtgtgtgggaaggtgaattactgctcgcgtggatgtcaagcgctcgattggaaacttcggcataaagctgactgtaatcccggagaacggtggcttgaagaagacagcgccgacgtcgacggtggtggaggagaaatggcagaggttgaagacggtgagaatgtgttgtttgaataattataaatttaaaaatgaaattagtaaaaaaaaaaaagaattaaatttactttgtttctttttagaatatttaattttagttgagagaaatttgttgtcttttcttttgtacagttcaaatccaaaaaaaaaaaaagttttggaaaaaaaattaatggtgtatcacaaaatggaaatgatcacatatatatatatatgtatatacatcttttaaaattattttagtatttaattagttactgtttttgatgcacatgcattatgcatgataccctcctaatttgtcaaaaattgatattaattttttttagtgtaaatgaaaataaatattaaagattatttatggtagatggatgcattgattttattaattggaaaaatgaaatttaagatttgaaatttgttggagtaaaaggaagggtatcctatcctagtctgaggatcagaatcagagaatttgaatggtgtggtgggtatggtcaatttgggggaaaagcatgcaaaacgagggtccacttgtacgaccctgggattaagatctatcaagaaaaaaccctactagtataggtttttggaaattttattttttttatatacatttaattcatagctaaatattttttataataaattttagggtaaatagtattggaaattcctgcataagaattaagaccatcttaatggtagttttggttaaaaaaaaatttccgtgttggcattttaaaaaaattagtttaaattaattttttttcttatgattatttattttgaaatttggaatagtttaatgtgtggaaaattaaatttaaataattacttactactttataagaaaaatagttgcaccctaaaatcaaatatttaaattctatttttaatattgtaaattacttgatttttttttaaaatttacaaagtgttaaataactataaacttacaaagagattaagaagttgtatcacgaaatagataaggagtctatcggaatacctctttaggagttgtattgtagactatatgacaattcagactccttgtttttttataatagtacaaaaatagactccaagcctaatttttatcaaattaaaatttagctgccgtttggtaacacttttgtttttttaattttttaatcacaaaataaagtaaatttttatttttaaaaattt

SEQ ID NO: 307064 - DNA, 1181 bp, Cannabis indica
ataataataatatagttaatatttatattatctacaaaaaaaaaaaaagtttaaatatttatattaattacaacacaaatgacttgaaaatggaattggatagtgttcaaaacattctcttattcaatttcaatccaatcatcctcatcaaaaccttccaacatatatttttcctttatcaaaacaaaaagacaaaaaagtggttataacatataatttttctttttgttagttatagttataaactgcaaatgaaacgaacattcttgaatgaaaatgaatgcatgagggacaaaatgggaaatttagtgaacccaaccataggaggttcataataacaaagtgtatttttctattataaataggcaaaaagttgtgaattataggcactccaatacaatctccaacatttacacacacacacacaacacatccccatacttaccataaaatactctcaatcattcactccactaatattatttcactctaccaaaaacaaactacatagcttcatatttatatacatacaaaaatacacatatatatatatataattaatcacaacccaataatacactatctctctagtgtactaaactcaacccaagatcattctacttattcttcttctcttctttcaaaaaaagaaaaaacaaatacaaataataacaagaatgaattggagagttgtgtatatctctagtttggttgtaacattgctcattcttggtgcctcatcatccccaatcatcacaggtacatatgttttataattaagtcattaactctaatctaactcactatatatataattataattaagatttaattatgtacagaaaataagggagcaggatttggatatatgggtaatcatgggcctagagaatggggaaaattgagcccagaatacagtgaatgtgcaaagggtaaactacaatcaccattgaacattctcaaaaatcaagtggttcgctccaaagtgtttaagcccttaatcagaaactacgtccctgttaatgccacccttctcaacaatcaatttaacgttggggtacttattattataattataattactattaaattaataacactatttatatgggtaattttcattagtaattataataataatgtgttaaattatatatatatatatatatatagtattaagt

SEQ ID NO: 307065 - DNA, 1139 bp, Cannabis indica
aaaaataataataaaaagaaactgctcacactttcaaatttctttagacaagacataacttgtgccttaaaatcttttcaaatcatcttctaaccacttgaccaaaactttaatctttcatttgagtgtttgttcatctctgtcatgtattctaaattgtattcaattcatttaggagagtatttgcagtatcacaattctttcatctgaataaaaagattagcaaatttgtttggcctaaaagagatgagtcaatgcacaaaaatgtgagtatttggataagctaatgaaactagaaagcaataaacttctatactgagcaccatgctaacagccaaaccacaacacacaacactataggagagttcatcaaattcaatctgtattattttgaatctcgtctatgtcatggattctaaattgtattcaatacaattcatttaggagatatttgcagtgtctcaactcttgtatctgaataaaaagattagcaacttgtttggcctaaatgggatgaatcaatgcacaaaaatgtgagtatttggataagctaatgaaacttctatacagagcaccattgcaaacaatcaaaccacatcacacaacaatattaagagttaaacaaatattcaattgaccaagtataaagaacagaaaagatcaaataatcataagaaaaaagggacatttacggtaaaactcccccaacatttatcattattacacatatatgactctaatcaaaaaaagtagcggtaaaaataacttatcttacaatttcgttacagctacccttattgattatttaattaaagaaaaattaatttaatttttctattcaaatttgtatatttcaaacaaaaaaattagatgaataataatttctcaatgtgtggtttaataactacatgtcagaacgtgtttttaagttggtacttaccagtcaaaagtgtacaactgtaataaaattgtaagataaagtacttttgctgccactttatttttttattaggtctatgtgtaacaatgacaaaactacaaaaaaaatcttacttttagtcacaacaaaacttgtgattaaaagtaaattatgattcttatgttgtgactaaaagttccgtagctaaaagtattagtca

SEQ ID NO: 307066 - DNA, 2548 bp, Cannabis indica
actttgcttgcagtttgagaccttgaaaccttcactggtagttgttctcccatgttcgtgggttctgtgctcaatttcactctcacaatcacaatcacactcacactcagattcttcctcttcatcatcatcatctcttcattctcatcaacatcttcaacatgacttcatcttctatgtttcgattcatattagatttggttctttcatctatcacatttgcattttgttcaggttctttttgttcaatatcatcgtcttctaagtcgggaataccttcttcttctcggagctgccttagtcctcttatgtcatcatccacaattgtatgctgctgatctagactagctctatttggatagccatagtagtctaacgatgaaaagggattccagaaaaatcccattgagaattttggggcgaattagggggagattactaggcctatttggtgagaagaaaaaattgaaggattcattggtgaagaagattgcattgagaaaaaccatcaaaaccatattgttccattggaggataactttccactcgaactcttccaggtgattgagacatttcttcaacagaaacagctctgttcccacctgatcttaggtaactaggccttggtgaacgagggggaagattaatagacctgtttggtgagtaagaaaaacttgaagaaggattcattgatgaagaagattgcattgggaaataaccatcaaaaccgtattgctgctccattggagggtagctttccactcgaactctttccggtgtttgaggcctttcttcaacagaaacagctctgttaccacctgatcttaggtagttaactttgatagttgaactgggatgggactggatttgagctgggacaaaagattttggagaaatcgatataaaaccaggactagttttcttaactggtgtgaaaggtggggctataaaggagtctaataagaaatcatgaggctcattatgttctccttcaatataatcacgtagagcagctgaaactcttttcaaagattgaatataagccaagtgtcctgaggcaaactttgctctttgctcaacagcttgtttaatgaatctctttctatctttacagagttgaactgcttcttcatcttccaactttgatgtagaacatcccattatctctctctattcttcccaaaaattctccttttctattcagactatgaattttttaggctcaaatcaaaaccaaattcacaagggtattcttttgtatttctgtccagattcataagggtatagtgaagaagctggattaagaaagaagaaagaaacaggtcttaaattagttaacaaagaagaaaatatgaaaggaagcaataaagaagaaactaaagtttaattaacaatttttttaaaaaacaaatggctcaatcccaccattttttctagatttttagccaagaaaatggtgtattaatttttttttggaggtgcttttctttcaaaagaagtcaaatagagacgttattagagggaacatcttcttgttcacatacaaatttttgtagatactttgcattggtctctctctattggccaaacgctaacaaggcaagaattcaacaacttgtaaaggaaaatggcaaaaaaaataaaaataaataataaaaaaaaaaaaagaagaaaagatagaataaaagcataaactttagaataaggtataactccacctccctaaaccaagaaaaggtgatacttgtttagtgttatttaccacacacatataaataataatactatatataattattttggacagagaatataaaaaaaataatagatatattaatgaacattcataaaagtgtaaagaataactaaatattaatatgtaaaaaattattattgatatcctgtatcttttaaagtagtaagagagaacatgggaaaagaaataaaagttttaaacaaaagaaaggaaaagaataactacaagtgtgagatcaaagatatggtaaatctaacaatgaacacataattggaaaaatatgggatttttaacaaatttctcaagaaaaataaaataaaattaaacatttaaatttaaaggttggaggggaaattatatttctgataaaaaaatgttatacaacacgttatcaaagaaaaaaaaaggaatgaaactaatttttcacaaacccattttaaggttaggaaaactgggaaattgtatataataagttcacaagaaggaagagacaattcatatcaaagagaagacgaaaagaaaaacatgaaaattcatataaaagagaagaagaaagaaatccatatttatttactgcctacctgacataaaaataaaatataataaaaagcactcataagcatcagacgaagaggggaaaaaacagagcaaccaagtgagccagtcagccagaagaagacaatcttaagaacttaaaaaacacatttggcttgcataaataaaccaaacaaaaatccatttattcctttcaatattgaaaaagagagagagagagagagagagagagagaga

SEQ ID NO: 307067 - DNA, 1127 bp, Cannabis indica
atattgtctcatcacaattgtatacttttgataatcatataaataaaactacttttgatttagagatctagaaacctctatcccttgagttctttaagctttatgttggttgtagcatgcaatatctaattttaggtgttcttagatttaggtcttgttgtagtttgattcttggtttatgtttaagttgactcggattagtttttgttggttttgttgatttagggtgtgttgagcaactttaagtttaaaaaactcaaacttgcctcaacaatggtgttttgagttgttatggttatttgctactgtttcttgttggattctattattgggtgttattacatgtgttctagaaagtttggtggagtttgggtttgttttgagagagttgtgaagtttttgggattttctgatatgaaccagttaatcggttatgttggaactgtagaactggttaaccatttcactggatagaaccctagaaactgattatccatttaggagatccagtttaccggttcaagaagtttttagagccttattttttatgtttccttgatatttagggtaatgccatgctatttatcgataggaaaaattttagtttttagtttaggtccctagaaaaggctttaccaagttgtttaccaatttaactgaatttgacataaggcatcccttcaccacatgagtttccgttcaggtcaaccggcacacttgaatttagaaacaaaacagagtagcatagagtatgaatatgtgtatgtgcaatatatgcaccatatttgtaatttgtatgctaccgacactagtatagtagctatattgagtgcattggtacagtgtatgatgtttcaaccagtacatatggtcttaccaacactagtacggttaactacgtagtgcatgtggtacaacactaagtgctactcgaggtacagttcaaacccaaccaacactagtacagtagtggtacgtagtgcatgtagtatagtggtcgtatcttagtcgagaacgttcttactcatctaataagctttgtggataggtgtatgagcacctaaatacaagccgataatgttgggttttatgccctaaataaaactccattttaatgtaatctttat

SEQ ID NO: 307068 - DNA, 1193 bp, Cannabis indica
ctattttaacacaatttttttttccaataactacaacactaaaaatatattctttattattatattattttattaaattatttcacactataatatgtatataaatataaaaatttaatcattaacatattattttaatgttaaaaaaaatataatttggtgtagtctatagtgttacattaaaaatagtaggacactatagactcccacatatatggaatagcatttagtgttttattggggtaattttgtgtttaaatttcacaatttttagaattttattgttctattggaaaagccctcaaaacaaacagaaacagatttagtcttattgagaagacacgtctatatcaatttgttttttaataaacacgtctaatgtgtaaataaaaaaaagatttgttgttatgaggaagacacgtcagtgtataacattatagaatgatagtttatttttgggtacaataaagtagtgacaaaaacacgtagttgggctgaaagtaaggatgattaacttgttaggtttggtagttaattgacggaaaaacactgtacatatgacatacttagatttgattatacaaatagatcacaaaagggagagtgataaattatagtgaggactttattcctaattaatcatcacttattgttagctggggtagtaatttggattggaaaatttgacttaaacatgtttaaatttaaatataaagtatgatttttttaatatatcactcaattaaaaataagatatctattaaacaatagaaataataattactattctcttttattattgtattaacaagtgtcttagatattctatttattctctcttttgggtactataaatatcctggtaccttgtacagcttttcttgaggaatataaaatacaatttcttttccttctgtcatggtatcagagcccaacgactctctatgacatcattatatagtacaagttctaccccgcaaatagtggaagaaaatacccaacatacccgtcaaaacccaactgtccacaattttcaaaaccttaacaatgcagcagcagccgcacccaccattccttcctttgttttcttagcctcttcttcttcatctattccatcaaatcgtccctccttcaatcaaaccatttcagttaagcttgatgactccaactatctcttgggttttatgccctaa

SEQ ID NO: 307069 - DNA, 1698 bp, Cannabis indica
aataaaatcgtttagaataagtctcttcttatataaaacaaatatatgtgatgataacatttttaaatttggtgtattttttgaaacttgtgtatcatgtttagaaatggtgtatttgtttaaaacttatgtataaaattaaacaaagggtgttgtcagaaacttgtgtatgattcatgtttagaaatgatgttgtacaaaaaaaaaattaataataaaattataaattaaagatgcatataaaaagtcacaataaaattaaatttgagtgtagaagtataaggcaagtatacaatttcacatgtttgttgattgtgaatcttattctaactgtcaagatctttcatttattttttattttaaactaattatttatttatttatttattttgaatggaaatgatcagacttcaataacaaagtttgtctaaaattaaagacgatgaattagcgggaacaacctcccactataaacacaatcaatattatgaatagagtcatgaagcaaaatatgaacaactctatttgcagatcgcttaacaaaataatagatataatattcaattaagacaataaaagacaacaatatctaataataatattcaacgttgactttaatcttaaaaaatttagtttgacccacagctcaatatgatccgactgaaaattatcatgcaatgctagaatttgaaatttattttgaggggattcccattgattaaaagtaagacttgccaatgaaacaatctcatccataaaaggagctttttaattctaaactacctcatttcgagtttgcaaaattgcccaacaaagtatagcaacctctccttaaatacctcctttacccaagacgagaagagaacatacttatcaaaaatccaatcgacatgcaactttctcaaaatagcagaagaaaaaaagaaatgaagtaggacatgcccaattattttagatgaaagatggcaaaaagggcacacaacatcaacattaacatgttttagtttaagctgcaaatgagtatgaagaatattagatactgccctccaaaggaaatttttgatcttaggaggaattttaagttgccacaaatattttcaaaacctaaaattagaatatgttaacacggaaatccgttaacaataatgaagccttatcaataaaattaaaatattaattctagtgaataaataaaataaataataggaagttttacgtaattttatagttaaaatatacatactccgcgagttaattttaattctaattctttaattgtatttctaggttcaggatatgatttttggatcatttctatacttaatctttcaaggtttatcactcccaaaattccactattctggaaagaactttactcccttttatagtattttttggatagcgattatttcctttgttcttatctaaataactatttttgggatcgtggacaaaccccacgtttttccttattcacaatgtgtgtgaaataaaataactactaataaccactttttaatcttatctagaagtaacaggtctttgctaaagtgtgcattcagagttatctcgcattcttttgtaatggaagaaacaacgagacgaacattgtgagataacttggtgcttgcccctcgtcataacattaagaagtgctctaaagttggttcttctagattggtcttcttgcattgttaa

SEQ ID NO: 307070 - DNA, 1871 bp, Cannabis indica
attaacataaataactgctaatttccaaattaactaagcgggctttacatcatataacttgcaaacataaacatgtacatatgtatgtgtgttatactattcttatctaatttcttgattcaagtgtgttggccaacttgaccggacatactgtctaacgatcggaggccctatgtcatatttacgaaagattgggaagtgtttactcgagaacactcactgatgcccataaagactctaagatcttcttccgaactacgtggtgaaaataccctaaaataaaacttatattttcgctctaaatatataccatgatgtagatttcatttcaagcttcacaaaggtatatagaacgtctaattcagacactcgagtgaaaatttatggccaaaatacgaaaaattgacatttcccaagtattgccccaacaaaattctagttggtacaacactgtaccacttggaattttgatttcctgggcagcaagaaacacgttcaaacccccacaacttgttccaatcaatcccaaatgctaccaaatttttcagaacatcaatataccacataagtaacatatttctaagcttaaacaaaaaaattacactaagaatcaaaagatgcttgttgagcgaagtttgagttcatgaactcaaacttgcccagttctgatcacattaataaaaaatcactataaatacatgttatcaatcataaataacctctgaaataattccctaacccatcacaaccaaacagaacccaaatcatgaaatcacttattgaagctaagcttttatcttgaaattgtaaaagaaagaggagatgagagtataccttgatgatcccttgcaattgtaacttgctcctctagattctttcctaagaaatgattgaaaaactttgaaatttgcaaagagcttcttggtttcaaaggaggtcgagaaagagagatggtgaggagagagaaagaaattaaattttaagattgtggttgactcctattcaggaaactataatcatttagcttgattgacacccaggtttgattcggttgagagcacaatctttatcatggaagaattttaatagaggatttccaccatggatatagcttgaaaattaattctcacggattgtaactaggactaagcttccatagtaggaaactgtaatcatttagcttgattgacaagctgtgattgaagtaaatgagagaagagtcatcaccattattatttctcttgtactattgcagaaaaaattgttgtattccatggacatcggagtttgaaggataattggagcttgtaaccacatttatcgtcaatgaaagacaatggtgctctaataacatattagatttcatagacattttataacgaaagatagagagaaatataagaagaaatatacgaagagagatgaataaatttagagagtattacttattgaaatggtgacttatgtacaatctaaattagaatccaagactctaacaaactaacatattttgtctaactaacttgaaaactcaccttaactaactcacaactaataaactaacactaattgtaagctaactatctagctatcttaacaccacataaacttccctacgaaatttagtgagattagcacaattaatccacttaatgttaggatttataaaacacttaagaaatatataaatcatagatccaaacatattcctaaaagtgctttaatatagaaaaccctaaattatatatttatagaacctttgctaaattaaagaagaagatgatgataaaagatgagcggaagtactaacctgaagccattgttggagattgtagagaaggttttgatcttccaagaatacactattttct

SEQ ID NO: 307071 - DNA, 1680 bp, Cannabis indica
gcccgtaatattagtaacctccatcaagagaccataaacaagctataagaacaaattaattagggtcgctcgaataacataagggcacacatttctttggctgcaatgcgttggatgcgggagactcctgcccaacgaattttggatgtagccagggcaactaacaaggaaactgaaaaggtagaaaggtaccatctttgttgcttggaaatgccctatattatagttcttcatgacctttggtcgaaggatcattccatacttcatcttatttccaaggctgacatggggaaggttaccaggagtgtaatttccatgagtcgtggagaatactttgagaagtatccatttattgttgacatcggtagtggagagggaattagtgccacgacttctcattctcaagaatttgcaaagatcgaggtatattttgctcaaatcggagagggagttgctcaggatgctgtagaggctgacccagaaccgagagagtagtctgaggttccagcccccactttgttagcaccaccattatctcccccagaccattaacgacctttttttttgtttcgcggaactgtacttattttggcctggtccgcggggctactcgtgacacttattctcaggaatgcctgttaacataacaatatatctagtctttaaaattttcaatgcgtagttgcttgttaagggttgtctcaaagtgtacgggtttaacagccgtcactccagctttttgacttttattgactttttctccctctactagcttaggaggtactctaggaaatatctatttcctttcatcaagcaggatagtcttgaccctttaacatttttttgtgagccaattaatgctactaaaaacataaatagtttcctagcttgttccttatgatcatgagactttggtatacatcatggaaataccctaagaacatagaaaacactcaattggggtcctgggaaaagtcttaagatggacccccaaaactcaactatccaattttaaaacttgcataactcctgaaattctaagacaaaccttacaaaattttgcaaggtatctaaaaacattacaatgaaaatttttcatgaaaaaacaccaatcaaattatcaacagaattcaaactaaatggccgttctaaaactgcctaaataggatggcccgaaactccttgtccgggtttggaaatcccataactcatctaatctggatccaaacattaccaaatattgtagagaacctaaacacatcataatgaacatatttcatgaagaaatcttaactcagttcgcaacagaattcaagttagcacaaccaagttaagtttgagttctttgaactcaaacttgcataacttttgctacaaccatccaaaataattcaaactacttctaaacagtcctaaataaccttaataatcatttcataaccttcctaaacttattcaacatgttctaatataaacagccactgaaaactaacaaaaaccctagaaaaccaataaatttcaggttaggttttaccttaaaagtttggaggagctaggggttaaactccttgatgaattccaactaggaagaggcttgaaaatggtttaaaaatctgaatttgggccctgatttagaagccatgaagtagagggagaaggagaaggagaaggtgatttggt

SEQ ID NO: 307072 - DNA, 2575 bp, Cannabis indica
catcaaaaaagcaggatccatataacgtcacctacataattaaattgatctttccagctagctaccttagtatttttgtaaaaactcatttactcagaatattatgttaccacgtatatagtacaataccctttcacacacacccacactcacacccacgcatataatataatatattatttacatatataaatagacacacacaatttaaatatatatatatatatataaatattatgtaaagccaagcataaccacccatgataaaggtgctcgtagcaagcttccaagaaaatatatagtagacctagaaatacttaaggaagatgacctagctagctcatatattaaaataagcaaacttatattaattattagtaggggattaataattaatctattaattaattaaagtgcagatctagcatcaacacaaaatcttctcaaattcaaaacctagctagttaactgatcagagagaattggggataggaatatatagcacgtgcactaaaatccatgcacataaattccacatacatctttaaacaaacaatataacactataccattgagacattgatcacttttacaaatttgcaacgaccacgacatttattgatcaggccccattatcatcatcctcattattattattaaaattattattattgttattattatttattatttattattactaccactgctatagtattaatgagtaatgtactctattctttctcgcgcccattatctcattcgtacgtactttttttgggatcacattttttcaaatcaaattctgagaaaagctgatcaaggccaaaaaaaacaaaaaggctcaaggattccatcgacattttacatacatttaataacaaactatattataaatcacccaccactttaggatattacattaaacttagttatttcacaaacacacacaatccaaaaaaaaaaaaaaaaactacatgtaactccaatctctaaattaacaataataaagctacatgctgatgatatataacgacatacatatatataatatatagtcacatagataaacttcatgtatttctgcgattatttaatttagcctagctaagctcgacccggccaatactgttccgtgtccatgccacctcatcatctcatcatgaccaaaccagtttagagcttaacgacgtcgttctgggttccaatacggtgcagctgggctaaagtgcaccgaaacaaccctggaatcgagaagctccattatgggtgtgaaatttacgcaccttggtaccttatactgattaatcgacgcgcctctagaaatcgcataatccataagctcctcaaacgttccatttttaacaacccttatctccaatggtccaatcgagttatcagccactcttccttgtctataaaccgtgttgagcgattcctccatggccaaacagcaacgattcaacacgtcctcactcggcgagttagccgagtccttcaccaaaagctcccagtaaatcacgtaatgcccaggaatcgttttcgtatcagcaaaactcgtgtactcaaccacggtcgtgttgaactcgcggagaagaactgaggcgttctcgatggctttctggagctctgactcgtctgtcttatccgagtcgatactcagaagaacgttcttcctcctgacgaaccgaaactgtggggccgagttatagaacccggtgacttgtagaatgtcaccgactcggtaacggcataacccggcgtaagttgtgatgatgagttcgtactccttacccaactcgagatcggctaagtcgaggagccgtggcggctgagactggcggctcgaaggctgagcctccgggtcatggggcatgaactcgaagtagcccatgtttggcatgatggtgtaagaaacatcggagggatcgcacattggtttaaggttaagtccgaagtaacactcggaagaagcgtacattgtgcaagccttgggaagaccgccgctgtagtaatcaagggtcgggatgtactgagccattgcgccagtaacgatcacatcgaggaatttggtgtttggccaaatacgggtaatgatcctttcccaattctctcccgagcattcggaggcgatgaagtccgccagttccgggtcgggtttcaggatatccgaaagcagcttctccttgatagccgggtcggtgattttggggttcagcgttccggtggagatgtcgtgagcgagttctctccagttgagctggaggaaccttatggctcggaggagtcccgacgcaaaaacggctccgactcggaggacctcgtggcgcatgacgaggccgcagagcatctgtgagtacatgctctggaatgagtctgggcaaaggattgtctcgtttggactagtgtagacgttgtaagggtcgtacggacgagtcttgaagtgttcgctcttgtagtagctggtcagaacgggtctagccactagaccacttggggtctttgtttcagctttgatgaacaagaagtagagtccttttcccttgtccaatcctggcacgtatcttttggggaa

SEQ ID NO: 307073 - DNA, 2672 bp, Cannabis indica
aaaaaataaaaaataaaaattttgggttatgatatagtgacgcgccaggtgtgtcgggacacattaatccagtcacgcctgttgcgtcactatatggtagtaatttttaaattaatcaaaatttgaaaattttaggttttatcttttagtgacacctcttatttttagtgacacacattataggtgactaacactgaatatttagagtctacctcttcatgtcactaaaaattactcctaactcattagtgacgcgcacattttatgcgtgtcactaaaagctcaaattgtagtagtgtgttcatgggaatattttgtgtgtttacattttgcatatcaaccttggtaagaagatcttgaaggtactttatttgagtaagtaatacaccagctggagttctgatgacttgaatgcccaaaaagtaatcaagaagtccaagatcttagagtgagaaagtaaaactcagttcagagatgagttggataaacaagggtgtcatcattgcccataataagtatatcatcttcatagacaggaatgtagatgcataagtgagacgttacccttatgaagagagattggttggcctttgaaaactgaaatccatgttgtaccaaggctgtggacagtttctcaaaccaggccctaagtgcctgtttgagaccatataaatccttgttgagcttgcatacatagtttggatgatcttgatcaataaaccttggtggttgttgcatatagatgtcttcttttaggtctatattaaggaaagtattattgccatctaactgtcttattgtctagcctttcagtgacagctatggtgagcacaatcatgatggttattggcttaaccacagggctgaaagcttcagaaaaatcaaacccaacctgttggtgaaagcctttggccactaatgtgtctttgcatttgttgaatgaaccatctacattttgtttaattctcataagccacttgcaacctatactggtttgattttctagtaaaggaacaagcacccaggtcttatttttctttaaaacaaacatttctatggacattgcttcaaaccagtgaggttcttgtaaggctgctttaacagacttgggttcattgatagctagccaagcccttggtttccttatccaagccttgagtcttgttgtcatgtgttgtttggaagtagatgacactgttgcatctgtaggtaaatggttagtaatagtaggcacatttgtgttgacagtgttagtaataggtattgtggagtgttgaactgatatgtccataagattccaatctctgatgttgggagagactgatatggatggatttgctacagacacaggaatagataaagtgtcattggttgctagtatgacaatagtagtagaagtctgtctcaaaggagcaacatcatgagcagtagtctgtgttacttgggtgaaaacagtaggaggatcaaggggaatgacagtgggaggtgttggtggattgttgacattgaggaatgaccctagaggacgaacaactgagacaaaattggaatgagattcaatgtgactgaattgagtcacttgtctgttagcatatgggaatgtgtttttatcaaagacaatatctctaaatatatagagcatatgatctttagacaaatatttgaaccctttatgggctatgctataacctagaaaaatgcaatgtacagacttgtactgcaatttattttgttgtatgaccaaagatttggataacaaaggcacccaaacactctgagatttgtgtagtcgaggaaagttgtgaacaacacctcaagaggagatgtgttcctcagcatataggggttggcattctattaatgagataagctgctattctaaaagagtcatcccaatatttgagaggaagatgagcttgtgcaagcatggttaaaccaatttcaacaacatgcctatgcttcctcttaacaacaccattctattcatgtgtgtgtggacaagcaagtttatgcactatgcctaaactctcaaggagattagtaaaggctataaactcacccccccaatctaactgaagtgttttgatcttaaaacccaattgtagctcaacttgagccttgaattttatgaaagtaggcaaagcctcatctcaagttctaagaagataaagctaggtatatcttgaatatgcatctacaaagctaatgtaatatctatatccattggatgaattaatgggtgaagatccctatatcttggatgaagtagctgtaatggttttatgtaagtagtattggagtgagaaaaaggaaatttgagagattttctaagacagcaagagtgacacacatcataaaattttttatttaacaatgctatattaaattttgacaaagccatttttacaattttagcagctgggtagccaagcctactgtgccacagaaaaatcagaattggaactcaaaagatgatgactatggcattgaggtgcaggctgagatgctttatcaacaatatgtgaaggggagagaagactcagctgagtagaatataatttgtacagtctgttctcaagattcccaaccaacaaaatcctcttgctagcacaatccttgacacaacaagaaaaggggtgaaactcaaaaaacacattattatcttgagcaaa

SEQ ID NO: 307074 - DNA, 1425 bp, Cannabis indica
tttttctaagaataaagtttgtgccttttcttttattgttggggtagactttggactttgggcttttgggggagtttcttttcttctatgtactactactttctatagccgagacaaagaagaagaaagaataagaaagaggaagaaagaaagaaacaaagaaaagaataggtaagtttgagttgagtgagtgagtgagtgatggcagcccctaacatggcaacaatcactgcctctttggagcaatctttccaaaactgttctctaaacaactccgccggagaagcagctaccagccgccgagttgtacatggcatagggaggaggtcatcatcatcatcatcagcctctacaaaccaagatgaagaactcgcagcatcacaccaaaatcatcaccaccaaacccctgatgacaataccactttagagcttaactctcatatctctctcccttaccattgggaacaatgtcttgatttaaaggttcgttctttcttcaacgaaaataaccaaaccccttttcctaacttttgtttttctgttctttcctttctttggtgttctatgttctttgatagcttttaatttcattggacgaaaaggtaaaccagaaataaaaggcttttcgtattgtgtgttctacatttttgcttatagcccataataaagaaagaagctttaccaagttagatcaccggttttcaagtaacaaaaatgaattcaaaagaaagaaacacataagaaaaagacccttttttatttctcattgatgttaaggatgataatagaattgaaaatccataataaaacaaaagggaaaacaaagagttgggctgtccttttaatattatatattagtcatagctctgttcttgccttaccttcttgttggaagtagacatagatgattgatgggtgattaatgaaatctagttaataaattttgcagactggagagatttactacataaactggaggaacggtatgaaagcaaaagaagatccaagaacaaaagtaacaacagagtatattaacaatggtaatggtaatggtagtggtaatggaaatggagattattattattccgaagaagaagaagaagaagaagaagatgacagctcatacgacagtgaagaatcgtcgtctgagtcgtcccctcctccttctgctgcgacaacagcctcgagagaatctctgtatcgaggaggagcagagaaggaccatgttttggtagtgggaggttgcaaaagctgtttcatgtatttcatggtacctaaacaggtccaagaatgccccaaatgttgtggtcaacttctccattttgatcgatctcaaaatggctctctatgaatttattattatcatctgattctttcttttctttttctctttattttacctctgttattatcattattattatt

SEQ ID NO: 307075 - DNA, 1168 bp, Cannabis indica
gattccgtgaaagtacatcatgaaacaaaatcgtgtccataaaaaggttatactataaaattattagtgtcctttacaaatgctacaccaattgcagctatcaaattagaaaagactaaagatgatttttgatgatgtaaatatgtgaaaagcaaaagcaatatttacacataattgatctattttatacacaaattgtctttttttcgaaacaatacaccaaacatgctttccaatagtggtaatattccacttcgcggtatttcgaacaccaagaccaccaaaagattttgaccgacaaatatcatcccaaacaacttaactagaaccctgcgaaatagtagccatttcaaaggaaagacctgcaaactttatttatctcatcaagaatgtgcttagaaagaatcatcatttgagcccaatacaaatgaatagacatcgagacataatttataagcgtaagcgaccagtaaaagaaaggttttaggactgccaaaccataattctttgagtcatcttctcaacgaggacaaaccattcatcttttgaaatgcccttagaacaaatcaaaactcccaagtaccgaatgacaaggtacttctagagaaccccgagacaggaagaaaagaatggacttaaagtcaccgtgaaaaaataaaatcacatcatctgcaaagtaaatgtgtgccaatttcaaatctttacacctattgtgaaaagcaaaattttccctcaaaattactttgccaagacccgagagagatactccatacaaataacaaacaagagaggagatagaagatccccttgtcaaagacctctcttagaagcgaagaaaccatagagagagccattcgtcatcaaagagaacctgaaggtctttacacaaatcatgatcaaatccacaaatttcttaaaaaaaaatttaaaagccaacatcatttcttgcaagaagtcacaatctatattttgtattgttagaatgaaaaaaaattatgtattttgtatcattatttatttagatttcatatttttttaatattttgagtaacagtcaaaatagactttccatcaaaatatatttttaatataattaaattaatgaaatttttagcttaagaaaagataaaagtggaggagcttccatcatacatttaatttttttttt

SEQ ID NO: 307076 - DNA, 2561 bp, Cannabis indica
gttcaaaagagtgagagtgtgttctaaagtgtccctaaaaatcttttcaaaaagtgtgagttatacacaagtgtgtagtaaaggtgtctaagtgataaaataaagagtgagtgcttagtgcgtattgtggtcaagttaaagtgttcaagtcttggtgtaattgcttttacaataataaagtaatacgtttttcacgtgttgtggtgtccaacagaagtaaaactacaaaataaaggataagatcataactcttatgagccataaattaaacatattatttacgtgtaataaaactacaaattacttaggtatgaagcaagatcatgattgaatgaacactgtgcaggatgggttgacctggcttttgaatgacccagagaaaatcttccaatgattttagctgatcgtggctatgacgtgtggattgctacactgaggcaccaggttcagccgtagacacaagtcattggatcccagacaacccgtaaattcttcttcctctgctttattttactctgtctttctttatttacacacttactaatggtgtatgtatttgatatgacagaaattttggaattggtcttgggatgagctggtcacatttgatttacctgcggtttttgaccatgtttataaagagacaggacagaagattaactatgttggccattctctggtgagtactcaacaattcaccttattaatttattacacatttagttttttatatgtgcacaacaactctgtccctgaaaatctggtgatgttttttgttggcagggaactttaatagctttggcatctttctcagaagggaggctagtggatcagctcaagtcagcagcattgttgagccccattgcttatttgagccacatgaacactgcacttggtgttgttgcagccagatcctttgttggagaggtaatctattaaagtaaatataaactcaatgatttcaccaaatcttaacaaattataagaacactccacttaagtatatcttgttaatttttctacagattactacattagttggtcttgcagagttcaatccaaaagggtaagactaaaaactaagcacaatccaaattagtatttctatctctgatttcaattaactcaactaaagaaacctctgtctaattgtagggaggctgtggctaactttcttaagggcctatgtgcttatccaggagttgactgttatgacttaatgtctgcaattacaggtactaataccattattactttatatcaatgagaaaataaagcttctcttactaactttttgactggttcaaggccgaaactgctgtctcaatgtttcaaccgttgatctctttctaaagaacgagcctcagtcaacatcaaccaagaacatggtacacttagctcaaagtaagatacttaattctctcctaacttaaacaacaacaacaaaaaatcagttgtattgattatgttatttgtgttatataacagctgttcgaaatggggttttggcaaagttcaattatggaagagcagactacaatctgatgcattacggtgaaacctcaccaccaatttacaacctctcaaacattcctaaaaaccttcctctgttcattagctatggagggcgtgatgctctgtcagatgttagagatgttgggatgttgctcgacagtcttaagtaccatgatgttgataagatctctgttcagttcattaaggactatgctcatgctgatttcatcatgggagttgacgctaaagacgttgtttataactctgtcgtctcatttttcaaacatcaacaataacaacaacactaatcaagtttagttggggtcagtttaatgttgtaatacaagattgaataattatacttatatgttattagcagaatctcaatcaaatacgtactttttatgatcatgagaaagaaatcttagcatactatatcatctactgagaaattttgaacaatttgtttgcacaggtctatgcttatttatgggcaaatgttttttttttcctgattcttttatttagtttttttagcaaaaaaattgtcccaaagtaatatagtagctagctattgcataagtgttttttatttaattatttttcgagagattaagctccaaagaccaccatcttttaatgaacttaaaacaaagggactggggacaaagaaattaatcattaagggtcatttaggtaacttactataaaattaggggagttatatttgcaccccataaaattagaaatacaccccattattaaaaaaaatataaacttaaataatttttaaaaattactcttaatatttttttaaatttttttcctcacattattttatgttaattttaatacttattttgatttatttttataattttttctaattcatgtatatatatttttatttttttctaaaaaaatttcatataatttttattttaatttatttgtcataatttttaaaatgtaatttaattttgttttgataagttatatttttttaagaattataaattgaaagaaaaaagttaaaaataacttag

SEQ ID NO: 307077 - DNA, 1230 bp, Cannabis indica
atccgagatgtgagcaaaaataaaaatagtatgttagacaaaaaaaaaattgtttttgaaaattgaaaataacattttgatgttttctgttttctagttttttaaaactcaatttttaagaaacaatttttaaaattttttgccaaacgactcctaatagtttttaaaaactgttttatgttttaaaaaacagaaaacaatttttaaattataaagccaaacagtctcaatcaatgtctctccttatattccaaacattttgaacatatacaaaaattgatcaatgtatatatatatagtagctgttttaatattgaagtaggccaacatatatatgtacgtcggctgatcaatggaggccaaagtgtatggaaatgaggtataagttaattaattaatggattaatatataaggtcatatatataaggtcgtatctgggcatgtgatgcttaaaaatcggtcatcacgtaggctaaattaatagctacgtaccatacaattggtgtcttatctttgcttactttctttcttttcttattatccaaacatgtattttaaaaagagactgactgactgggcaagtgggcatatgactaaagtatatatgacggtctctaattaaaaccagcagagtaattaaaaacaaaggactatatttttatttttatttttttgaataaaaaggactatattaatatatagatttagaaagaatattcgtacgtgatgagaagtagtggggcagtttacttagttagcattttgttggtagttttaatatagttggcggttagtattcgtctagctagggcttgagctttagcaaaagtccaaatctattcttataaatttttgaacataaaaatatatgagtggaggctaacatgcaaacgatatcaatatattgtgccgttatttaaaccttaaatatacgaacatgaaagagagaatctaagcatcctgtcttgcttttggtgtgtcagttaattagagctcgcttgctccaaatccaaagtagccttcatgtgctgccactctttttattatttgtaatttttaattgaaaaaaaaaaaaaacaaacgaccgtatgcctaagtattaaagctcctttttcatttatgaatatgctctttgtcaactacgacgttcgccttggtttacttttgttttcttttagccgtcccatctattccatttccatctccactttcattttgactactactcc

SEQ ID NO: 307078 - DNA, 1049 bp, Cannabis indica
acacacaatatatactctcattattttgatcctcatacagctctgttgcacaccgaattcgtacagttttaattctgaaatctttgtttataacaactacaataagcttggatggaattgaactgaatttgattaaagtgattttataatgtttgtggctgcaggggaaattgtttcttcttatggtgagaggaaatcccgctttatgaaatggctgactaagcttttcaaaggcggttcgagtagaagaggaggaggaggcagcggcggcggcgtcggcggaagtaatccacaactcattggcgacgaaaacatgtcttggcgcgcaccaattagatccctggttagagatattttatattgtttattcttttcgtattattcttgcgttatgtgtgaacttgtatatatatatataattattattgaggtagaataagtcattgtcattatcatctttatgatattctatacttccatgacacattaattattttccattaaacatctcatcactagctacctatcagaataaataaatttagaataatgaaatgttattgtacaacaaattataatatatttgtatttttgcattggcatttatgatgctcatcaacccagccaattcatacaaatatacgatgaccagcatcattattaacaatttcacttaaattaatgtattaatcttaaacactaacaatttagtgttatatggtaatcataatggaatcagttttataattttcggtttggttttggaattttatctagtttttatcatatgattatcgttatactagttataatttataatttatatgaataaggatgatactataatagaatagtcgctcctaatgggcagtggataatttaggacggggaaaaaattgaagcattaatgaacaacagaattttatagaaaaaatatataaatttgtgagaataaaaataaaatatataaattttataaggatacaaataaaaatgtataagataaaaataaaaaaaaataataaattttagggtaaatattattttgg

SEQ ID NO: 307079 - DNA, 2769 bp, Cannabis indica
agggacctctcacagatggacttgctatgatccaggactactcaactctaggatgttttctttcttgtcacatgtcaaacattgatgtcaacattatcagtgctacttttggtgtaaacatttgcccccaagtcaacttgacacctgtgtgaggttgacttaatgatgtgaactaagctcgtttctctcgaaactacaaggtggggatcaatttttacagtcttagacaattatttctattcattaagcattcctactaatagtaggattttgaatccctattccctctttaatagtggaatttaaaattctaagtgtaaaaggagaagagaaaagatgaccatcatttcttatcatttatctcttccttttcaacttaaatttaaatgactccttgagtgatttccattgatttgggatacttctaaaatttgtcaacatttcaatgtcaacacttactctgatctttggttgttgtctaagcattggctctgttgttgcactgtctgtttatgtgaatataggtgtagtctttgtcttttctttggttgtagccttgaagtttatagcattcccttggttatgcttacaatggaggttgtcttattcatatcctcgattcaataatagaggaggccttcttcaacttcttagccttatagcatagggtgcctttatcatctcctcgactttatagtggaggaggccttcaacatccccgtcagctttgtagtggaggaggcgttcatcatctcctaagctttacaacagaggaggtcttcatcatccccttggctttacatcagaagaggccttcattattccaccggctttacagtagaggaggtcttcctaatcccctcagctattggcatagtagaggaggtcttctcggtgaatgtcaacgatgtgttataacatttgcatgctactcccttgtaccttacccaaaaacactgttgggttggcactaccaggttcgaacaccactattttccgattataatcgatcattactccatattaggataagaagtccattcttagaatcatatcaaagtcatacaactgtaacctaatctggttggcaattatatctcaaccgtcaatttcaaacataaggatctaatccatctagtgtagatcaccaactctccagatggtaatggggttcataacaccgaaacgtaaacattgagaggcttacaaaaactttctatcactattggcatataagagtgtataaccccataatcaaatattactgtataagggaaccaattaatagacaactggactgtcaccatagatgaactagtgttaacatctatctggcttacaataaacatgcatcccaaattctagtcattactccttgttgattccttcttcttagcttgaggaaagtctctattaaagtggcctaccgcaccacactaaaaatatgtcctagcccgacattcaccctgatggtgttccttatacttaggacattcaaggtataatctgcacttactatcatgactttgatgggttcctctattcctacaaaatatcttttcattcttgatgactcgaaaggctcaaccttcctcttttgatctgaagtgccaccatcaatctccttactgaagttaccatttgagattaaggactgataccgtgttggcatccttggctacacatttccttacaatttgttgttctgcctcgttagtgataaataatctatctacaacttttttatacaaagtgtcataataagtggtaatcttcaagtcccagctaattgtggcatccacaccagaaacatactttgctttaaggtgaagtctattggcactgagtgaaaagcaaaactggatatttgtcaagctttaatagtaactcagttataaatatatttccttgaatttgtttcatgaaatcttccatgcatgatgtacagataatgatgtttaaaaataacttttctccaacggaatattaaattcatcccaattcataatacttaaaatcttgtgtttgacctactaaatcccaccaaatacgggcatattcttgaagcatgaaggcgattctatttactcgctcaattccaactactcccatgttatctaagatactggtgatgcttttccactactctaccgtaacgatattagtacctctagcaatgttggagattgtaattaataaccctttctcgaaactgaatctctatattgatgtaaagctgatctagggttaactactactgaaactggagctatatggatttcttgctctactaaagctgcctaaaccagttacctaactcagtgaaactcttcctctaatgaagaataataactcccatctcaataaacacatggtgctcatgagtaggaggattaacatcaataacccccgctttatccctatgattctacggaggacttggcagtgttggtgggagggtttggttaacaccatcctcaacatgctcaccctatgatctaaatgattggttagggcctattcttttccaaataaccctttcagcaataatcttagcgagtcaggcaccactcccctattggattttgtgcctaaaataaaaatctatttcaatgtaatcttctacattcatttttcaataaagaaatagatttatttcattacttgtttaatgtgttatttggttcacatgtttatttcatgaccattcgtttgatttataaattcatccaaatccttattacattgatattcttgattattgtgatg

SEQ ID NO: 307080 - DNA, 1964 bp, Cannabis indica
gggcataaaacccaacaactactgctctacacttccagctttctgctaaagagagtcccacactcaacttggactttaatgcaccaagtaagtgtttcccacaacccctatcccagtacttcaaactctgatgctctcaagccttggtggaaatctgtttggtcatctaatatcccccttgaaatcaaacacttcatttggaaagctttccatcatcttcttccttttaagctaaacctctttaccaagaaaattttcgataactcttactgctccatttgtcttaaccatattgactctaacactcactccctattgctttgttctagggcaggtaagttgtggaaacagtctaagttctaatattttttctctaaaaacaaatactgtgacattaaagaatttttgttaagaggttttgaagtttttagtaaagaagacctaactgttttttcggtcttttatgggcaatttggaacaagcacaataagatcatctttgaagataacaaggctatggatctaaaagtggaatcttttgttatttctttcctctaggaatataaaaatgtacaaacaaagttcaaccccatgcaagtcaatcatccatggaagactctcccttgatgccctctccaggaatgtttaaacttagtgtcgatacatcaattcgttctcacttaaatcttcatggatatggtgctgtagtccaagactctcacaacataatcattgtaggtttttcctcttcagctcactctggcctgcctcctatttttgctgaagcgaaagttcgccatgctctaagttggtgttaagcagtctgtttcccaattcagctcatattgtcggactactagaatttgatcacaaatgttcaaaagaaggtcaatgaccgccctgctctttcaggtttcattatagatattgtttcctctttgttctactttccaggtgcttcaatcaggtttattcaaagatcgaaaaatactttagcgcataacctggctcaagcagctttaggaagtgacaaagagtgtgtctggaacaatcaatgttccaatctttctggatatttgtaacatgttttcttgtctgtattttggttacagatcttgtaattttcaaaaaaaaataaaaataaaatatattcgtagctgaatctctataaattatagggtaattatttatttatttaaagatagtttttcttaattgttattattttagtggctttagctaaaaaaataagtcaatattaaaatatatagaatatattctatatatctcatattatttattaatagataattttgtcatataaattatagttttagaaatttacatactaagcctcttaaaggtcgttatggcaaactctctattttttttggcatccaagaaagctttttaatctaatttttttcatgatcacatttatcattatttgtaaattttgaaaaacttctaaatagtttacaatgtcaataataagatttaaacagttacctagtatgtgtattaaaaaaaagtcactcgtgtaataaaagatgtaaattttatttacggcattgtacatgatttagaattttttttaaaatttataggtggtcttaaatagctataacgtatatgatcacgaaaaataaaattgaatttcatgtatgtcgaaacaaataggaggtctatcgaaattacctaaaagtttttaccttgataatatacaatgtgttcttatctataagttatatacatatataggagacttctaactgtgaggcattaaaaaaagacttcattcgcagggatttaaaataaaataggtcccaatgcattttgtggatatgaagaggattgcatttctattttctattatggtgtggtgtattgtagcagagagttacacttatatgtttaaaaattaataacatttttatataagggtaaatggcggcaaaaaccccc

SEQ ID NO: 307081 - DNA, 1852 bp, Cannabis indica
tgagaaaaaatttgactaaaaaattatttcaggtactaaaacagataagagtacatcaatatatccattttaaagaggtatattataaaatttccccaaattatttattttctactccgttctattttattacctcaatccaaacaccaccctaattaaattatacacttcataattttaatttttgtaacaagtatacctaaatttctataaactcggaatacaaacatctccttaacagaggacaaaaattaggccattagtaagagatagaaattagagtagaaaaggtagaaaatgtattattatgagttgttttataataataataataataagttgtttgggagatagagaacaaattaataatttaacaaattcatataaattactttgaattgagaataaattaaaatgattatttataaattagatgtatattataaacaaaatttctcaccactatattagtgtgtggccaactagattttattttcccccatttttctttttaaccaaacaaaaataaaatcttctctccaaactttacattcctcctctaccaaacattatgcaagagtatctacaattaggctgatttggaattttatgccaattttttccttgattttcacttcgatcgaatatattcatttgaattttcacatctagataatatatcttttaagtcttacaccatttttccaaacacttgtaacaacatttataaacagaacacttcttagagttatatggcatggttttcccccaaaattcatttttattaacaaactaacagttaaccatgtgtttttgaattggtatcaaaatttgcaaatgttccaatgtgtattttatcaataactattttgtcaattaacaatgaaattaagggagatatatagtgatttattggctaagccaagaaacacaaaaaggtgggtaatcatcctttggctactcatatatggctttggctttttttcatgtcatctaccaaaatcagagggaataagagattatagggtcacacaccctaaattgtttcttccaaataaggccattaaggcataaagaacaagaaaaatcttacattgagctagtgaaatccatttccaagctgcaattttcttggctattcttaaaggggtagctcaaaaacactacacaagttaagatattcccaacatttttaaaacaaacaacattaagctctcttacattacctgttttggtttggtaaaagtgattcatgtatcagcttggggagctcggattgggtgtggacagagccacaataggtgatgaagaagtagagtaatctccattcttctcatcaactccttgatcatacaaaaaccccttgaagacatggccacagattctcacagcaacctgatatgcaacctcaacctcaccgtcgctaatggctgttactctatgacaccggaaaatcgctggagcatggactttactgggcaatgactgcttcaaagttgcatctgtaaatttgaaaatgaaaacagagaaaaaacagaacaagctaacaaatcattcaattttgcaataaaatagtgtttaataacaatgctggacacaaaaatataccaaattgattgcttgtttttgaaatatcaaaactcaaattcatacttttattcaatagtaatggtaatactaattgcggtaaaacctttccaattgtcatttcacttatatttaattctctaaagtgcaaatttaaagtatcatacagttaattattactatcaactgctaatatgtacactattaacgtttatattaatacacctaatagtattatttgaaaattatttttaaaattaaataa

SEQ ID NO: 307082 - DNA, 2012 bp, Cannabis indica
caaaaaaaaaaaaaattcacatatttttcatataaaatggacagtttcgggttgaagtcttgattacaatcagtaatagcttttgtacaacaacagaactggagttttatggccacttaaagcctttaaagaagcaatgtggttaaaaacttacaatattccctacatgaaaaaatgactaaagggaagaactatagtgtagtcaagtagtcatcaatttgtagaaatgttaaacaaaaaaaaaaaaacagagattattcgagaaaaggtgattcattttattgcaaatttggattaataaaatgatggaaaattatgtctgtaaattcttacatagagaaaactaaaatagcatcatatcttattaatacttattttaatatatcttctcaaattcgcgatgaaatgaaaacatgaaataaaatgtgatacttgaggtggtgacgagtaaataacaatgtgtttggtgcaaactgaattgtgacaaatgttgatagcacttgtaacaatataaagtttgatggcaaatggcaacatccatatctataagtaattgactgaaccaaacaatatctttgatagtcgatgatataacacgatattctgcttcagtaaaatattgaaataccacaatattagagtaagcaagcaactctaaaaaagtagatggaaataacaaatttttgaaggtaaaatacacagaacaactgcccaataagcactagtaggagaagacacaaactgactaacaatatgaacattatatgcaaatgcaatgtttggaagagtattattgatgtagatcaaattccatcaatagtgcgatatcacgtgagatcttccaaaagtatgctaaaaaatgttggtaatggttgtcagcaacgaaatgagataagagaggaggttggtttattgggttttaactcttttttacctattttttgttttaatttgagctcttattagattccattgaatctcgtggtctaaaaatagtgcaaaaaataaggtcaaaaaagatatatatattgaacacattccatatataaaagtaaaatacgaccatgcttgaggtgctagttgagaacatagagagttttctttaagcttgcaacttctccattgttatgaggaacactagacgaataaaccatgtaaactttttcgttgaatgatcacttaagaatatttgtaacatccatatcaattatatgccattgatgaatagaagcaactccaataagagtatgaattgaatattttttgaagagtgcactgtccacctcctatttagatatctttttaactttcgtgttcaaaatttacacatgccaaagtaatttttttcacttttatatattgttgacctcgcttttagctacgttgagtcaattaaagcaataaaataaatgataattattaaataaaattaatcaataaaaacacatagatttatagagtttcggccctgtgatagtggtaatagcctactccccttttacttgtattacttgtgagaaaaaaaaaagcaattgagtttcttgatgtccctcgaaagcttacaattttacagcataagagctctcttgaagaataaaatttggatccctaaataatagaataactccattatttatagggaagaaatacatcaattaggtttcccaaataaataaaaaataagaagggaaactcagaatattttctattttacaacaaataaaaattctattaaaataggaattcaattaataaaataaataaagtatctctaaagatatttcagtcgcatttaccctagtcggtatatgcaggcttgttgcgaaaattgacgttggtcggacgatgtcatttactttgttcagatgttttagtttactcttcaaataaattgtctttgaggaataattcaccctggacggcatgccgaaaatggtatcgttaggactttgtgccttaaataaaattcattttaatataatcaaatttactaattaataaaagattaaaaa

SEQ ID NO: 307083 - DNA, 1178 bp, Cannabis indica
tcattatattacttctatgtttaaaaggtgatttatttttaaattcaatttaatttgttcttgcttgcttctgtacaatgtatttaagaaacttaaaatactcacatataagtttcaaataacaaaactctttaacttaggctgattttattaaattttatttgaaaattgatagatctattcactattgatatttttcacagttgggaagtttgtaatactcgttgttgcaaaatttaatgaccgattaatgggtatcacatattttgggtctgctatcttcttttctagaaatcttacatgaattgaatattataatattcaagctaatccttagaaatatttattttatcatgtataataagtagaaaatttgcaacacaaattaatgtagcatgatcctactgaaaatgagaaaccattaataaactctacctgagacatctcctccctctgatcatctggtactttccgttgtgcaagcaaatcttcgtccttcctctataattaatacaaacaagatgttagattatggctggctaaatggtgaacagcctcaagagtcaaaaatcaacaaaaaaaaagtgatcataatgttaaccttcaattccttaatgcggtcaccaagaacaggaagcccctctaaaagtttcctttggatataatcatttgaccgagcttgcttgaagaacgaatgctttagcaatttctttgcagaagggcgccttgaagggtcttttatcaagcaagaagcaaccatttgcctaaagctctgaagaaaaacgccaaagaaaaagaagctcattcacatgtacaattacaatgaatgaaaagtataaataagatattaaaaggtaaagatcatacattagaaaacctatcatccgaaggattagtaagaccaggaggtccactttgcagcgtcattagtagtacctaatcacaaattaaaaaatggttcagattaaactctattcgtaattaaagtgattatagaatagcagattgagcaaactatgaaccttcattggagggtatcttgagaaaggagcatgaccatgagcaagctctattgcagttataccaaaagaccagatatcagctctgtaccaaagaggccaaccaaacatatacggttaaaaggaaaaatgcagaatgcaatgagctacaattttttt

SEQ ID NO: 307084 - DNA, 1431 bp, Cannabis indica
ctttcaccaacacagaacacactcaccgacgtcatatcgaaaactcgaccatgtcacaagacaagacaattatttatacttaaagcaatacaattagagactttaaatataggaatggtaatataattgacaattaaggcaatataattcacaattacggatatttatagtattatttgatcggaacatggaggagattaaccgattaaacaaaaaaataataattaggacgaaattgtggtgtacatatgcgagtatggtacgggtccaatattagtacataccacttcatatacaccttgatataaatatatattgaatattttttattaattatatatttaatttattctatttaaatattattattatcatattttttatttactttttagactttattaatttatggttattgtggtttttttaatgttatttaccaataaatatatatatgtgaggggttggattttgaatttgaaaaatatttagaatgttgtttaattaaactttatcaaaattaaattaaattattataataactttttagaaaataactactactaacgattataagtaatcataatttttctcctataatctactagttaataccagcactatcatcaatgaatgggtgtaattatataattaacctacgagaatataggaatggtaatataaaaaccatctccaattcgcaccatttccatattttaaaaataaaatttaaaagctgctaatttttgttaatattatttgttgaagcaactttttttttcttgttattttattgccaaataaaatttggatcttcatatacaggataactatgggctatatattattcttcaagaaaatattgaaagagaaacaagaagaattattaagaggacacaatttattttaatttcttttggggaataagtaatgacgaattaatactcttagttatgggttgcagctgtgccaattagcactaggatacgtgcatttgcatcttattatatgattaatctaagttgagcaacttttgttagattaatcattcttaattaattatatatatataagatatataagatatatataatgatgccttacaaactcaatgattttcatgttgttctcaacctttaatgtcatatttatccatgaaattttataatttttttatttgatcattataattttgttcttaaattaagtaatcattaatcgtgtaatttatatccttttgcataaaatatctttaggtttttttttcttttttttttttttcgttgaaatttacatttttagttgttattgaacatttaattaacgacttataatagcagatggtatttttaaataaattcttgtcaccaccttagtaaaactcttgttgcttttgatatttatgttatattatttataataatataatat

SEQ ID NO: 307085 - DNA, 1941 bp, Cannabis indica
ctctctctctctctcttgttagaccgtcgaagacgaaggccactcgcaccactggcccagacgaaacccgcacagccgcccccatcataatctctctctgtatccctcttttgtcccctgtgatagaccttggaaagggaggatcaccttctttgccaatgcctactactctaatattctcacaacaaaaccgacggctcacgcctagctgtcaccatcaaccgtacctatttgtatggacgatgatgttcgtagctaaccaaggacctctttaaattggcccaaagtcaatattttaatgtaatctacgtactacatcaaagtggttttttcaacttacaaaccctataataggtctaggttaactcaatccattagtcaagaatcctataaatatgatatttttcttttatgtaaagggttggaaatttttagcaagaaaaacttgtatgaaaaacacttcattacttcggagctaatcatattgattcgtgaactaaaataaattaattaacgcctcaaccatgcacgtttaaaaatcctcgtctagtttaataatcttatttcttttcattttaatcatcttttaaatttatttccaaaaaaaattttaaacaaatatataaataagtattttacgaataatttcttcaaaactatttgcgtgcatgtgcattttgttttttaattttataaaaaatggattattcataaaattgtttagtaaaaataataatgtatttaaataaaatagtgcaattaataagggtgttctctctgtctcaataaaaataaactgggagaatgattatggtgaggcggaagaatggagtgtccatggaaatgttagtgtagtcacgtgaatatatcatatatgtatattataatattaattaagcatgcatatatatcatgcaaatacaggtatataatatctcattattgcaattcaccggctgatgttgatcctaccagcggtcccccacctacgtttccactgcttcacgatgccccgccctttaatttacatcatcattatatattgtaaccttaatttctacagctaccatttcctttaattaatgcccttttttttttaattaatggttaataattattaccatatatatgataagaaaaactgataaagaaaattctaactgtatgaaaaatatatgagaaaatagtaataaattcattttcacatattttataattaattaatataatatataaaaagttgtaaaattccattaattaattaccataaattataaaaaaaaattcttgatttaaatataacaaaaaaaacatttggttttattaggagttgaattggctgtactcatctccttctctttcatagggcgctgcataatataagtttaaattttattaaggaaaaataagacaaaccagctcatgaaacgaagatcaaagcgactttttaaaagtgtcgaaattgtaattggatagagagtaactatattacaactaatagtgtataaggaaaaagttaaagtttctgttatgatatctatggtattatattatatgtatatacacgtgggagattgcactgtttaattagaggacgcgattattaattatctgtcaactctcattcttcattttttattttcttggatgtattatatatcacatataaataaataatgggaataaataatatataaatatacattttttccatgtgttcctactttgcaaacaacaaaataaatagagtcaaatacaaataccttaataaaatccagaagaaaataagtgtactagactattcaaagcaaagttgttgcacacgatcatcaaacatatatatagactaaacttgcatgaaaaaattagaaaattattatatgatgacgacaaatgttacgcgagcctatgtgacaatatcattattcatttgtccctaaa

SEQ ID NO: 307086 - DNA, 2773 bp, Cannabis indica
aatgggtgaatccatggagttgttggaaagcaggagagaggcttcccaagtgcgattggcagtataccaacgaaaggtagccagatactttaattctagagtcagggaaaggagcttcaaggtaggagacttagtactacgaagggtcttagccaatactaaagaccctacggcgagggtgctacgaccaaattaggaaggtccatacgagattacacaaatagtaccccatggcatgtacaagctaggttgttacgactctaagatgaacctactggtaccccaatattggaatggtcaacacctctacaagtattatcaataaaagttgttgtttagcaacaaattatgttgtgggtatgctcgttagtaaagttatgatttctattagttttcattcttttcttttagatttgtcttaaattaaggcagatactgccaattagtgatgtaataaggcatgatagccaatttcattcataaataaaattgcaagttattttcacataacaacgcaacttgtatgattattattgaatcaaattgtaagccaaacaacggtcaatagtgtatggggttatagtgggcagccaagatataaattttactttctccctgagtttacttgtatctttgtgatttctgatgaaaaaaaattccttgatcatactttttcaaaaaactaattaaaaacagcccaggttgataatatgtcaacctgggcgctgggtccagtttcagacccttagactattccgtttactccctagaaatatttgaatcttaatctttgatgaaaacagagaatatgcccggaatacttttcagaaaaactcctcggaatttgcccaagttgacaaaatgtcaacctgggctctggctccttattttggcctccaggttgatctgcttcttccccgaaagtacttcttgcaacatttttgatgaaggctaagaatatgaatgagttgaatttttagtttcatgcttggaagtggttcaggttgacaaattgtcatcttggacgttgagtgcccgagcaccgggggctccaggtgctcaaaaattaaagttctctaaatctgattctgatgcctcaaatatgttcgtggtatatctagttcatgtactctagtgcaaagtttgacccattttcacttagacggtcccaaaaacttaaaccttagttatgtttgcaacttgggtgctgggtgaaaccctaagcactcaggttgatttttgaggtgttatttcatgtgttttcagctcctggactctggacttggatgcttcatgtcttcatggcatagaacattgaatgataatgagttggaaacaacttggcaggatccaaacacccattctggagttcctgaagtcaacataggcgtagggctagggttccctcccaggtcgacttgctatgatctgggactactcaactccaggatattttctttcttgccatgtttcaaacattgatctccatatcatcatggatgcttttggtgtaaacacaaaatttacacaaaccgtttttgatgaaatttatattatgtttcaccgacaatgttaagttgtgctatgaattaatttgtctttggcagtttggaagtcagtacatatattaactattatgtttttgctttttctagctccttttatctagttgatcagacttgtgtttccttagttaggtttttcttgcttattaatagtacccttcaagattttttcacagctaagaggggactcaagcaaggagatttgatatctcccttattttttgtcattgatatggaatatctcatactgatactcaatttattcttagtagttctgagttttcccaaagtactttccccattagatgcttgggtattccgctatgtgcttcttaaatttctaatatagattgtcattcattaaatgaaaaaaaaaaatttggctagaattaagctgtggagttctaggcacatctcttatccaggtagaagtatttttattgactcagttttaatggccattcacacacattaggctcaacttatgattttaatcaagtatattatattcttgagcaaagcaatgctatatgtaggtcccatctctttggaaaggagtttttgatacagctagcccagggcttgttgcttggaagactatctgtcattctaagaacaatggtggacttggcttcaaaaatattgaatattagaatgtaggagccttaagtaaatatatgttggacattcctaccaaaaaagatattttgtgagtgtgttgggtgcattcaatttatgtaaaggatcaagattggtggagctatgaggctcctatgagctctagctggtactggaaaaaatagtgatggctaagaacataattagtggtaaaatttagactaatataggatgaactttagcatttttgctatttgttataaactttggccgagaattagtggggaaaaaagtagttctccatcatttggagtataggtagagtgttactaaacataaattcaatgcttggcttgtctaatggaagtgtcttcaaactagagtttgtttgctcactttcaggtgcatttctgttttaactgcatgtacaataagaaaattcagatagctttatgtaattggattgggataaatatgcatcaaaataatttagattattatttgaaataggtgaaacgctgcaaaacactacaaaattttttacttttagtcacaacaaaatttgttactaaagataaaaaagttgtggc

SEQ ID NO: 307087 - DNA, 5839 bp, Cannabis indica
ttggggcattaactagccttagttcatgattcaatattattaaagtaggttagaaaagccgtaggaattacaagaaggtatgagtactctctctttttcctaggcaagttgagtaaaaaaattctaacccttttcatgcaggatccgttgagtatttattgtatagaggtcatactagttactcgttttccctataatggggagtttacaaattatacattaactttgggcttatttggtgaagcccgatccatgaggtgcctagcgtatgttgacatggaggccacatcacgatgctggttgtaaaaaatgtttcctatctttgtgggaattaatgaaagattaattacttgattgccagttaccatctttccttatttagaaagatatgatcttttgtccaagattattagaaggaaatccctaatcttatgcgatctaatagtaaataggaaactacactgggcttttgaatacacgctaaaggtttcttttggctacgcaattttatttcttccgaaagctaaccatgctagatgggatcttgcctggatgagttgcttattcttcattcggaaggactgatgatttatggatccaacccagttatctcaattgggctcattggttggccttaggtatttaatctaaatttactaagggaattccacgtgtccctagttacaaaaatggataatatttacccccaaccttccaaaactttgagggttgcggaggcttgctccatactgcacagatggacatgtggaggctaaaggtgaagcctttaagaatttcaaattaacttcaaaggtggttgacaactttcctttttttgaattaaggtgatacatggtattgcttcattggtttgtgggattaacgttcatcgaggaaacacttagagcagagttattagactggcggttgattatttcagtgcgagtctcgaggggaatatcatcatgcagatttccttgactccatatactgcattaaatttttgattgatggcattcccaaaccattggatttgttttgcgtattctggaacttgatcttggcctttgactttgggaaggtgcaaatcaccctttttgagtataaatactttgacataccattgtttatcatttttactcaaatttcaaaccacattcgaacttgcagagaataatcgacaacaaaccaaaaaattctggagcaatacatcaattttttgctcccaagaagttatggaatggttggtgaatttatcaaaccaactacttacttcccctgttaatgaggtcggaaacaatatgcatcacaagttgtttgaaatagtacttgctattattgtattgaaattattcacgtgggcaacatgatcagtagtagcatcatattgcaagacatgtggaattttaaatccttgaggaaattatgagtttaggatatcagggtggaatggtcccgttttttcatccgagtcatccctagtagttttccatactctccatcctagtattttctaaacttttcttctaattgtattactcgcaactgaatgggatccaaaggatgttgatctgtgttttgattgagttggtcacgcaaattgggtgcactgcgatttaaatgttcacgtaggtctggctgccttcgatttaatcgttcatggaggtcaagttcacaaagtctctaatcgtaattactcatagatctagcccttgagtaactttcagattggtatctacgcaagttactcatactttttgattagtaaaataatgttgtgacctattcccatctcgtgtttgcctatgagtcccagttgacctactgggcctgtgagatcttgactcccctatacttgaactagctcaacataagtcatctcgcattggccttcttctccgaaagagattcgacacacgtcccctacctatgtatgtatgtgtattttctctgtctgtgcaagaaggcctttatggatgactcgggggtcgacctgacccaggttgatttacaggatttctcccatcacgacgagggatttcttggctccctggtcatgactgccttgcatttgcattcatgtgagatgattctagtatatcaggttgttcattcccctagtttgtaaatccatgggaaattattggaacatcacgttgatgctcttgatttcttgtgttgcttgcattgggttggttttctctatccattgggatatcccttgtattcgcatgttggtcttcctgtgtatttatgggattcccttgaacattttcttgactcctggacctggaaccttggggtcttccccgtggtcaccttacatatggatcaggttgagtttgaggagtgtttgcctatgcagccttggctgccgcaacctcttgttccaacttagcatttcttcgatttgattcatctaggcattatcgaagttgcctattttctaattccactagtgggacatatctggtgggatcataggcgtcttcgctttgcctctctgggatttgttcaccagttggattgaagtttccaccgtttctcccaatatgatgggtttcaattgtgttggttctttgtgatccctggggttcttttccagggccatgggtagtctcctctagatggttttcttcgtttcgaggggtattattttccatagatataggtttgtaattgtgtttaaaaggagggtattttctgagttttttattacaaaggctctcaacgaaagtaccaaatcgttaacgcagatttttgttaaccaaaatatatgaaccttttacgtaataaatatagtacagagttgatgatgacgataaatgaacaccagatatttttacatgattttatagttaaaatctacatactccacgaatccatcttattatgaatgataatctagatacagagtacaaattctcttaatcaatctaatagatagctttttttctcaaatttgtcgttctttttaccctagattctgcccctatttttaggtgtacagggtggcatttattttctttgggatctaatcattcacaactgctcatgagatgagaacattcctcacatttcatttctatgcatataggataatatttaataactacccaactgttcctttatctttctccttaaacggttctgctaactatgaaggttgtctctcgctaagtacgagttgtccttctttaccgtccttgtagaaaaaaaatgctaagtatagatagactcttttactttgatggtattaacgaggtgattatttctacgtataaatggcgagatggatgaatgtagttattatctccatatacacatatgtggatcatttagttgcaggctcttatttccaagtatgtgggtcaatgagctgcaagctctttactatctcttcttgaacacttttgatatgcactctgtctatcccgagatgtacttataatctagtcaatctttaaatggtaatagttattattcttatctcgcatttacttatgtgacatcaagtttgaatatttttatcaaccataatttattgaaaccgtaatttatccaaattgtagcaaaaatattggcaaaattttatttcctctatacggaatcattctggttacagatgatattttatctttcttttgtttggccttcgttgttcccaatctcatcatccaaattggatacttcttgagaatcttgattctggatgtagggtccggtggggacctatccaagttgttataagagaggactcgcccgtatccttgctatcttagttagtatggatatttatctgcttgacatatttccctattactctttcagaatgtaccatggcgaagggcgaccatcatgaagaggttgcagtagatgaggaagaatttgctacaagatcaagcctcaaaacatgtggaagtataagcacaagactatattttatcggcttgagaggtactctaaatctttggtttgtctgcctagctccgtgatgcacaccaacaactttcaggattactagttttatacctcaggtttcccactgaagagggttccaactctcactttagatttcaacactacaagtaagtgtagttgttgatccccttttccttatttttttcttttttcccttccatattggaaatttgaccaagtttatctctttttgttcttttagacaccatacctcatccggttaagactcctttcttggaggtcaggagaattttgtaccagagtttttcacctgaagacttgcaggtgggaaaactcgtcttttcaatcaaccttaggaaggttagcttacttgctccccaccagagcatatattcctttcatgtcaaggactcactctaagaccttcacgacgattcttctgagcttaagcaaacaattgttgaaatcgttgctcatgaggcgctgaaagccatcaagaaggaccaagagtggctagctaattgaaactagagtcatatagcaactttaagtgaagaagaagaactctatatcctctttgagactgtagtccagaacgagggtactccaagagaaagtacatctgaagaggtaaaacacccttctacttagttcgtgttctgcacttggagaacttaaatcattttgacctgggtggatttgacccacattttcggaacttagatcactataatacccagttgctcaatatattgatatggtagatgaaaaagaatcctaaccacttcattcagtctacacaaacctttaggattgattcttttcttgagatgaagtatctaggattcttccaatatgagacttttttaggcaggaaagacgtttccctgtttgctagtggaaatcctaagtataatagaattaatgatttggaccatacttgagcttttcctttaaattttattgcatgtttttttgttgcttccgtgatactaatgtttgtgtttctttttgtagaaaatttattggtagaatttaaatgaaagaatgtctaagaatttaccgaattggatagcacagaacaagaccttgacattttttgaaagattatcattaagcttcttaattacaactaatcacagaaataaagtttgatttgatctaatcaacagaagaccaacttaaaatgatatattaaacaaacctaaacacgagacctatcacaaaaatcagtgacctttctcttaagttcaccagttgcagacaccacatctttgaaattaacctcaacaaaacctctcaaaagagcaaagtcatcaaacaatttattttgagaacaaataatttcaacaaccttgtatgtcaaagattcaatatcaggagaaaccttttctcccgaagaataaccaacattaatggtaaacttaactggggcacaatcagcaattaaaagatccttaaagaaaccatccagggaaaactacttaaactcttcagaagtaaggctcaagttcttcacttgtacctataaaaaataacaacaaaaataaattaataaaaagataaaattaacaacaaattaagcttaaaacaactataatacaactacaagcaaactaaatacttaccattttaagagacaaatcaaaaagcttcattgttagatcatgcaaagatggcataccaagaccaggatactcaccactgctccaatttaaaattcttggaatacgagaatgtacacgtttactaaaatctcgtatcttattcacacaacattcataaaaccacacttgaaaatccaagggcaactcaaatgtctataccaacttgataagctttttcactttcatgtcattttcttcttaataccatgagcaacattacccttaaaaga

SEQ ID NO: 307088 - DNA, 1249 bp, Cannabis indica
atgtagtccttggacctatgatcgaaaataatttattttggaacgcttgaaagaaggggacaatcctaaaactcttgctcttataaagctagagatatgggtttaaattcatgatctccaatctggtttcaagactaaaaaagttgttcgtgaggttagaaatattagtgtttatgtcgatacagatctaaataattttacgaggccttggcgggagtatctaagagtgtgtgtttgccttgacataatattcctcttaaaagaagaatgagattttgacgacaaggaggagaacctgttttggctaattttaactatgaaaaggtccccactttctgctttatatgtggcattttaggtcattcagaaaggttttgtgcaagactatatgacactccaatcaatcaaattgaaaaatcgtatggaatctagatgaaagccttatcgaaatgctagaattttttaactgcttccttatggctctggcctaccaaaccagtagttgtctctggtgatgataggaatcaggctgacttgaataagttaatgcacccccacaaaatttggctccatctaaggaccaaattttgcacgagcagctggtagtgtgcatgagatctcaaataataaggtacgtaattgtgggaatattgataatagtattaatgatatcatttatgaaccatgtgatggtcaatgaaaatattgtaactttttcctctgatatggacctggctattatgaagctcaaaagaaaacaagttgagtccgtgtgtactggtaggcctcaagatgatagcagtgtttaatggatcaagatcttatggcccataattttcctgatgtggaagttattgggctttcaaaaagtgagaagaatgtgggttctggtgtcaaggcccaccaatcattatgagtttatcacttagaattgtcgtgggcttgggaactcacagtctattcaattccttgaggacatttgtgttcaaaagaagcttgattttatctttttgtgtgaaactttgtgtagaaaaaatgttgtgggctgtttacgggtctggttaggatataaagattatttttctattgaggcccaagggaggaaatgaggcctagctttattatggaaagtccaagatgaagcccttttacttagtttctcttccagccataacatgttctatgctattcttaccttgtttccgaattcaagtgagttggccgacctgaacggaaaacctcatgctgg

SEQ ID NO: 307089 - DNA, 2201 bp, Cannabis indica
tttgtctttaatttctttatttgtggaaggtgattgagttttggacgatttaaaatgttagtgctaaaggtgtactgactggtttgcatctaaaaactaaacctttgtagtacctttaagatgtagccactttgagacagggccaggctcttttttttttcttatctcttagtatctcaattcctaaaattttcttggttgcaccaagatctttcatttcaaattcagagcttaataattttttatattcttgatttcctcactgcgattgctagcaattaacatatcatctacatagagaagtagatacaccacaaacttgacatttgtgcttttaacataaacacaacagtcatagacactctttttgaatctagatttggtgatgtactcatcaaatctcttgtatcactgtctaggagattgtttgagaccataaattgatattttaagcaagcatacagtcttttttctcctttacctcataacctccaagctatttcatgtgaattttctcatccaatccccatgaaaaaaaatgttattttcacatctattttctctaattctaagtcatttacagttgttaaagctaataaaatttgaattgaggtgtggctcactactggtgaaaagattttagtatagtctacaccctctttctatgtaagctcccttgacaactgcctagccttgaatctagttgagtcacaccctggaattgaatctttgtgcctgtaaacccacttgcagttgattatccttttgtctttaggttttcttaccaaaatccaagttttattcttaactagtgaatctatttcaattgtacatttcagttccccacttgccactgttagctgatttcatagcctccttgtatgatctaggttcattatcactcacctctgcaatatttatagcaaaatgaacaatacatgcataaccaaatcttcttggagcttttgacactctcttgactctgtctctgaccaactggtagtgctgcaatactatctcagtatcttcattttcatcttctttagcctgctcatccatagtgtgagtaccaatttcctcatcatttcctgtcccttgatgtttgcatctatttgttagaacttgaaccaagttccacctcaaacctagacttgtatgaatttcactcattcatagaactggttgctgactttaaggtgtccttatagacagaaccttcatcaaacataacatctttgctaacaaagtactttcgatggttccttgactttatgctccacatcttgttccccttgactccctttcgatagcccaagaatacacacttcctagttctttgttcctaaacttgtcaagcctgatttgtagcatgggttatgcatccaaaagttttgagccttccatagtcagcagtgtaccttgtccatacctcaaccatggtcttgaaatttatggcggatgatgggcacctatttatcaaatgataagatgtcataacagcctctgccaaaaagtccttagataaccctaaatggattagcaaacatccaaccctctcaaaaatagttatgttcatcctttcagtaagccattctattgagagtttctaggtactgtcttatgccttgttatgccattatttctacaaaaaattgtaaattcatttgcatagaattccaaaccattatcactcctcaacttctttgtttttcttccaatttgtgtttctatcagagttctccattccttgaatgcattgaatgcaacattcttgtttttaagtatgtgaacccacacataccttgaatgatcatcaatgaaagtcaagaagtatctagctccacctcaagacattgtccttacggtccccacactgaatgaatgtaatccaaagtggatttggtattgtgtagaccagttcaaaattttaccttcattgactttccatacatgttggtcacaaaattctaaatctttatttacattctttccaactagacctctattagtcaatacttataatccctttttactcacatgaccatgtcttttgtgccataaagtaaatgaatttcgtattcctcttgaagctactgagaataaatttgagtaattaccttgcaaaatgtaaatcccattcttttgaactttgagaactccattttccaccttgatagtgcatccatctttgtctagcatgg

SEQ ID NO: 307090 - DNA, 1301 bp, Cannabis indica
gtgtaaattaagatcttggtaaataatatcaaatttagtatatagttagctcattaatcgtaataaaaatataaaaatatagaatacaaatttaaattcgtataagaaaacaagttagtgtgtttgagaaaataagattgacacgattaaaagtatgcacgacacgaatttaaacacactacacaaatattgggtatgaaccgtgctaaactgtcttataaaattattgagacgacacgacatgattcatatttttttatggtctgacacgacacgactcgtactttcactatcttttcaaaatatagggcaagccaacaccacacatacatatatttacaactctaattggttagtggctattcactgtagcgtgaggtaagatttagctaatgttttacggtaaaagaaagaataataatgaactctttatctctcaaaaagaaataaataaaggaaaaaaattaaaaagtagaaagaaaaagaaaagaaagatacataataagattataaacaaaatttaaccaaatgaaagcatgaaaagaaaaatagtcaccaatatgatcacggtgaaatgcgtcacatataaatggtgatgaaaagttagtgatcatgacaaagtgttgccaagaatcttttctttaataattgattatctttatacgtttcatatacatatcgttatgaaaaccatttcaagaaaatacaaaagaatatcacattatttctaatattaagtattatatatttacaagcatataatttggctaagttgtacatgagaaaaaacccttctaaacggcaatccaatatatttgattaactcacatgtagtgtagcgtggctagtacatcgtagctcacagcttaataaataacaataataatgataataatattcactcactctcatgacacccccaacttgactaaattcttttccctaaaaagaaaattagagttatgatatatatactttaaaggtttaaaccataaagtagaccatttgttatatggtggatgatgatgagtttcttactaggtgtgtgttatacattgtacagagggacccatatatgtacatatactcatatatacacatataaaaatacaagaaactttttaggtaggtatatatatttatggtgtaccccttaaaaggatacaccgatacatctttatctgttttaatgtctgaaataattttttagtcaatttttttctcatggtcatgtaaattatagttatttaagacatcatacaaaattttaagaaatttgaaaaagtttaacacgccgaaaa

SEQ ID NO: 307091 - DNA, 1275 bp, Cannabis indica
ttattaccgttaaaaattaaacttaggtattaaacttaagagtgagggtttagtaatgttgtggcgtgaagaaaatcaggcgaacttaattagttattaaactatattgatgttattacaaatatcgatggtatgaaggcttgaaggtcaactgggcttttatggagcttgccttgatgtgcgacataataatgtggtggatcaggtagacaagcgaggcactgtgtccgaggtggctagtgaaagtgtttaacaaagctcttgaagatgtggggttgagaaatataaaatgtgttggtcacaaattttaattttatcaaacgatctgctaatataattgctcatagtcctgctagagcatcttgttctttttcaaatcgagtgttcaataaaagtgatgttccatggaagtatttgacaaattaataaaaattttacatttaaaaaaaatatttatctataatcaaaaattaaaaatatatttttttaaaaagaaaatttaggtcttatttgaaaaaagaaaaaatgtcatatgatttggtagttaaaacttaagagaacatactgtaaaatttgtaagggcgttgctgaaaatggcgccatgagatgacgacggcgatggtacttggactatggcgatgtccacacaacgtatcaacaaacccttcttctcttctctacgcctcctcctccaacaggtccgttcctttctttctttctcagcttcactcactcactcattttcacaaacaccttatacgctttttcccaatggctttcctaaccattgaaattccctgatttcgcgtagaggttctgccacgccgtttcccatcgaggagttctacctgaaatagcttcaaccccccaaggttttgtttttattacacttttacattataatttatgctgtcattacaataaaaatctattctttcatttcttgttttgttttgttttttataatcagagacacacactcagtagttttgttattgttatgattgtttagtggggttaatgggtaccaaaaaatcaaacaaggtggattccagggcctttgggatacaccataatgctatacctccagctgcattgactgtattgagaattttgaggaatgaaggtattctactcattattcattcatcactttaattctactgttgcaagtttggaatttttattgtattgtatcttttcagctgtgttacttgattttctgttttagtatattgagaatcgcttgagcttgatctcaattcacaactctaa

SEQ ID NO: 307092 - DNA, 2756 bp, Cannabis indica
aataataataataatagtcccctattattttggggccctgtgcaactgcccaggttgcacaggctataagccgcccatgctttgtatcctccattggtatcaaggaaaataggccgatggtcagaagtggatgtcgaaagatgattcagcacagcatcaggaaataaagttctccattctgtggatgcaagaccacgatcaagtctagctcttttcaatgtcatccctgcagaaggttgtttgctgctcttcgaccacgtaaatggtggcccaatgaatcccagatcaattaatcctgcacggtccaccatgcgacggaagtcgaaagcatatctagctgaattaccttgtctagagtagttaatgcattcagagtcacgaagggttccattcatatccccaatcagaagtaaaggaatggaagtggataggaccaagtcacctacttcattccagaaggtctctttgtccttctcatgaggaggtccatatagcccaattagattccaagtcacacctagggggtccgatgaaatctctcccataatcccatacttgtgattcgagataatgttgcatttgactcctttcatccagcagagtcccagtccacccgaaagtccaactgggggaacatacatgacttcctcaaagtgtagtcttttgcagatcgcgttgaatatcttcaatggtattcttgcctcagctatcagtagcacctcgggtttatgatgacggattaaggccgtcagctggcgaactgtcgtggaactttggagaccacgatagttctaggctaggattttcatggagactgtggagacttttttgggcaagtctccgaggccccgaagcaaaaatccacattattgcttggagatggttgtgcagtcgtctcatagtcatcttcctatagttcttgtatgtggcaagcagatgatgctgggtgagtcttctcaatcacaacatagtgattatcaagattcatatttcaagtcaatagttttgccctcccagtgatctttgattgtggagttgtagccattttttcgatttagagggatttgtccatttgaattgcttcgaattagccgctagtccttgacggtttttgggtggtcttcctctccgtttcagagatttcccactatttgtactactcggcgtatttttcatcggtcttcctcttcgcttaggagtgtctccgtcaatgtcatggcccgtgacaagtggggcgaggggttggtggaggctgtgcttcatttacatcagatgcagcttcatggatgaaggtcatgcagagtattgtatttgagttgggttcttccttcgtaaattcacgtttagtttgtgatgttgactttggtgatagcctgaaaaggaagccatcataggcctttcttttgcgtgggccttttaggtgttcttccactctaaagtcctcaatgctaagtagtggattaaagagtgtgggttccctatggaacttatcaacagtgagggagcccataaatagttcacgggccttcgcttgggcccagcattcattggagggccagcttataaattgggtttgggagcccaaaggagaggccctatacgaagggttaaagtaggttccttcgtttgagtctctttgttgtttgtccttactggagcgactatgactcttcatgcatggagtggtattgcttgatacatcatcagttgcaggctgatctacttgggagggggtttgcataggctcttttccagcgttcatcttggtccctcctaaagatgtaacttttgttggtgcgttttgaattttggagctattattctgtgatcgttggggtttacagcctgtcgtattgccctggatgctgttctcagtggtattcgagggttgtgctgcatcaattaggtcctggatgacttcgtttttgttgttattactataaggggcaatttctccaatgcccggcaggtaaaccaaagggagctgggtaataacctgcgtcggttcccctccgtcttgatcttcgttttcgtcgtcggagacgattctgcgtttagaaagaagttgaagtctgcattccctcatctcatctgattcaccattcctaatcgccttttgtaccttcaattggttgcagagcaccgggtctttgtttttggagcacccagtcttggaaccattttgcaagaggggaggaaaacgtagacttttcctgagcatcattcttaagccatgtcccacataacggatagaagttccccgcactgtctttgactacagtaggcagtttgaagcatgtgatgtgatcatgagttagaatgccgcacttgaaacaaagcttgggaagtttttcatatctgtattgcaaccataaatctttaagcttttgccttctcaggaaaaaacctgagaatagaggcttgtttagatcaatggttgctctgaaccttaaagtgctcattccaacatcatcctcaactccattcggaagttcgtagacaggggatgctttagcagaaatgtcctttagattggataggttccaatagaaggttggaatgctttctacagaaacccaaataggggttttatcaaatctgacctctggcggagtaagccaagcaggccacgacattaagaccagaagtgtaatgaccgctttagtaatttggattagcaaaggcaattagtactaatttccgttaattttataattatttatgaattaattatttgtggaccccaatatttagaa

SEQ ID NO: 307093 - DNA, 2800 bp, Cannabis indica
ttagtttagaaataaaatattaggtagatgtaaatatagaaaatcaaatttcccttataaaactcaagaaaaataaataatataatgcaacacttcccttccccaagcccattaactgtttcgaatcggaaaaacttaactatatgcattaattaggcaatagctgactgactaccccagttctctcaaaaagaaaaataaataataaaaaaaaaaaacaataagctacctaccccagttaaaccaaacatattattataattatcatcatgctcatcgtaattctcataaaattatctttataaaaaaaaaagtttatcataaattatagttattagctattattcattgacatcttgtccttttcatacgctgtagtagctacataagacatatattatcatttttttgtaaggatatttaattcaaaatcttaatttattaatgtcaaaaaagatgtgaaaccgaaaacatttcactcctcctccagtcgtcttagttgaccaaaatttgagttttttttcatttttatttttagaattattttctaaaacagaaaagtttacgatttcttattttgaaatggagaataatttacgatacaaaccttgttttcctcagaagaacgagtggttgttcggtgttcatatataatgaaacccagaaaaaccagtaaagccggtggaatggccaaaatccccaacgacacctgcaacgaattgaacaacatttatatatatatataacacagtacagtgacgttaatggcgaaatggggtttgggatttggagttacctaacctacctgaggaccaagatggtgaacaaaaaacccacttgtggagtaaccaatcaaagctccggcggaggaagaaaacccacataaactctgtaaatctgaagctaaagaacgaatctcgatgctattcctcgctatacaagcatcgattgtcacgtcggctatggccaccgccgccgataatccaataagacagctcaaggcaacgcccgccgtcaatttccctccgattgccacaatggcggcggagattgcgcccacgacgccggcgagaatgaaatagggacggcggcggtatcccttgacgggaaaaacatcagtcatgaggccccaaatgggtttcataatccaagggattgagtagagaccggtgtagagctgaactacggagggttggatcttctgaacatctttccagtagtaatcggaaactaccttgaagaaagagccggagaaaccttggttaaagccgtaaacgaggattacgccgaagacgaaggtggggtttagttgggaagaaagcatttgtagccattgaagaggttccagaatgattttgagtagttttttaataaatgggtggcggttgttggttttggtcgccggtggttctgtttctgataatgggtcgtcgttagttttcccgatgagtttactggtttcagtggaatccatatccatatccatatccatatccatgattttggagtttgtaaaagaagaagaagacgaagaagatgggcttttcttcttcttcttctttagtccataaacgaagagtcaaagctttctttaatgatattattatgttcaaaaaatgtgttgagatcataagtattatttctcatttctcacgtaatttaatattattaaattaattttatatttttataaaaagaaatgcaatactaaaatgtcctactaaaatgctcgaatctgggaggggtttactccagagttagcaagacccacttgactaaaacaaataataattataataatcatcatgtatttcttttttaaaaaatgccacttgaacttaaattaaaggttcagactccaataatcaatctagaatatcattttattgaacttctttctaaaccacgtgtagtttaatcttcaatgaatggagagcaatttatggttgtttgtaactataaaaacaatcattgtcattttatccaattaccaaagctttattatagaattaaagcttaaactaactgcacaaatcacttcattgccagtaatggaggggttctaggatttggaaggaaaggtgagtagataaaatagtaatgctttctcctaaagtatttattgtgtgctttgaatctcttattcgaagagatgaagtgctggcagggctttttttttttttttttctttttttaataattagtgtttttttttttttaaattactaaatcttcttcaatttaatgacatgttacaaattcttccaaatatatttttatatttttttttccccgaactttgacatatatcaaatcataccaattgaacttttttggccgttaaaaattcccataaactattgagattgttaattttaaggacttttgtctaattttagtaaaaaaaaatttaacaatgatgaaagttcagggggcatgatttagtacatattaaagtttgaggggcatgatttgatagatgtcaaagtctgggagcatggtttagtacataaacaatcactgaaacagtaaaattgaatgaaattaaacaaaagtccttaaatctaacaatctcaatagttcggagagaatttttaacgggtaaaaaaactcagggagcatgatttggtacatgtcaaagttcaggggaaaaaaattctaattagccttataagtagctatctaacgataatttttagtttaacaattcttttttaatttttctgttatttttcacggagaatttaacattcgttattaaatttgaaattgcactattaattatatagaacgctctata

SEQ ID NO: 307094 - DNA, 2137 bp, Cannabis indica
acacaatcattaactatgtgccccatatttgttcattaccataatgggatggttaataatcatatattatgttagaggcacatgagagcacccttaaaactataattggcccattaaattatagtctaccattattggaccacttaagcccaattggaaaataaccctttagggttagaggggcatgatatatatatatatatgtcttatgtgaagatttgggtgtgtgtgttaatggtaatgagtgagagagggttagctccacaaagtgttctctaggcttttgctcaaggttaggaatttggtggcgatttctttgacaattatcactctcatggatggtatgtgaggtatgtatatttatttttgttttgtgatgctctaaataaaatatagatcttggttgatgattatgagtaatgaagattagcatttaatgtgtttttggttagctcataatcatggaaaattaacaagaagttgattgttaatagcttaccacaacaagaatctgtattttgggagactaaacttgctccaaacagttttgtcataaagaataggttggcggtgagaatgggtaccgttataaagaatggaagctttgaaattacctttagcaccagcacccacaatttgatatttgctgaaaatcaaatgaagtctacataacttcttcccataccaactcgaatctgatttcaaggagtactcccaaaaggatttaccttttaagtagatagaatgaatctatgtaacccaaaggattccatgcttctccgagagagcccaaacgaagttagcaaggatcgctttattacatttaggcccctccctaaacccgagaccaccaaacatttttggaaggcaaactctttcccacgaggccacatggattttacttctattatccttcacaccgtaaagaaaaccccgacaaagtttttcaacctctttaatcacactttgaaggacaaatatcctcatccagtagttacgaagactaagtaacaccgaatgaataagttgaattctccctacaaaagagagatgcctacttgcctaagtgtgcaatctcaactttatcttttttgacaataacaccgcaatcttcctttttctatttagtaggcctcattggaacaccaagctattttaaggtattttagtaggcctcattgcccaagtgttcacgtttcttttcctaactaaaaatttgcagattttgaacaaaacgatgatacaacgatatccattaaaaacttaatttttacttaaaaaaaaataaatcacaacaatggtcacacaaaatagcatcacatgtgcatcatttctgatctcaaaaatagtgtcatgagagtattgttatagcatcgcaagagcatatttttcgcccaaatttattttataggaacatcgctaaagcatccttgtgacctcaaaaaaaaaataaaaaaaaaaaaaaaaaaaaaacaaaagttctcatggaaacatcgctggagtatctttaattgcctaaaaattaagttctcgatgagacaatctttgtaatattgcaaaagcgttttattaaaaaaaattaacttttcaaatttgaaaattaacacaaacaaaaccaaaataaatcttgtacaagaggagaatactaaaaggattgggttttcaaacattaaaagaaaaaagaaaaatcacgagtgcttcgacaatgtgtcaatggtgatggaaggtggtggcatggtaggatgaatcagattggcttttgttagggtggctgagcaccaatgaatatttagagagatacagagaaaaataaaacgtaaaaacatattggagacgcagaaaagatgcacaaagtacattgcagccttaccattgatcttaataaagaaatataattacaaacatcttttgttaatttacaaattaaatgtttatcgcccttggctggatgttagatagaggtatgaattgctgagccggccggcagtgcagagaacatgattgaaacactgcaagcacacaacacatcaaattttcgcttttaaaggtgctttatcctgtatacaaattctttctgcgctgagagaacccctgaaaaactaaacaaccattttctttttcttgttctttttttttt

SEQ ID NO: 307095 - DNA, 2738 bp, Cannabis indica
ttagtcacaattctttacttttagtcacaaattttgttgtgactaaaagtaagatttcgtgtataatgtaaattatgtgctatacttaagtagaatgtcagggaatattgaccaacccactcacaaaagtggctacattttaataaaatataatatgagagtattttaaattaatagatacaaaaaagagatatttctcaacttatcctttcttttgggtttttattttattttttatttttacgatttgggttgctatattggttgcgatttgggttgctttgttggttgcaatttagcacttaaatttccattcaagttgaccggcacacttgaatttggaaacaatataagattagtataaaatgtgtatatgtatatgtgtatgtgtgttatatgcatgttgtattatgtgatttgtatagtaccaacactagtacggttggggtacaaaatgtattagtacagtatatgatgttaacaggatatagcatagtgttaccaacactagcacaggacaagtgcataatgcatgtggtacaacactcaatggtactcgaggtatggttagccctaccaacactagtacaagacgagtacttagagaatgtggtacaaaggttgtatttctattaagaacgttcttgattcatttgaagccttctaaataggtgtatgggcacctagatacaattcgattttatattatatgttttgtacttttcttactgagtctgtcaactcacaattattgtttacatgtgtaggtaaaagaaaaggtaattaagctcaccaccagtgagtccaaaagtcgaagatggttgtacgtattaggatggttagacctagagcgtttggtctcaggacaacacgggccttcattttgtagttacagagcatcacttttataacaaatattttgaataaagttgttaacttttaaatcaggatcatcacctttatgtaaagttatgtatttgtataagtttaaagtttaattttgtagttacagagcatcacttttataacaagtagtggactgtccatccgcttacaatgtgatattaggtcacccatggatttgtgacatgaaagtagtcgcgtcatcttaccaccaagtaataaagtttccctgtaaaggagagataagtgaaaatagaggagatcagttgagcgccgagaatgttacacttcttcaatcacgtgcaagaaaaaattatagcaattagttaactcttcgacttttacagaaaaccaaccccccgcggttgaagagttacgagaaatgttgatccacccgacagatccaaacaaaactacctatattggaacgaaacttgctaggtagagtgaagatgagattgtgaaacttctaaaggattatcattaaatctttacatgggatcactatgatatagcccaacatagaccttgagataatcacccacaagttaaacatcgaccctaattgtataccaataaaacaaaagacaagaaagagtgaaagcagatagaaacaaacagaaaatgatgaggtcgataaaatgttaaaaatgatactatcatggaagttctatacccaactttcgttgtccaatccggtagtggtcccaaaaaagaatggaaaatatagagtttatattgattattacaatgatgtaaacaaagcttgccaaaaagatagcttcccattcccacacttttacatgctaatcgacgctactgcaagccatgaattaatgagctttatggatgcttttttgggtttattaatcaaataaatgatgcatccccccgactggagaaaagacgtcttttatttctaatagagggacttactgctataaagtcatgtcatttcggctcaaaaaaactggagcaacttaccaacgtttgatcaacaaaattttttcccaccaactaggacggacgatggaagcctacattgatgatatgcttgtaaaatccaaggatggctcagaccacgttaagcatctttgagaatgttttcagatccttttagttcattcaatgagactcaatctagcgaaatgtgccttcccagttggctcggggaagttcttaggtcacttggtaactcagcgaggagtagaagtcaacctagagcagatcgaagctttccaggcaatagccaaatccataaaagatattcataaattgataggaaagattgcagccctcaaccgtttcatttcaaaactatcagacaaaagtctatcattttacgatttgttgagggggaaccgaaagtttcattgggattcaaaatgttaagaggcgctggaagcccaaaagaagtacttaagctctcatctgtttgtgcttgcattgccacattgcttgcatatctccatcgtatgggaaagcatttgttttctttcattgttacctttgcaatttgaaaggatttatcttgtttatcatagattgtgcaagaatctccttcaaaatgtaaagaatgccatttttcaatcattggacctagctaagtaggttttgatcaatgttgggtaccaagagtacatcattgatgtatctcttgcctttttctgtgtcaatggtgatggtgcctttgccgactgcttccatgaagtcaccattaccgatttggactttagtattggatctatcaagactacaaaagatgctttcatttttcgtcatgtggttactgtaaccactatcaagataccgagtatcttttgttgggttttatg

SEQ ID NO: 307096 - DNA, 896 bp, Cannabis indica
aaaaataattattaaaactcaaataatatatttaaagcaataaataatagtagagcacgaatggtaaattttaaaacaactttaaaataaaaaataagtttagagtatctactatatagcatatttttagttcaatttttttaataaatttaaagcttctctattttaaaaaaaattattgtgagtactctaaactcaaatctaacccatataaggcagaccagttatggaaaattaagaaacagattgatcatccctttataatatatatgcatgtgccctatccatccttatcgatcaatatgtacgagaaacttattatttcaattataagataaaaaaagtaataattttcacggcaagaaaatgaatcgtacgtataatactaataatgcaaatctaaaccataaatatataaatgaaactatacaatgtatcacaccaatttttatttttatttttatttttctggtgcacgttctcatttaaatgggggaccataataaaggggttcattggaccgacaaataatttgctatatacttctaattatacaagaggtttcaaattgccatgaaaatcctatattatatttattatatatatatatatttatattactttcaaaatctttataggaatatataatagccgtcgttgttacattgaaatggattgactaatgtgtatataaattcgtacaacatatctaattcattgttggttgatgatcatatataaataattgcttattcatttaggatatataatcaacttcattatgtttctataaatatatattagtatgggctcgtttggaacgccgtattaggtcgtattgtattgtattgtattatattgaattggattatatatcatatttttatataatacta

SEQ ID NO: 307097 - DNA, 742 bp, Cannabis indica
aaagagcaaagttggatccgatcttagctgatgagctcccacgaattagaagggcttggcttgttggagagagttgcacatgtaattatttcttattcttactggtgttgttctgtttcttctctttaggtggcaaccgaaggttatggtgtaaacactgttatttgatgttagtcgtctatattatttcatggaccataatgttatttgctttgatatatatatttgattagtatatatacttactgatgaatgttagaaaatgttgtatatttattttcatgttaattattgtttagaactcatctatactactatttaaatcatagtgtcatttttactcatgtagtgatgtttgattattatactgctggagagaaacataatctattttgattttataaaaaatgaccctttgaggtaagtcttctgagtggaatatatctattttggctttatagaaaatggcactttgaggtaaacttttttttttgggttaggtagatatctaaacaaacaacttgatttttttcttgactgctcaagtttttgtatgcttggttctagttaactagttggttttggtgatagtttatcctttagctagatttattatatgagaagtactattattaccctcctattacaattttttaatcaatttttacgctcaaagacacatgtcggaatattttttttcaatttttttttacaggagtgttcggtatgcttacaacatcat

SEQ ID NO: 307098 - DNA, 1326 bp, Cannabis indica
tctttcaaaattttctctattttatagatcactgttttccgaaatttatccaatttatacattccaagtgtagaaacctgaaaccaaagaaaacaagcgtaattctatttcaaaaatattaataaagaagaaaaacaactataaaatgtgacccaaaacttaggctaaaaatagcctaacagtatccctcttatttatatatttttttactagaggtggtcttctatatggcactaacgattaggttgccataaaaaaatttcctttgcatcagtgaggatagagaatgcagtgtaccgatgtgctctctcatgagaattttgttggttggcactgttgaattttcccttcttttagtttccattactgtcgtcgtttccattgttcgacaatttaccaccattattattattgttattccttgtggttgggaatttaggttgttataaatgggggcttcagggatcttactcgtatcgatattattgaggtgtacgctaccaactctccattcagcctcttcaagttttatgaattcatcagaccgaactaagaattctcccattgatcccatagttagtcttttgacatctgactagagtcttattttaggctcagtcccacctaagaccactggtagtcgtcaatgctttgaccttggtagattctgccatgaactgttgaatatagtctttcatcggttcgattaatatttatttcactttcactaggtctttgaagtgagtgggcaactagagggaggaagagaattgggtgtagaattttgatgcaaaggcatttaaagaggaaaattttctaagtgacaatttgaaataccattgttgcgcagactttgctagggtggctaggaaaattcttcacctaacaacccctttcaacccttgtaggttgttttgtatctcaaaatatttgatgtgagataggggtcgtcttttcccgtatacattttccaagtaggcatgttgaacttggtcgggatttccaaggaattgatcttgggagagaatggagaaccttacctttgatcgagttctagatcggtgaattttggtctgttcaggctctgtactaggcttttaagtagatccaattgagcttgtacccctggatgtatttgtgctactttttgacaaacctatgccatcggttattcagctagaactcttgtaaagaccgcttagtttaatttggaaattagcagttaattatgtttaattatggaaaattatttatagatatttaaataattatttatgttgttattattgaattctgaaatgcattttatgtcatatagtgaatttc

SEQ ID NO: 307099 - DNA, 930 bp, Cannabis indica
gagagagagagagagagagagagagagaggtgaggtagatctatccattgctttgaatcgttttattgtttttgttcatctgatctgataattcatttacttgtgtttaggcttttggcaatggcgatccaagggaagacgatgataatcgctctgcttgcttgctttgcctttcagatctgcttttcttctgatgcggtaacctctttttctttgttgtgtctttcgaaaattgaaatttcatagaaatgaatactcagaagttacttctttcgcagatcttttacgaatcctttgaggactctttcgaggggcgttggattgtttctgagaaggatgaatacaacggtagactgaataaatatattataaacaaatttacatgtcaattgtatatctaacatttctctgtcgtgtaacttctattatatgtatgttaatttcctttgctcatttttttcggtcttgcttagatttagtactagtaccaattttttttaaaattttttttttatttctttaaaggttaaaatctagatacatgattgctaaaatcactgttcaagaaatcacaaaagaataaattttaagaagcttctattataaactgtgtatatatttggatagatatgaatatacacacgtaaataaaaagtaatgaaggaaaagaattatattaagagaaaaaataaatggaacaaagctgtatagaatctctagatttgtatttatgtatttatgtaagtttgattcttgtttctctattttcttaatgtatttttcccatcttttttaaagatttgctaacaatttttaaaaagtacagccgatatgtttatgggttcaaaaatgcaaattacaaaagtgaatctatgctaagcctataattctgtttattatttgcattgctgaaaaaacatattttaacta

SEQ ID NO: 307100 - DNA, 1160 bp, Cannabis indica
tagaacaacttaaaaacaacggtctgtaaaaaaaaattgtaataaaaaacaaaatcttgtaaaaatttaaatattttgttatttttggatatttctaaaataatccgcaatttcaacatacatagataagacacataactagttaggtaattaaccgaagaaaaatgataaaaacacaaactattgcaacttgcgcttgacccttagtttaaaagggatgaaaatatagaatgaagtcttattatccatgcatttgtaagtgaaacgatgacaaattgcatcatttcgttaaagaaaatgaaacgatcatacgtcgctttttaatcaagcatcatgtggtacattttaattataacgacatgagacgtcactttcatgacaagcgacgactcatgcttattcttaataattttttaatttaattaaataatgttgattagttaatattattagtcaaacttaatacagaagtaaattaatttaaataattaactataaagagaatagtgtgataaataatattatttaggaactacttgattggattcagaagtacaagaaatcgaagttaggaggggaatctatgttggaagtcaagaaataataacgttttgatatccaaacacaagtcactatagaaaaatagtgaaagagacaatatagtatgtatatgaaaaatcagtacagaaactaatatagatataaaaaaaatgattgagaaaccttgtgtaaagtcatgagttgattctttgagcctctatttttagagtctctgttttggttttgattgtaatgaaaaatatgacctgtacagttttgtttgaaatcaataaaaatttatcaaaattaatgtaaacacttatttacgtagttttaagttaaaaaatgttatctaattataaataaattatttaacaaagtttgaaagttatttaagataattcaataaaatttttatttatattttttaaaaaagaaaattaaagttgcacatcgctttttagacaagccgtgtggtaaattttatagatgagacgacacttttcttctgatgaatttattattattattagagtaatttgcggcaaaaccccctcaactatcaatttacttactaaaaaaatacaatccaaacctcatattttggtgggaaaaccttc

SEQ ID NO: 307101 - DNA, 1630 bp, Cannabis indica
aaaaataataataatttaaatatattattgaacgtgtatattttttttatacgtatgtaataagtatttaaactttaaactttattttttaatattgtaaactcataaaactaaaaaattagactaagataatcttttttgattgtcaaataaaattcaagatgtatcgaaacaccaaaagaattacggattgttatgaatttttgccttatggtaataaatgtaaataagagtataaaatgcaagttgtacgtagtagatttatatacgacagaaaggcaatttgtccaaagtaaatatacttttccattatctttagaggtaataataataataaattgagagttgtgaagtattttttttctatttttttaaatttttggagtggaatttaagtacttgtgaagtgggcttgactaaaattggctataaaaagtgataataggcaccgacaaataatgttaatattaattaaaattgcacagcttttgatttagtggtattctgccaaaaacaagggtttgattgattacgtcaaattcgttgtagaaacggtttgaaaataaattaggttttggattggcctgcgtaaggaataaatatttttatacttatatatggataaattataaaatatatatcccaattgagataaaacaatttcccacctctcatcaactcaaattttaatatttgtgcatgcatgcatgcgcaagcaaaactgttgttatttaatatagctgctttttttttctataagaaaaatagtacgaaagaaaatattaaaagaaaagacccaaaaactataattaataagtagttttggtgtgtagataattattttaaaatgtaaaggaaaacttccaagaacatgtacgacaaatattttaaaaggaaataggtagataagtatactagctatagatagcttgctagcgtgtcaagaaaattctcagccattactcatttcatttggatataataatgaattttattatggctaaatcttttaactatcattttattagtatttaaacttttaaatttaaattttaatggcaaatttttttaaattattacactgttactaaatttaagatatcatccgattaattattatcattaacggtttatgtgtacactcttttatatacgtggtacgtttatattaatacacataatatttttattttaaaattatagaaataaaaaatttaaaaaataaaaaatattataaattttgaaataatttttataatttttaataataatatttgtactaatataaatgtgtcagtgtacaaaagtataggtacacataatttttccatgttggcatgtagttgtgaataatagatgacaccctaaatttgctaagtagtttgggagttttaccactaaaatttaagtgaaaaattaaatgcaagtaaaataataattgagaaaatttaattgcaaaaaattctattatacttgaactttctatgaaaatctaaaaaaatgacacattcttaattttcttttatttgcaagtaaaaacaataattatgacctaagcacaaaaaaataaaaataaaaaacccctaattttgtgtagttgaatctctaaatttttcttttttttttaatt

SEQ ID NO: 307102 - DNA, 1508 bp, Cannabis indica
ataaaaaaaggaagaagagaaaaagataagtgaatgatgtaaggtgtgattgatataagtcatcaatcaatgacgtggctgcatgcatggaattgatgtgtaagtggtataattgtaataaaagaaagagaaaaggtaaaaatgatgatgtaagcgtataaaggtttttttgtaataaattgagtaaattggatttttgatgtaaaaatttctaaaattaatgtgtggtaaatattaatttggagtcctttgttggttgtgggtggtggggttaagtagaagagcaagaaaattcccccaaagagaaattctgaaatgtgttctttgattttcaaataagacggcaaaatctttactcaagtcaataatgatgagtagaaatgaagtggttgctatgagagtatctagaccccataaaattaattgtctagctctttcttctttgaccattctttatgatacattatttcatttatataatctttcaagtcttcaaattctcatattctcatctacttctttaaaatctctctccactttctattaattcttctttttgagagttttaagatgatgagtttccattttgaaagcataattcatgccaagcaactcattcaaaggccctcttctaacacaagagatgtcccaaaaggctatttggccgtttatgttggtgatgagaacaaaatgaagcgatttgttatccctatttcggtcttgaaaaggcgatcatttcaagaactgctaaatcaagctgaagaagaatttggtttcgatcatccaatgggagctcttactattccatgcaaagaagacacctttattgatcttataatgtctagcttgagatagagaaagaagcttaatttcacaattttgtaaggcaaatcaaatcaatagcatttagaatgatattattgagatgtataatgtttgttcagtaaataatttgattggaatttggtatcattttctatataaaaatctcacacagaagcttgttcagactattgttctaaaagcacttgactaatatctaaatggaaaagcaatgctatatgaagcttaatatatgctttaatttaatttatttgtatataacattacaatgaaaaaacaacatgaccgtaaatattgtgagaagtctctgtttttgtggaagaagattatgatgtgaaagtaactgggtctgttctcttacaaatttacaatcaacctcaaaattgaatttggctctagcaatatctccaagatctgcaactcatttttgaccatttacttaactcagaattcagaagcttgctcttgtaaatatataagggataattgcggcaaaagtctccaaaaacttagagttgatacagattagtccccaacctcaaaaattgacggtaatagtccccaaggtgacattttctgtaagtctgttggtcccttttttaactgatccgttaaacccaaataaagtgccacgtgtcaatttttattagtccaaataataattt

SEQ ID NO: 307103 - DNA, 1056 bp, Cannabis indica
agtattagcagatcgaaacacatgggagatctgaactccagggaagttggacaagagaatagaaatatcatgtagaatactatgaaaattagaaacactaaacttgttagaatgcaaacctttgacgactaggagaagagagtctgtctcaatgtagtgaatgggtatattcatgtcttttagccattgaaaactaaacataagtgccagtgctttgataacttcaggcttgaaacaaccaggatatggtcttcacattgcagcaactacattaccatgagagtcgtgcaaaatttttccaaagctcgatatgtgattcatagtgtcaacagcgacatccgtgttcaatttcaattttctagatggaggttttagctattgaggcgtcactataggagcagtgttgttggaaggctcgtgcctagtggggctggaaggaggatgatgagcagcatggtattctcctaagtatgcaagtgcagatgacagtagaatttcatgtggcctcggcttcgtgtcatgcttctctatgttacattcagtccatatactccaaagtatgcatgtaaattgttccaattctaagtgtgaccatttttctaaaactttgaaaaaaaagtccttaaggttaaaattttcagcaagcaatttttccatagaaaaggaagaatctctctagacatttttcgctcttttacaaaagaaaagagcatgaaaaatcgtttcagcactactgatattgcagagtgtacatcctggactatctgctatatgatttatatgtaaggcaggagcaatcgggaggcaatcagagatagctttccataaaaaatcctgactttggatggaagatctgttgggttttgtgccctaaacaaaacccatttcattataatcagatttactaattaataaagatcagaaactgcattttatgttgcatggttcacatgatttatttcatgattgttaaatgtataaattctattaagtccagaacatatgtatttgttcatgattatagtgttgtcaggacagtagaatataatcatgatt

SEQ ID NO: 307104 - DNA, 581 bp, Cannabis indica
aaaaaaaaaaaaaaaggaaagagttagcatattatcccaatcaatattggtaactacatgggcacacattttcagtattaacataatcggctacttgtttaaatttcggaacatatttctatagctcatgggtaattaaataccacaaattttatatatctagttatgcaatctatcattatttactgtttttaattatgctatacatgcactatcttgtgtcttgtatagttatagtaattatattaattcttctttattcatttatttgaattgagtcaaactaagcaaaatacttatctttgtttacagctgaattttaagcaatgttattctctaatttttgcttaattaatggttcagtgaaagataaattttaagaaagaataagaaaatcataactccttatatgtattggacgaatgtgttgcatgtagtgtaataatttttcaaattatgagaaaaaactattgagcattattgaatcaagttctttgagaagatgttgagaattatggggttccatctcaaaaccaattgataatgggtggagtatctcatgttcttatatatagctcaat

SEQ ID NO: 307105 - DNA, 1959 bp, Cannabis indica
aaaaaaaaaaaaacagaattgagaaaggtctgtatttaaatcttcttttacatttacatttgacactataacttgattccatattttcctatattatttttttttgtgtaattgaaacactattttaatgactcggtataaattcattgacaggttttttattttctctattgctatcaaaaaaaaaaaaaatcatgttggtgactaagtttttttttttttttttgatgggtaaacaacttttattgaaagcaaagaaaaaactagtaaccacatgagggggctacatcctttaaaaggccaatggcctcggccttatgcactctcgcccagcgagcaagcatgtcagccatcaagttgttctctcttttcacatgaaacacaaagaccttagtaaaagacttacataaattcaaacactcacaaaacaaaggaaacgtctcccagccaaaaggaagttgagcattttcaaatgctttagctgcaatcaaggaatcggtctcaatttttacaactgaggcacaattctctttagccaaccgaagggccatagcaatgctcaaaagttcaccctccaacactcccttgactttagtccagcctagtgaaacgagagaagccccagcatccaactcattgaccttgatcactgccaaaccagcttcatcatctcgaatggaggcatcaaccatgcaacaccaagcctcgtctagcagggtcgagtttggcacaccagactcaactctctgcaattccacatactgttcttcaaagtgttcaaaccagtgtaccttagtattgaactcctgggtgcggcgagtgaagttactgaataagccatccatatcaattgcagtccctttaaagactgtgtcattacgccactgccaaatcgaatcacacaacaccgtaaccttcacctgcaaattcagattgttcaaactaatccaccacataccaaatgccagcaaactatcccagttacagtcctgtgttcgaatgccacccctgaactagaaagcccgagtacaagagcagtggcaaaataaatgaaaagcagtctccttttcggcatgacaaagagcacacatctgaaggtcatcctggagaaaaccaagtttgaatttagtggggagaagatcactgaacagcctccaacagaaatgctttaatctaggatgcaattccatcttccagagtttttcccaaagcttctgtggctctttgaggcggctttcctgacttagccaataagcactcttgactgagaaatttccagaagtggaagccttctagaataaaacatcacccccctcattcaaggttctaatccgaagtatctcctctgcaatgtcctccgaaaagcagtccttaaccaccttctcgttccaagttctagttctgggtatgaagagatccataactctctacagagattggtttcgttggaattgaaagttgtccttaatatcttctaagcctcgccttgggagccaaggtctgtcccatatttcataagatccgtcgcctatcagaatgcctgccccattaatgcataattcacgggcctctaaaatgctcttccaacaccttgaggcatttccagttttctctacatcccaaatatcagtgtgtttaccgtacttatttcgaagtagttgcacccacggtttatccttcttctccattaccatccaacaaagtttagccagtagagccaagttcatatccttaagtcttcggaatccaagacccccgcatctcttcggttgacacaactcactccagcttcttaaggcgcaataattctttttatccacacagccaatccaccaaaacttagcaattacccgatccaactcttcacacaaagtgataggaactctcactgttgacataaagtaattggggatgctttggagaacagagctaaccaaagtagtccttcctgcttgagag

SEQ ID NO: 307106 - DNA, 4716 bp, Cannabis indica
ttttacaatttttgaagttgtgtttttgtataataattactatgttgaatagtaaataatatctaatattttatcttcttatataatttaataattttatacatttaatattttaaaataaattttatttttacaataggggattccccgccccgtccccgccccattagggaattccccgccccgtccccgatgggaaataagcggggatggggattaaaatccttaacggggatggtaacggggagagcactccccggtaattccccgtctcgtgtgcatccctaattgtaagcctactaaattaccaatcacccagataaagctagattcaagattgatattgggacaagttggagaacttagtaaaaaatttatttgtcttatatgatattatacaagatactaagatttctttattcctgtttccaaatatctctggactcgtttggtacgccgtataagggtcgtattatattaaataataaataacactatgtttggattgagcaatgtgttgtattaattattacgactaaattttttaatacaatgtatgttgtattatttaatacataataaatgatccgtattagcttatattataatatttacaaaggatttaggatcaacaccaatctctcacctagacccggactccggacccgggctcgggcccagacctcggaccctgacccggacccagacccaaaccccagaccgcggacctggacacggaccccggacacggacacgaaccccgaaccccaaacacggacccggacccggaccccggactcagacacggactcggactcgaacctcggacctcggaccccaacccggacctcggacccggacccgaacccgaactcggacctcgaccctaacccggacttggaccggacccggacctggacccggacccggacacggacacggacacaaacctggacccagatcccggacccgaacctggtactcgagacccgtagttggtgttgagatcgagtgtattaaaaatatattataactttacacaatcaattattataagtcaataccaaacattgtattgtattaaataatactataatacaatacaaaacaacacaatacaatataataaagcgtaccactatttcttatattcctagcaaggcaatgacttagctcataaaattggttcggaaggtaagaaaactttatggatggataaagaattggtatgaaatagtcccatacctgtaattcttttttattatttttcattacagcttgagcttactcaaaagtataaaatatatcatttattattattatcttaaattttcctcactgaccttcgtatgtagctggaattaagcaaactattattgtgtactttgaatcataccaaaaagttaaaagatgtgttacaaccaccactcagaatctgccacataaataaatcaaaaattaaaaaatattataccatatcatattcttgttcaaaacaaaaaaatcactttactaagtaacaaatttaaattattattattatacagatttaaaggagaagatgaaaggagaccgggtcgcacagctaggagagccgcaccaattttaacgtgtttgaccgttgaacatatattttctgtcattgaaataaaaatcatccttttaaagaaaaaaaaaaaaacccaccagctcagctgtttatataataattgttaaaatcttccatgaatttttttaggtattcaaatttttttttaaactagtgagattgttagatttaagaatttttgtttaatttcatttaattttactatttcaatgattgtttatgtactaaatcatgcttcttaaattttgatatttaccaaatcatttccatcgaactttaacatatactaaattacggctctgaactttaatccatgttagactttttttactaaaattagacataaaaatttaaatccaacaatactaatagcatttttaactatcttaaaaagttagaaaataatttcgtacagttaaaaatttagaaataaaaaataaagtgattcttaaaatcaaataagtctccaaaacatagtcaatggctggtcaaagacttcacaactacgtcgtttctagtttgcccatttccttaaatagcattctcgatccacgttcattgaaatatttataacaaaacaatctcaaaacacagaaaagagaaagaaaaagaaaagataataagaaatgccttgcgccgtagccataccaaattcacccatcttttctccaaccaatgtctcttcaatatttttcaagtctcaaccttcttcttcttcttctccaagactcatcaaagttcaatgttctaattcagtttcaacctcaactactcaatccacaacatcttctcctttagctggtagaattcagaggaacagaccaccttcttcaacttcaaatatgggtcttggatcgtgttcgggtgaggttttgaagaggaagagaccgtccaggattagtattcccatggcgcctttgagttttactattgattctcccaaaggctcttctgatgtggtggaggatgagtccgatggttattccgtttattgtaagagaggtaggagggctgtaatggaggatcgctactcagccattgttgaccaccgtgcagagtctagacaggtaattaattcttctcctaaaatttgattgattttacaactccatatttagcgatatgaattaggaattaatttatcttctgcaactacaggcattttttggtgtatttgatgggcatggaggggtgagtgcagcagaatttgtagcaaagaacttagattcaaatatagtaaaccatttgaagaattgcagtgaagatgatattggggaagctgtcaaaggtggatatctcactacagataaggattttctaaaggaaggtgtgaatggtggtacttgttgtgtcactgcattaatacaaaagcataacctggtggtctcaaatgctggtgattgtcgtgctgttatgagcagaggaggggttgctgaggcccttacaaccgatcacaggccttccagaaaagatgaaaaggatcgaattgaaaatctggtaaccattcattcaactcaagtactcaaccaagtcaagtggaatttgtaaagttcttcatatatagtttcatttcttataagctatattgcattgttttgtttttgcagggtggttatgttgattgctgcaatggtgtttggagaattcaaggttcacttgctgtgtcaagaggaattggagataggcatcttaaagaatgggttatagctgaaccagaaaccaaagtcttggagattaagcctgagtgcgagtttttgatcttaggctcagatggattgtgggacaaggtaacaaattaccttatttttcattatctcttgtgataccttgtgtaatcattgttgtgtttaaaaggcttgcatttctaaatatacactatttgttttctctttgcagattactaatcaagaagctgtagatatagttcgtcctttatgcattggtgtagacaaaccggagccactttctgcttgtaaaaagctagttgagctatcagtgaaaaaaggctcaattgatgatattagcgtggtggtaatcccattaggacagttcatatgatgatttaacttttagggttagattagaagaaagtttagatgaaaaaaaaaacaatgggtgagttttacttctgctgcaaatgtaatttttttttcagcctaagaaagcaagaaaactccctttcccaaatgtgaattacagccttcaatttcatttgggattttgcctcaacaagtaggaaaattttcaaaaacaaattagtctaattataattgtaacccctttacaaagtaatagcagtatagcatattaatgtttcagtacatcacttaaagttatttctatgctaattcttgcataatcaaagattcaaaatgcttcatatttctgagtcactatttgcaaaaaagaaaggtttcatgcaaaaggagttttcacttttcaatatgctcgttttacacgccaaaatatattgtcctttatattatctttatttcttaccgtgaatcacattgtctcgttggaccaggctggtcttgtttggcagctacaatctcctctaatggagatgtaaataaaataagtgatctaaatgtaaaatatagctttctttgtcaaaagtgtattttaatagtgtgctaaatcttgatataaatatctcacataacaaaaaagtgatctaaatttagatcacaatataacataatgcaaaattttaatcacaataaatgatataattttatatttatcattatgttatttttaatattttattattaaataatttttataatttttattattttattattaaattttatatttatttttgaataattattattattttatatttttaataaactattatatgaaatttataattatgtattagaacataacaaaaaaaattaatataaaataataatttttcatcacccattagagatggtcaaagttagtttaatattttggcacgagggagatttcatcatttcaataaatgagtttggcttgttcagctcatttgggatttgggagcaaccaaatcttattttaactttgagcattgctattaggtaccagtggtgtctagcacctttgcgaca

SEQ ID NO: 307107 - DNA, 969 bp, Cannabis indica
catatctagtttaatagccataagccctcctttgccttttttcttcctaatcttatgaactaattcttgagtaaggatggaagattcaacaatccatctacctgggatgaaaccagattgcaaaggggtaatcaaattttccatgagggggcttaaccgattagctagaatctttgcaataatcttgtaaataaaattgcaaagactaattggtcgaaactgttccaccttcaccggattgtcaattttaggaatgagacatatataggtgtaattcagattatgattcaattctccagaacaaaagaattccttgatcgcagaataaaccgaatctcctaccacatcccagtattgacgaaagaaacatcccgaatatccatccgggcctggggatttaagatgatgtagcatgaaaaccgttcttctaacttcttccatcgaaggaataaaactgaattgaagattagtctccaaatttatagattcctcaaataacccatctaaagactcaggaatctcaggtaaatcagaagtgaacaagtttttgaaataatcatttattatacctgagatacgactcttgtcttcccagtaagtcccatggctatcctgaagagcccaaatgtagtttcttcttcttcgaatcatagtggacgaatggaagaactttgagtttcgatcacctagtttcagccaaacctccctagacttctgcctccacatactctcttgtcttctgtattcctcttgtaacatcatgtggagtctttcctcttcaaagatcaagtgttgagaaaagtcttgttgttgaatccacccaatcctagcttcaatcctttgaatgttcttatcacagttgccaaaaacctccttcttccatctttgcagttctcttctagtattggcaatattatggagataattagaaactcctcctagatcactgatccgccaagccctcaaaat

SEQ ID NO: 307108 - DNA, 2456 bp, Cannabis indica
taaatattaaggaaacaccaaaaacaaggctttagaaaaattccccaaaaaacagtaggccgtttttctaaaaacggtaagcgatttttctgggacactgccagggaaaacattagaccgtttctgagaaagcggtctaccgtattctgctgtagaatgccgaaacctcatttcaaaactcaaacttatcctaaatcacctgtaactttccaaaaaacttaaatatactgcaaaagacataaaccaaccaaaattgtatcataaaaccactgaattcaaactcccattgatgagctaagttgtaaactcaaacctagctaatcaacacccgaagctcataaaactaaccgaaacagctccaaacaacataaaataacttaaaaaaatcatcctcaaacttcctaaatttggatagaaccacatgcataaaacttgcatgaaaaacttaacttttaatcttaaaaatcaaagaggaagaagcttgccttgacatagctaacaccacccttggattctatggtgaaaaacccctgaattatggtttgaaatggtgaagaaatttctttgttctcttgatttttctttgggccgaaatgtaggaaagagaaggaaggaaaatgatttacttgaataattttatttgtaattaaaatgtttgttttattgaattattaacagcataaaacctttaagaaaaatctagaaccccactaaaaacaaacttccaataacttaggataaaatgaccattttgcttttttcttcaccttgaagtaacttaattgccttggggtaaaatggtccaaaactataatcccgaataaattcaacattgaagtctaactattttaccctgctaattctaagatattctaccatatttaagtacctttaatggtcaaatcatcgcattctactattacttagcataaactatgaaaaatatgaaatttcatatataacatacataatacaccaaaaattcaaataaatttttgtaattgagaattataattctaaaacctattgctgataataatccctaattatttactatgaggcatataatgataaaagattaaataagtatctaattatatgttaattctcatttaagtgatcattatatatttagtttttaaaaattttgataaagactaacacaggctacaatcacaacatttaatgacatatatattgacttaacttaataatcctagtcattaaggaactaaaacaatgttatcaaaccaactccaatatatactagctccttctacaattaccacatgccatctatattgactacacttaaccctccctattaagggattgaaaaatgtcactaaaccaactccaatactagtccttctacaaactttacaatgacatctatagttgagttgtctacaatcaccaacatgttattttagcagttaatgtgtggctcacaaaaatttcaattttgaaaagttttgatcattcgttcacttcttttaacagaaatagtttgtacactttgatctcaaacttgttataaatttttttggctgaaatttcaaacttgaaatttagtgcgtggagacaataaattaataaattttatgtttgagatggtttgttaggtccatttcatctacaaatttgaatatttcatttgaatattgtgcttttgagtaaataaggggtaagaagagaggaaccatgtacttgttctgtcataaatactcccaattcaatttattccaccataacatatgtggtgtcatcacaacaataactatttaattaaattatttatttatttttattttttgaaaaatatattatttactatatattacagtgtgtgatatattgtgatatgctttaatttcagtcataagtttgatgaatattgaagttgttggacaatgattggacagtgacaccaccaaacctactactactactacctttggacctcttctcccttttgtttgttttatattcaagcaaaaaaaagctaatattgtacaaataggacattagcctatgagattttgaattgggcatttggtggtggtattgattttgatacctttctttctattcaaaatgaaactttaaggcatctggccaaaatcgtaactaatatcaaagtagaaaaagaatcaaataccttaagtctcattttatctagtttttattaaaatttatattgatttcttagtcgccactaattttcgttacactaataaaattattggttttcttgcaattaaagttgtttgaactagcgtttagttgggaagaatgaaaatatagaaatcagaatcagaataagaatgaaaatagaaatggaatggaataaaatttaaaattcttaaaaaaaaaataataaaaaaattattaaattagtgacgcccccgcttcaagcctccattgagtccttccaccaacggaataatggctct

SEQ ID NO: 307109 - DNA, 1771 bp, Cannabis indica
gttaacatctcccctcaaacaaagaggtgtatcagaaattttgagtttggttattaagtaggtgaatttatcagtggacagtgatttggttagagcatctgtaacttggtcaaatgttaggacctatcttaccaagagttgattggacaagacaagatccctaacaaagtgtaaatcaatctcaatgtgtttggatcggcatgaaacacagggtttgctgctatggcagaaccactttgattgtccacccacacaattggacactgagaattggttaaatgtagttcaaagaggagtgagaccaaccacttaacctctgttgcaacattggcaagagcgcgaaattcactttcagagctagaccttgccaccacttgttgtttcttagctggccaggataccagattacccctaaaatacataacatatccccagtgcttcttctaacatcaacacatgaagcccagtcagcatcagaatagccttctaatgtcaaactggcagctggtgtaagatgaagaccatgcatgattgtccctttcaaatatctcattagtcttttacatgcctcccaatgagtggcagttagagcatgtatgaattggcttagtttgttgataatgaaagcaacattagggccttgtaggagttagatattgtaataccccccaaagtgcttctatacaaggtcttgtcttcaaatggttcaccctctgtgagagcacaatttgatgctagaacttgtgggatttggagagagtttggcaccttccatgttgagcttgacaaggagatttgttatatatttggtctgtgagagatacattcttgttttatcgctaaatatttccactctaaggaaatagtgaataggccctaagtctttcaaggagaaagacttgtttagatctgaaataaacctatctatgagttgaacgcatggacttgtgaccaaaaagtcatccacatatactataagaatgataagatcagttcccgagccataggtgaataaagagttgccagactttgaagcgctaaatcctcattgcataagtgtgtctttaagtatctgattccaagcttgaggggcttgttttaatccatataaagctttgtgtaattaacacacataagtaggttgatatggatccacaaatcctttaagttaatgcatgaacacagtctcatgaagagtgccattcagaaacgcgtgctcacatctaatttcttaaaagtccaattaaaagatacaactaaagtaataattctgaccatagctagtttgacaacacgcaaaaatgtttcatcataatcgattctaagtgtttggaagtagccttttgcaataagtgtagattttaatctgcccaatgaaccatttgaattaagtttcactttgtgaagccatttattcccaatagcaaccatgtcaggtgtataaggaactaatgtccatgtacctgccttcttaagagcatagaactcttattgcatagactaaagccattggggatgtttaagagcagtagcagtgttcctaggctcagatggaatgaaagcttctagtaaagggtattttgtggccaagggaacttttcatttggttattccactaagagatcttgtccttattatgtgagttcgagttggagcatcaagtctcttgtagattgtgaagggacaaaaggtgttgcaggttgttcattcatggagggtgtaacgtccccgcttcaagcctccattgggcccttacacccacggaatgaat

SEQ ID NO: 307110 - DNA, 1108 bp, Cannabis indica
ttatttttgaggtcaaacaacatccaatccgcacaagtgcggattttagatttttcaatccaatccaatccgcacaagtgcggatatccgcattttgcggattggattggattggatcggatactttgtgaacacccctagacctaaaatatccaaagctaaattgagaaaaatattttgttgtgaataaaaacgcaatagataaacattattagctcgagaaaagcaagataaaatggcataacagtaaatatatatatatatattagcaatgttgaccatcaataaagcaaagtttaaatattacaaaatgccacaaggggcaaacaactgtctcgacctaaaagtccattgctcaaaagataaaataatgaaaactaaatctacattattggagatttagtagggacttcttcttcaatatccttggcatccttggcttcatccttttatattttatcgcaaaaagcaagcatctctcggctccctcccccagaaagcttaagtccatgtttggattttttatccatgctcgataaatagatcgcttggcgatcaaatttatcctagctatggcattgtcctcgacatcttcaagctttttgttggcttcgtcaagcacctccccggtcttctggtgagccccagtgagatcctcagcttgttttttggcagattcaagttcagtcttgagggttttctcctttttctcttgttcttcaacttgcttcttctacagagaaatctcactttgagaattattccattgcctcgcaacaacttcacattgttcattagacttgcgaagttttgtttctagctagttgattttttaaaagtccctttgttaagttacaaaagacagatgagatgcctgcaaaaagcgaagtcagcaggataggacatgaaaagaaatattatatgtgaatacaaaatgaagaaaaactaactgagtgcatgagatcataactccttgtcacgagactttgaaagtcacccttattaatcaagtcccagtcaccttgcttaaagaacttagcgtgcaacgagcatatataattaggaattttgccccttgaactttgacatgtgccaaatcatgctctct

SEQ ID NO: 307111 - DNA, 1586 bp, Cannabis indica
tgtattgaatatttgtaacttgtgttctgaatttgttactttctttttggtagatatggcttgtaggctcagagacctagttagaaggcctttaggcgaggcttcaggttgccttagggctaaggtggtccggaccacctgctccggtgatgctataggatcttctcttcctccgcctcctcttgggcctacaccaactgggtagcccatgatcgttcaccctccattgatgaagacttagtctttgggaaaaggtgcccagaggcctagctgaggggcggattcagccatggggcagagagccatagaggcagctcgtaggcatatggacagagtcttacccaccgtcgatgatgagcttcggaagatcagtgatggtaaaccagattagctgtcttctagcggtctccaggacttggccttagtaagttgcacatttaactttgctcacttttttgtgttattgaaggttggctggccatagggagctgttgtgcagagttggccgaccagtgttgtgttcttgagaagctcgctgaccctataagcaccctagaggaactggctgactagacatttcttttggcaataacttgactttattttgtttcgtttttaggcctttctaaagtttagccttaccgattcagaggctcttgtccaacagaagctggacatgttttttgatttggagtgcatgctcaacactaggaactaagagaataacacatttgatgctgacgtctccaggctagaggtaaaactcaggagaagtaatgatgaactgaagctcagtagagaagaactgaagcttccccttgatggccagcaggccataaggaacgagtatgcttatctttggagatcatctatgagatcaagctgcacaatcctagggtttatatttcctacatgggagcctctttccttaagagcacgctggctcaggggaaaaagttgtatgagagcaggatgaagacagaccagaccatcgtctagctagaaggatcatcaccagggcaatataatgaggccatggtcgacacaccctttgaggaggtggctggccagcctgtagaggccatggtcggcccactctttggcaatctgaacactacagcttctgactcagctccacctgcacctacacgcgagtagcttcactttattagtattgggctttgtgccctaaataaaagtctatttcaatgtaatcttttctattcaattatcaataaagaaatagatttaatcttattacttgtttaatgtgttatttggttcatgtgatcatttatttacttatttgattaataaatttatctaaatccttatcacactgataatattgtatattgtattgtcaacacagtggaaagtaatcaagattgtgtgatcaaatgtattcctagatttatcagtacacagggtttaactgatatgataatctacaacgtagtctacttgcaccttggataagtgctatgtcctttccagggcattcgttaaagtaagcttgggttggatgtgtgacagtcagtagtcccgggatccgtaaggggaaacaccgggtaagctgtgcaatc

SEQ ID NO: 307112 - DNA, 1227 bp, Cannabis indica
actacgtttgaaatacttgcagcctttgtttggaaagcaaggttgagagccttagagctcaaccatgatggaaaaacatgtctatacttcgccacagggctaaggaagttgatagaccctcctctacctgaagggtattatggaaatgcatttttgacatctgcagtggaactcactggtagagaactcgaagaaaaatctttatctgaaatagtcaatatgataaaagagaagaagaaggacgttttggacaacaactacatcaaaaaatctattgatatttgtgaaacaaaattagcccacggtgataatccaaagattaaagctacaggagcactcatggcattaactgattggaggaatttggggttggtttcagatgagtttggatcaggatggaacattgagaatgtaacgtcgttgccatgggactgttttggatcagtagatttgtgcactttcttgcctgctccaaaatctgatccttcattgaaaggtggagttgggatattggtctctcttccaagactagccatgcctaaattcaagcaagagattgatactcttaactaatgcttcttaattgttaagcttgatttgttattaataatttattgtttgaaagataagttttataatagctcgatgacacatatatatgtgtattaatatagtataaattttcatatacattaaaaatcataatgtactaataattaagatataataataaagcatttgcttactttgtgaacttcttttggccaaattttataccagccgcaggttatcattccatcgcatggactgtcttgttcattgacatgtgttagggttgaagattgagtattttcatgttaattatattttgttatatgtttttacgttgttattaatttatttattttacatttcaatgtttttatttttggtaagatgatgttttaaatggtgttgaagttgttggtgcaaaaaatgaagatagagttgaaactattgggttaaatgacaatattcaagctaaacaagttatattttatttcatctataaattattttaatattgtttacggctcagttttcaatatacttatttctatgattattttatttgtaaaccagtattattagggtttctgatttattgtgtttattaagattttaaattttaatttttttttgggttatatattgaaatatgatgctctccaagatagagggcggggg

SEQ ID NO: 307113 - DNA, 1948 bp, Cannabis indica
aattttttttttcacaatctcataagttataattatttgatttaaatttttagaaaattctgaaaaatttatagtgttaaaaattaaatttaaatacttatttattacgtgtacaaaaaaaaataaattaatttaaaaaaattttaaaaaattatacattatcgtagataattataatattaccattataaaaaaaatagattattatttttttaatgctaaaataaataaaaaatctatcaaaactttcactatataattattaaaaaaataattgattaaataaattctgaataaaaaaaaaagggagtttgaagtgtgggtagtgagacttgttgaagggaatccagtatagcaaatgaggaaaggacacgcaattgtcacatgcttcacctataaggcaagtaaagtagttgtgggacccaatccaagtacaattatattaattaattaatctcatttgtgcaattgtttttccaaaactacgttttgtcgttttatgttttgattttcaggctctttggaattggagagagagattagacattgagatgatggtcttctcttctcagttcctccctctattccctattccctacccattgaccagccccagctcaccctcacaagccaatcagctttttcagaaacataatcaacttcttatcatttttctttggatttcactctttttggcctcgtttataatattatattatattaaattagattatatagcatatttttatataatattatttttagttttaatttatattaaaatattatatatttaagtgtttataaaaattaatattatatataatttttcgtataaaatacaatttaatgtaatactatataatataatacgatgtaatacgacatactaaacaaattctttatgcattgagcaccactagtgatacttacattcattaataatattctctacaattatttagttaagttacatgaactttaatttttaatttttttttataaatataaagtaatatttatttaattactaaaattttattgtagaattaaactcgatttttaattaaattaatagcgacatgacattgagaaaaatactaaatactattagtatcttttaaacaatagtagtgactaatattatttataagtggtttattttaattagttaattatatttttaaaagattattttattagttgaaggtgctaggaccactactagtatttatcttattaaggtatctcaaatgctgaaatttaaatttggtattgaacttataccaaatgacttattataaagccatctccaataaaacgacagaaactcatatgtatattgttatttttcctctaaaatgctttaactatacagcaaaaagccaacctattttcacgaggctttacagtgttccactaataataatagatattgtagaccacgacataatttttttaataattaaataattcatcttaatatttactagatttgataaatatttaatattaaattatttttattatactaataaaataatataataataataattatacctttaagtattgttgttggaatgaaaaaaaaaatagtactgaaatagtacttttttggtgtgaatttaatactaaatatgggttttaccattagagatggtctaacactaattattttttctattccaaccactaaaaattccactaaaaaatatattcttcattactatattatctatttattatttcacattataatatataaatacaaattatatatgcattatttaaatatcaaaagtcattgaaattttctaccttagtctacattagacaacttattataagattaaatttacttagaatgtatttatctcaacatatttaagtatttagaggtcattattggagttggccttaacatttctcttacgcattaattctt

SEQ ID NO: 307114 - DNA, 1065 bp, Cannabis indica
tctctctctctctctcttgtcaccacaacaattttctttattagctgcggacccaatatcgacggaccaaatccgtccctattaatgggattattattgacagagtttgggggccgtcggtattatttgtgtaataaattaaaataaacaaaatgaatgcaatagtggcaggctaaggttaataccagcgggtatccaccgttaataatagtaatggtggggcatatttccgtcagtaaacagaattctatatataccccccacgaaccggtttctctattttttttcatttcccaactttatttcatttaaaatttttctctttcactactgtctctttcaccatttcaccactattgctccaccatttcattaagggaacaccaccagacgtcagatatttcttcaaactggctagtttcaatataggttaatataatattcaattttttatatttaaatatatgtgtgtactattatatatttataaggttttttcatgatgtaattttttttttattatttttagatttaaaatgcgggagtttaaatttcggcttgaataagatcaaaaagttttacttgtgtaaggtatgtttatattttttttataaatcgtaaatattttaaatatatactatagttctaatttaaatttgaaatatatattatttttaagatttttagattcatttagatatataatgtatatatatttttgtttttataaataatatataattttttttattctgtttatatataatatataaatttttattgtgtttatatatataatatatattttttattttatttttatatatacacatatattaattttatgtatatataattatatttgaatttatttatttatatatatttttttgttatgtattgttttttttatatataattttatttctataattgaaaatattttatttttgttattttcagattgggcaaaaagtatttttctatttatgtttacaattttttttgtgaaatgtattgtttttgttaatttccatttttggcatatttaattgacaaaaatat

SEQ ID NO: 307115 - DNA, 1034 bp, Cannabis indica
ataacattaaaggatatgttttctagagcttaccaaaaaggaagaactaaatgactatttaactagataacaaaaagaaaagaagcagagtctttgttttctaggactttagaggactcttattagtagtcctatgttctgtatattgatttggcatgttgtaatgagcctaaattcataattctgtcataattaacatgaattcccttactcaaatttaaaactccttgtgagactttacttttattacttgcatgtttaattcaattttggggatgagatatggctggttaggactgtgctctatcatctgttgtgccatatttaattcacaaatcctagaagaagaaaataataatagagcaaagtttcatgtgctataaaagaagggtgggggttgccatcaacagtgaggatcagataggaagaaagagaatttaaagctaatattgtgggtggtcagtggtctagtatggggtattgatttgggcaatcttccacatttgacactttcaagcaattgttatgaagtggtgaaatatatgtgctattttatttacttttgttaataggaatgcaaatgttattgctataagaagaaaatgagactagttgcttttattcaatgttataaaataaatggattagatgtataaaaaagatttagtaactaattgatttagagtaagctcatgtgtcaaaacttcaattaaaagtagtgatagcaataacttaatagtaatacacttctacctaagaaaagaggttccgattccgaattccaattcccttctatcatatataaaaaacaaagctatgtaaaatataaatatttatcagttgtaacattttagtagtcaaagtcaaagatgcattttcaaaagaaaaatactaaagttgttaattgatattattttgaggaatgctaatgtcaatttcctgttacaatttcttagtcaaccttcacgctcgaaaacacatattagaataattttttttttctacggggtgttcgttatgcttacaactatcat

SEQ ID NO: 307116 - DNA, 1631 bp, Cannabis indica
tatacgtgcctcgcacgttaatttttgctagtatatatatatatatagatctttcaatctaatcttatctttaaaatacttgaattgagtaggaaaaaaaagaatttagttaaaaatatcaacaagttatttttgaagccacatgaattgtctttataattcctagttgaatcttagctcttaccaagtggccatatatctctatgtgcttggttctttcgtagaaaactaaattagcagcaatgtgtgggctgatttgtttttgtaattaatgaatgtatcaatttttctaaataaaacaaaacaaataattataatcaattctcgtaggaatgttattctactttcgctataaaaaaatcttatttttagtcacagtaaaacttgtgattaaaagtaaaaaagttgtgactaaaaagttcgtgattaaaagtattagttacaaaaatcacaatttgttgtaactaaatgtatttttagtattgtgactaaaactaaattagtgacaacttgtatctaaatactatgttaatttaatcacaagtaaattttttgttgtgactaaaagtcacattaatttagtaacaaatttttttgttgcgatttcttttttttttttatagtgtttatcattatattacttgattcaattacttatacttgcgtatcaattttaccgaacaaacattataacctcactctcatgataaatgcctgaacaccactaaatactaacacaaattcctctttacaattgctcacaccaaactctatcatgtatcgttggattttctttgataaaatcattaacaatctgtttttcttatgtcttgaatttatacattatatataactataggtatattattagtcactttttattctcacaaaaccagattatttctaaccttccatatttgatagaccactgcagcaatggtcatggccaaaaacctaattttgaataagaggagacaaaacaaatctatctatccatttcaacaaataattcagttttacatttggagatttccatctcattctttaatgccaagtagacacatttgactataataataaaaaaaaattaaaataaattgataataatgtattactctaattaaattaatgattaattacatattattaaatcaaatatatatatatcaagatatgtataagaatatattttataaaatatcttgatatatatgatgatattacatatgtatgtgtgaagcaaaaaataaacatttttttttgaggtggtgggggcattttatctatgtagataattaattaattaattaatggaaaagtacagtagtttaatcaaacaacaaaaaagtcttgaaattgactaattaagtatatatcatcactacacacactaatattactagtactcattattaattttcatagcttcatctacaagttttgatctacaaattaatttttcagtttataaatatacttactgagactatacacacatatatatatatatatatcaagttgatcagaattaatacaagataatcttcataaaacaaaagctaacttagcacaattccttctaagaatatatctatttatagtacattaataataacatttatatatatagc

SEQ ID NO: 307117 - DNA, 2470 bp, Cannabis indica
cgtgccatgtcaggtcataaaaatataaaggttagtgtcgtatcaacaattttataggatagtcttaggattctcgtgacgtacatagatttgtgtcgtgcgggccaacccaactcttttttatagaacagcccgttttcttataaaccatgctagttttgtgttgtgtcaaaaaatctcacccatttttaacgtgatcttgcattgtctcgtaaaagtgtgattttatttaggtaaaattatatcaaatacatgtttaacaatgatttccaagttctacgattatttgcgatgaaaatagaaggaaaaaaattgagaaagcatagataagtttgaagtatgtattaccaaaacttttatccaattttattgcacaccgtccatcattaagcatcgttgtttgctaaaaaaatctaatttttgtggcaccattattaatgcatcgatttagtatcttgttgccagattaaattttcacaagatcatcattaagcattaattttaatttgttttttgcgaaaaatttcatgatactattattacgcattacttaatgaggcattacctagcaatggtcttctgaaaacttcatttttgatataaaatttgatgttaaattagtaattgatggtactttaacaatattatagcgatgctattatgaaagtatgattttttaggcaaaaaacaatgtcaaatcaatgcttaacgacagaatttagagatagtctacgatggtttgcgatgaaatttgtaaaaacaaactttggtaaagcacatattttcattatttatgtgtttattttgagtagcattaaacataaaatcttttttttaaaaaaaaaaaacaatatatatattctatatacactctaactaaagtttaggttctatacaatcttaatcaatttatagatcttgatagttatactgaaattcgaaaagaaaaaataatcatttgaaactggcattaaattaaatattgtagtttatcaaaaaaagagttaaatattattgatgtagtcaaagtttttatcaaattttagcgcagatcaacgctatatataaactattattaaaggtcaagtttttattggaccattaataaacctcataaatcagttgttatttccttaacaaaaaagaaaaaagaagtttataataacaatgactaacgttggcaatagaaaataaatatatggtattgattggcataatacctcaaataattctccatgctaatacacgaccacaagaaatgtacggcatcattatatatttatataatcctattaattcagtgtaatgactgaagaattaagcactaatattgctgtatgtacagtatggcattggcttaaataaatcaattcaattgaataagaaccgatacatcgaattacaatcaactgttaaatattagatattcaattgtgattggattagattagatgttatttttaaatatttaatggtgaatggagtattcaaaagtctaatacatctaatatctaatcgaactaattagtatttttattttatttgaatgagtaattagattttatattgttatacgtaaaatctatatgtatatatgaaaattaacattaaaatttactcttttattcttggattgatagatccaatctaattcaatacatactggacttaaaatattagatatatctataaaatctaaaacattagataaaccgatctaatctaatattcaatgaatattagatcgattgaatgactgaaattaattgaatagaatcgaatggtaaaatttaacatctaattaaatcagatataaacctaaaaatattaaatgtaggccaataaatctaattaataagtagcagatctgcagttaatatattaactaatctctctcctataataataaagtcttcttcttctagaacatgtagctagctagctagccagcggagcaaggaccaaagtggccatagacttgcgccataatattctgaggagagccgaacaaagacacatatatatcacattgttcattgtattgtctatgttttttactcctccttcttttagaaatatataccataaaaattctaaaaaagaaaaaagaattttattcctcccccttcaccatgatggaataactcgctagagtcgagatatctcagcttagatctgagcaaatcctaaatccttcaagacaaatgaattctatatcctttctccatttgtcatgagctttaaaaccaatagctcaactctctcaaaaaccaccgtcagatggtggctctgccactgtctgtcgttggagcttcggcgtggctttggccgatgttggaaatattgtgaatattttaacaaaatatataagtgtcttagtgtgtgtgacttggaaagagtcccacatgggatatgaaccctcattgacaagggtataaagagtgcaactttggcatttgggtttgggccc

SEQ ID NO: 307118 - DNA, 1122 bp, Cannabis indica
gaggagtattcctccagcctgctgaagatgttcagcgtagaatatgacaagaagctctgccatcaccttctgactttacctcgccttataaaaagcaggttgattcgggcaggtgacaagctaaaggcggacaggttatacttcgtacatgctggggatgatgctaggtctggccatactcctttgtaggcgcgtgagggagatgcggcggcagaggaggtggtcacagatgttgtggatgatgtttttgcaggtcatcggcagtcacatgctgtgggtgagtccttaggggttcgttccttaggtaggaagttagtcgcgccggcagtacatcagtcagagcccattcgcactagaccttctcctaagggtctgttggccaagaccaagagttttctcaaaaataacattagtggatggccttcagctagctcatcgttagggtgtccttctaatgcagagggaatagttagctcagggctttggaattctatgccctttggcccatccccggacctgtctcaagtgggtgctagtagtggttcctcacccgttgccaccattccaactcaatctcctgctcactctgggtcgcccatgggcccaactaatttagggagggtggatccctcggttctccctcctactgatgaagggatgatatctagatcgtggcgcccgaaagagaagacaaggggtgtcccaggcaattgaggcatcgagttccctctcctcaagtggtccaggacgacctcaatgcacccaatcgtcctaagggcactccctcatctgctttcactgatgcagggagcgaacaccttatggaggatgatctctaggtgatttactctcatcaccagggttttcccttaatacacgagcaacaagggtattatgacccctcccattttcttgtcaggccaccatgcgcctgcggcctcctacctgccttctcacgctaatactcaagatctttactctaatcacacttctaccttcggtgagggtggttcgggcacgacaccttaatttgtgccagagaacctgtaatatcctgataagcctaataataaataattatggtttatatttatattatgggttaatcaggtaataagtggg

SEQ ID NO: 307119 - DNA, 1854 bp, Cannabis indica
tcatttaaagtgacttttttcaacatttcttaaccgtcatttaaagtaactttttgccacagttgtaagctgtcatttaaagtttcgcatttttatgacacccacatagccaacggttttaggaaccgttgggaaatcatataaaagatagttataaaccgttggtaatagccctttttgtagtagtgttcgtttagaccttctgaatctctaattacatattatcttttactttaaattattcattttcacccattcgcgggattctgaagatttctagatatcttttgaggttttgaacttgtgggtttgggaattttattcttgaatgaaatttcttctttttgtctttaatctgtctggtcggcatactaaacttgtttttaatcttccatccgtccaactatcattttcttgtctcccatctttttgaggatgaaccctggtgataacaggggaggcaagcaccatatcgaccagtatctactccagctcttgtacaaacatcaccctcaactccatgcaagtttattagggaattaaagaaaggttagaagtgttatctttctacttcttcgacgtacattgtccatcccagagttactaaaacgctgcttgaagcttgcccagctctatctattaagggagctgctgttgttgagtttttcgtgacagtttaaggcacactatcatattaaagccctacccaaacatagaatgatggcacagacaaagtagactatgaggaaagcttctgaggctgacttagactttgcttggttgtttgttgtagttggtgtggagcaagctacaccttcgactgaggaaggagaaattgttaatggggactttgaactccaagaggtggaggaccagggcagggtctgtcctactaatcctcctgaggttgagggaggagtagaggaaaagggggaggaagtttgagtacttccttttggtggttataataaggatggagaacctatctttgaggagggtaaagttctagtagcttgtcggggctatgttgaagaggaatacactgaggcccgacccataaacaattgaggtctaaggggtgctcggtgggtctcaccaccatccgtcctaacctttaagatattaagcaatctttttgaggaaggtctccttagaaaagttgaggcctttctccctaatcccatatagatggtgacaaatcctagagatggattttgtgcgtggttggggcctcatgctaagcagggtactataattccattgcatccttatttcaaggagatagcaaattattaccacatttgtccaacccacttaactccttaatgcataatgtacatgtctgccatgttcatgttgtatgcttcccaaggatagggtaagtcatccgcccacgacatcaattggatgtttgacttgaagtccagcccaagtaaaattgttttgggtacttttacttatctcaaattgaggagaaatggctgcccgttactacgaacatggacgtgtccaaatatggtagatttttaaaggattattacttttaaaaggacatggggacaaactatactagctttcagcacattcaatcctactactgaccctctttcaccttggaacttaggagcaaggcccagaagatactctaactttttttagaggctcggaacaccccactattgaccactgaggctttttcattaagtacgacttttattcgtccgatgaagtccaggaggccagaaaagggattgaagaggttgtacccatacaggaagtatagattgcaccagagcaggaagctccaaagaagaagaataagaaggtgttggaagttattttaccaggatctta

SEQ ID NO: 307120 - DNA, 1375 bp, Cannabis indica
ttcctcaaattctaacaggcctctttctctttttcaaaaaaaaaaaaatataataattgaaaataatattataaaataaataaaaaattaaatgggtccctgttggggtggggtgctatccccattcctgcccttttaacattcgaggatagaaagttgtgcatgttcccgtactcaggggtgcaattctgctttactaatatccataatctcctaattttaaaagttgagaattgagaattttcacatttggtgaatattgaagctgtgaccattttgactaatttttacaattcagaaaagagatattgtcgcatttggagaaatatttaagctgtgacaattttgactctgatttttcaactttggcaatatatcctctaatattgttgaaagacgggattctctcctagtttgtactttgtagtgattttatctttccatttaaatgtattttcaaatgaagagatgaaatggtagaaattcttgaatgacgctgtttccccctatttttgtgtggagaaaagtcaccataaatgcttgtataacaaaactcagcatggtttttgtatttctttctttttttttcctttttttttttgttggctctcttttctctaagttgaaaaagcataattttgttctctgccaggtatcactggttgtccactgcaggcatatattttcatgggaccaatttactatcagaagctaaagcatatggtgagatttcattcaagttgttagtttttcaaaagttccacccacttttttttgaattattatttttactacttgtttttataaatttaatgtgcatcattttgaaaatttatcagttatccatcctactttggagctcaaaattgtgtcctggatatggttaatctgatagacacttggtacacaactcagctagagagaaaggaattttattgatcaaagccataaggctggttacaaaaccaaaattatttgagaaacttgaaaactcccaagtgtaatctttactttaaacaatcacaaagtcaatcgccccttatctatggacaaagtctttctatttattggctaagactacaactcctagaaaaatccaggcaataggtattatacaaaatgacagcttaattaaacataaatatttgcttcaattaaacatagcacctcagcacttatctagagtctcatctgatataaaaataactcagtaattgaagctgacttaaggcctaacataatcgaatcaagatctcctgttaaaaagtggtgtgccatgctgtgttaaattaatcaaaatttgacatgtcaactaatttattatttataaaaaaaattaaaacctctaattgaatcaacaaaagtagttaacata

SEQ ID NO: 307121 - DNA, 2641 bp, Cannabis indica
atctaagagtgcttagatctgttgtcttgacagtgttcaagattaggtacattgtgtaaagttgcaaatttatgtagttttgattttgcaaaatctaaactgatgtatataattgaattgattttatagtagttgttattttacctgatttttgggaatccaagcactactcggttggaatgtataattccaatgcagaggaagcttgtaaatctaatgttcattgatttagctttttagtcttaattcttcgtaatattcatttatatgttcaattacttagcttttggatatattagaactttcaaaatatttcactttaatattctattttatagaattattatgattattattctatttttatagtttttcattatcgattgataaaaggactttgataaaacatgtatatatgcttacattggaatatatggtttatgtacaaaatgtgtttgacaaaatgattgagtgaagcatagtgccggaggaactgtgctttgaatgatcttatcaatacaagcaatgagaaaacaaagcttgcaaaagatgcagagcttatgagctgatattgtatttatagagaagaattttacaactaatagcaaagaacagaacaaacaaaaaaaaaaaaaaaacaaaaacaaaacaaaacaaaaaataactaacatgtcagagacagttacaaacagctatctaatgagtaacagaattagctttatcatcccccctcaaacgaaacggtgtggaacacacattgagtttgttcttgagatatgtaaatcgatctttgctaagtgatttggttaaaatatcagtagtttggtcaagagatggcacgtatctgacttaaatctccttggcaagtatttggtctcagatgaaattgagatctatttcattgtgcttgcatcgcgcatgaaataccggattagctgcaagagaggcagccccctgattatctacccaaatgattggtgtggctggtggagatatgtgtaactcagaaagcagagaacataaccaacgaatttctgcagctgtgtttgctaatgatcgaaattcactttctgtgctactacgggaaactacaggttgctttttagcagaccaagagacaagattcccaccaaaatatactgcataacctcctgtggatcttcggtcatcaaggcaactagcccaatccgcatcagaataggcatgcaaactcagatgcagactcggcttgatgtgaagtccttcatagatagtgccttttaagtattgaaacaagcgcttacaagcctcccagtgaaccgtagttggggcatgaatgaactgactcaatttgttgacaatgaaggcaacatccggcctggtgagtgtaagatattgtaatgcccccaaggtacttcgatacaatgtgtgatctgaaaatggttcaccaatctgtagagacagtgtgtgagctgatgatgtaggacttggacttggtttggctccctctaaattgagtttgatgagaagatccgtgatgtacttggactgggataagtataggcctgtgtggttccgaagtacctccactccaagaaaatagtgaagacttccaagatctttcaaggaaaactcagtatttaacgattgaattaaattagtgatgagcttgttgttaggaccggtgacaagtatgtcatcaacgtatactaagagaatgatcaaagagctgccttggccatgaataaacagagacggatcagacctggaagacttgaaaccccttgaaaaaagtgtagcctttagtttgtcattccatgcccttggagcctgtttcaagccatagatggctttgtgtaatttgcacacatgatgagggtatgcagagtcttcgaaacccggtggttgtgtcataaaaactgtctctacaagagtgccatttaagaaggcatttgagacatctaactgcttaatatccctgttgtaaaagactgctggagttaatataattcgaacagtagcagggcgaacaacaggactaaatgtctcttgaaagtcaatgccaggagtttggtgatatcctttagcaactaaacgtgatttgcatcgatcaagactgccatccgcattaagtattacccgatgaacccatttatttcccaccaaattcatggaagaatggtaagggacaagtgtccatgtgccattctttttgagagccaaaacctcagctgacatagatgcattccaaattggatcagctagggcctgtttcaaagtcttgggctcggttggtaatagcgattcaggtaaggaatattttgtagaaaggtatgctttaggtttgtgaacacctgcttttgatctggttatcatggggtgttggttggtgggaggaggaggaacagttggagttatgtgtgtggtatgtggtgtagtgatagaggattggtgaactgtttgggttagttgtgtggtatctgatgttaggctatttttagtctacattttgggtcactttttatagttgttttccttctttgttattctttttggaatagaattacgcttgttttctttgatttcaggtttcacacttggaatatatattaattgatcaaatttcggaaaataacaagctatggaatagagaaaattctgc

SEQ ID NO: 307122 - DNA, 2788 bp, Cannabis indica
aaacttactataaatagaagaagtaacacaaagtcatgaactctattccactcatacaaattacaaaaataacaaatgattgcgttttttttttttttgggaaaaaagtacaaattatgctttcttaatgtacgataagaatattatttatttatttatttattttgagaatgaatattatttattttaaaggacatttttcggcacttactttttttaaataaaaaaatccaaaactaaacacctaaaactcgcaaaacatgaccattattcaaaaacaaaaacttgtttttttatataaacttttaatgcatgggacctaacaaattacacaattaccaaaaaaaacatcaactgtttgttggaaaatataataaaaatttcattaattcattccattatattaagccggaaaattaaataaagggttatttttggtaaaaaatatttaaaaatactataaaaataattaaaaaaaaactatataaaaataataagaaaacaatcaaaagaccatataaaagtaataaaaaaaaacaattaaaaaatcatataaaaataataataaaacaacataaacaactaacaaaaatcaagtaaaacataaaaaaaatcgtatttttcataataaattctaccgtaaaaatatttaaaattttttacaaaatatttttatatattttttataaataattatattaataaaattggacaaaattactcatgttcaaaatagttagaaagaattttgaatgaaagacaaatatattaattagcattacttcacaaaaaaacaaaaatcaagaactaaatttcatgcaccaaaataggaaaaaaaaaaaattaaaagttaaaagatttttatttgattgaaaataaaaataaagactaaccttataacccaataagaatcccaataataaacctctctgaatcttgagccaggaaccataaccaattcaggcagaggaagaagagtatgccgttccggccgccgccacacctcaccggaaactttcctactcaaatttccccaaagtgaatgaatttccaatgcccattttctcacttcttcattcttcaccttaggtaaaaacccttctggctcagccacataatcttctgcttcacagtacaccaaatcttcccctgcaccctcaaaatattcctctatatattccctcaaacccgacccggtttccacgaccagattcaacccggcttcggcaaccttcaaatcggtctttaacgacaaatcaacgtagagtttggggtcaaagtttgacttcccaaatgtttggagtgctgtttcttgaaccctttcgaggaaagtgactaaaggggttgttgggattgttatggggtccgaatctgaactgggtgggaatgagaatttcacggcgacggggtttttcgtcgccggtgacggtaaaggttgggtttttggggtttgggaaatcgtgtgaggataaagattcgaacttgacatttgttttttttttttttttttttttgtagaaaatatggaagaagagaagagattgttggggttttgttttggagatatttggattaattatataatttaggaaaaataataactggctttattaataaagactctaattaaataaagacttggaaaaggtcaaatttgcaaaagaaagtaattataaggccttaatagcaataatctcattattctcgctcatgcatgcaaatacgtacttttttattattgcaaaaaaaactttttttattaattttctttttataaagttagctgttttttttttctcttttaatttttttgccacttcaattttttttttgaaatttttttatattattataaattaacagtaatttacaataatagagaaaatagaataaaaaatttctatcttccataataattagacaatgaatattttttgtaatcaaaataggaaagtcaatattccataataatcttttcttaactaagtcatatgtattattaaattttatacattaattagattaatgacacgatccaaaagtcaccaaattgtgttcacatgattattgattatagttaaaaataatatgacaaatttattaatattgatagaattcgaataaaagaaaaaggtaacctatgactattgactatggctatacctaccattcatggtgattttttttttctttttgtaagcaatacatttatggcttatttatactacaagtccctaagttatataggttttagcaggttggttctcaaattttactttttgacaaattaatcaccaaactatataaattttggcaaaatgatgctcaaactttattttttaacaaattagaccctaaacttttgttttcttggaaaactaatgtcatcactcttaaattatggtattttatttatttagttttgttataattttaaatatttttatattgatatacgtgatcaaattaaaaaaatatatattttttttatttatatgtattttttttaaatatgccaaaataagaagaaaaaaataaatcaaggcattttctttaaacatgccgaaataagatttttttttttatttatatgtacaataaataaataaaatatataaaaataattattttatcaaagtattaaatttttttttttaaaaaaaaatatgaaattatttgaatttgacacaagttgaagagagtgcaaatacatttctattagggttaatttcacaaatgcacaaaaacaacaaaaattcggtttcacagaattttaaacatttttacg

SEQ ID NO: 307123 - DNA, 2930 bp, Cannabis indica
taatattaggtgaagaagataataaaactttacaatcgttagtaatcaaactaaacacagaagacatttgttgcttgctaaagattgcttgaacaatgagaaaactatcagtttccacctcgactgtgttccagcctttgccctttaaccagctaagagcctcctttacccttaaagcttcaacgatctcagctgtgtatgacccgtggtaatatttggcaacaaagtcaataactttaccgttcgaatcacgagcaacaacaccgaacccataggcattttccttctcaaataatgcaccatcaactgctctccacatgaagttcttcactttaggtggtatcttaagatgccaaagtttgtaccagaacccagagttattctcaccaggttgtgtgtgtctctgaagttgcatcatggaataggcaaatttaactgagtagtagcctgttctttcaccagtccacgaccaacaatcttcaacagcagctggactaaggggaattccaaggattaaagatgcatcccgaatattaaagatgtccttgaaagagagacatctcagcttctgttatgaatgtcaaagagtgagctaaccgtgtgatcatcgagtcccgttctagtggtggatacgtatgggttgatgggattagggagccaaggttgtttgagaatgctagttgaagttcctgtgccaatagttcttctggccccaaggcaaaccaagtgttgtgcactccatatatacgtcagacaaagctaggattattacccaattcagcattaaggaaatcggttcgagagtagtactttgctttatagacctggctagcaagagaagatgatgaacataaaagtctccaaccttggttagccaacatagcaatgttgaaatcatggagatgacgaaagcccatacccccaaaatacttgggagcagccatacgatcccaagacatccatatgattccttggccattggagctttttattttccaccagaaatttgccataattttctcaagatcttggcaaatgcccaacggaatgaggaacacactcatagcataagttggaagggattggatgacagttttgagcaaaatttctttaccagcacgagaaagaaatttgtcatcccaactatttatccagttaatgatcttgttcttaagaaacccaaggataacagtttttttccttccaataatatttggtaaccccaaatagaaagagccatcagtagcttcaggcattccaagagttgagcaaatttgatctttggccgcaatctcagtattgggactgaaaaaaaaaactgaagacttggtagcattaactcgttgtccagaagtaagctcgaacgaatggagaagcatgttcatactcacagcagcaccatatgcggcttgatagaagagataactatcatcagcaaataacttatgtgcaatagaaggagccccattagccacacgacagccttgtattattctgtcaacttcatattttttgattaaagctgaaaaaacttctacacagatgataaataaataagttgacagcggatcacccagacgaatcccacgagaaggagtaataggacccgtaaataaccactgtgaataacagaatatctaacagaggtgacacactatataatgagattgatccatttgctagcaaatcccattcggtacatgacaactttcaaatagtcccactcaactcaatcataagccttactcatgtcaagtttcaaggccatgaaaccttttttgcctcttcttttctgttttaggtagtgcataatctcaaaagcaaccataatgttatcagaaatgagtctgcttgggataaaggcaccttgggtggaagagatgatatgatcgatcatgcctctcatcccgtttgcaagaacttttgccacaactttataagaaaaattacacaaggcaataggacgcagatcacccatagttgtgaaattattctttttcgagatcagcactagatgagtatcattaattctggggggtagctcctcaatttcaaagaaatcataaacaaactgcacatgaatatcagggccaacaacatcctaatgttgctggtaaaacccgggacccataccatcaagacttggggccttgtcaagatgcatttgaaagagagcttgcttaatctcttcaggtgtaactagctgtagaagaacatcattatgataattagaaacagagcaatttatacctcccaccacagagtcacaattagtgccttcagcattataaagagatgagaagtattcaacaagaacatgatcaagacccgaagaccaatccttccactctccattagcaatttttaattggacaattttgttactgcactttcgagcactggcagtatcatgaaaatatttgctatttttgtcacccgcatggagccaaaattgcttcgatcgttgcttctaataaatttcttgttgagctaagatctcaaagtaattacactgttcagcagagaaatcttgagtagaggaagacaaactagccgattttaaatgagtcattctcttcttgcttttattcaaacgttgcttttcataacttgttacgaaatttataaaacaatacgcaagtgcacgtaatcaagtagtaaactcacacgagtgaggtcgaaccacaaggaattgaactgaataccattaaattagatttatgattctatttggcaaaccaatagttttcgagattttaaacataataaaaattcaagaaacttaaagaaacaagtaaggattaatcaagatgagaagatagggaagagaatcctgttgttttgtttacccaattgttaatgcctaattgctatccttttcttgatgtgaatgacagattataaatttaacctaactcttttcagatctt

SEQ ID NO: 307124 - DNA, 2094 bp, Cannabis indica
ttttttttgttcagagtctgagttttggatctgccaactcagaccattgtactttaaagttgcttatttgagtttctcaattagcaaaactttctttttctttgaggaagcatagaaggtggtgctgatgttattccaatccattacttttgtgatgagtgggttgggggacacaatgattccttcattatacgcaacgtgtaatatttgaatggttttatgcatattatctttgaaagcagcctttgtgtccatggtttctatagttttgataaaattttcagtgtaaaagtgatgggctattggtatgtcattgtctgacaacaataagatgtagttgttggaaatggtttgattgcttgagttaactgagtaaaccatatttgttaatatgttgcccattagttttaaatggactacatatcaaagaagttgaagaatctttttccttttttaagtgtttcacataggtaatctaagcacttgtgtattctgtatattgggaggtctttttttacctttgttataatttctttttctaccctgcaggtgtttgctgtggctatgcttggtatttttccgttagtacctaaatttctttcccatagggcatatcgtctttcatttatgggaacagcatgttcctctctgtactctttgtactcactatacggggtaagtgtcacatttaacacctttgtaagcatttctttaatgacactgtttattgtttgctttaacatatgcttgttttttattgtttcagaaaccaagggcttggaacctaccagctttgcaagtttacttccagtccataattgcgacaaaggattttatctactttatttactgtcttagttttgtctcatcacaactttgccttaaatgtgagcacgtggtcttttatatcgtattatcaaattgtcctagtaggttcatatttccactttagagtcatctccaaattgtgcaaatattgatgtttcgatatctgttgcagttgctctgattccaattttatgtcgagctcttgaacatgttaccaaattccttaggcgcaacttcagtcgatcctccttttacaggtagaacaaaaagtactaacattttttgattataatttaattttggactttgggctatattctacaacatttcaggattcttaggtgtaatttcagtgtaaggattcttggtaattattcatttatctcccggactactacatgatctgaaagattgaagattcattttactatgcatgacacgagtcattctcttcatgaacaaaaggcctgctgatatttgtcattactatggattttctaagaaacttacttgtattatgaataaccaatgttgtttgcttgcaggaagtacttggaagatctttgtgtttgggtggattcaaacataacaactctcagcatactctcttcacaggctgagattggacttggctttcttttaatcctatctctttttctcgtgagttccttcatcttcctccacatattgatgcggaatcaccctaaacattcctttgtccttactccttatatcgacttacaagtattcttaaacttcactgattgcaggtggcaacgaaacattatacaaacattcatgtactggcaggttagatccaattccttgatcacctgttgagacacggaaagaaaccgtgttatcatgtctgttttggccttttatatttataaatgcagcatggtttgttttcccgtagttgaatctagaaaaacgatcctcattcgggttactttgttgttgcagcttctgaaactgatgtaccaggcccctgtgactgctgggtaccatcaaagtgtatggaataagattggattgactgttaatccactgatccagcggtatgccccattcctaaattctccactttccgctgctcagaggtggtggttcaggtagacaagacactctttgagattaagaagagacggatatctctgaggatttctttggattagttttactatataagcaaaaattacattttcagatatatatatgaatgaccaaatgaccatttttgtttagatatggttacagtttttt

SEQ ID NO: 307125 - DNA, 3043 bp, Cannabis indica
aggatgtgaatttattacattacacaacaaaacaaaaaaaaaaaaaaccaaaacaagattaaaattatctatgtatactattaaatttttccattaataataaatatggcactatgatacactttttttttagagaaacactatgatacacttaatgatttttatttatgagcattgtcttttataaataataatattaataataaaaataaataatagtaatagttatagcactaaaacaaggtaaaatgaacccacataataatatgcaacaggagttaaactatacatttaaataagaaaaatccttttgaagacttataaattatcattattatttgattaactgagacttataaattaaaataagggaaagtaaacccagaagtcatttttttaatccttttccttttctccctctccaattccattttggggaaacccgcagtgctttctccggcaaagctattgtttttcctattaaattccacaaaaccttaacttcttcatcctccgccgcaccacttccttgctgtttatctgctcttcatagctattaaggtatcttagtttagttactgtttatttttcatttctatatgtgttccgattagaaattttaaaaatgtaagtactgagcagattcgtgaaaatgaaatcatggtcgccattcttaaatttcttatcgaatctcaattatttgtttgctatcaataccacgtattattttgctcttctcgtttcggaaagtattatgtatataaatgtaaacaatttagccaaaatccagacacatagcttcgcccctgtttgcttgtgaagtttctttctgaaaattgaggagaacatggtttcttgattatttgttatttttatgataacgggataaccattttaatttattgttgaagtttttgtttgaaatctttaagatttggttctttatgttttttggaatatatataatgtataaactaaattatgatcttaaattatttcttgttagtaggaatagttatatatatattatataccgattattattttgaatgaagtctgattgttggaataaatgaacaatttttcccctaattgccacatgagatgctgcattattctacctatatttcccttaactgcattatttaacctatacattcagctacactcactcactcacacacacacatacacaaaaaaaagttaagattatttggatcacttgatactattgaatttgtgactacagttttgtatggtttgtggatttctatgataatctacatctaacaccttcattttctagtacataaggccttagcttttcgtgtacgtctacaatgaacgtagtgaaaccatgcatatgacacttgagcatgtgatttctaaagaaaagaggtgtttcttctgttgttattgtttgttgtggtgtatctggattttacttttctgaggcactgggtttttctttttatagaaaaattattgtacaattgcagaatctatggtgattgttgaatgtttctaaacaatgtctgctttcaattgtaataagaatcaatacaaagatgattaattatcacattttgacctgatgcagatgaatagaaaacggcacattgcaattttcactactgccagtcttccatggatgactggaactgctgtcaaccccctttttcgtgcagcctatctttcaaaagatggggagcgaaaggtcacattagtgattccttggttatcattgaaagatcaagagctggtctatccaaacaattgcagattctcctcacctactgaacatgaagcatacgtacgtcaatggcttgaggagaggactaagtttaggtctgatttcactatacgtttttatcctggaaaggtatataactttaatttgtggcagtttccagtttatgaagcatcctaggtgtgaatgaagattttattatcatttcaataagcgtataccttttttttcggcttagttttgcagaatgtttattatttcacattatatcaacaatttcacatctttttttttcttcttcatataagtaaataattgcgggtgccttacaatataaccaaatatcaaccttataccaatttactacataacttgtggtgcagttttctgtagataaaagaagcattcttgctgccggagatatttctgaagtaattcctgatgaagactcagatgttgcaattcttgaggagcctgagcatcttacatggtatcatcatgggaagagatggaaaactaaattttgtttagttatagggattgttcacaccaattatcttgaatatgtgaggagagagaagaatggagtacaagcatttttacttaaatacatgaatacttgggttgttagtatatattgccacaaggtattcctttacatctgttagatttcatgaagtaacttcaattttgttctttcttatgcatcttgagttcctagagaactctttattcttatatttgatgctttaatactagaagtgttcagttgaatgtgaaaactttaagaaactttattaagtttctctcttttttagttgctaaccacattttacgtgtcttgtcgatttaggtaattagattatcagctgccacccaggattaccctaagtccatcatttgtaacgttcatggagttaatcccaagtttcttgagataggcaagaagaagctagagcaacaacagaatggagaccaggcatttacaaaagctgcttactacattgggaaaatggtgtggagcaaagggtacagggagctacttaaacttctccatgatcaccaaaaggaacttacggggcttcaggttgatttatatggaagtggagaagactctagtgaagttcaggaagctgttcagaagctggaattgtcagttcaagttcatcctgggcgtgatcatgctgatcctatttttcatgagtaagctatcccatattttgttaaatttcctatttttcgtctctaataaattagtacttctttaagaaaaataatgattgtcaagtattc

SEQ ID NO: 307126 - DNA, 1061 bp, Cannabis indica
taaaaaaataaaaaaagaatatgggaggattcagattcagttgaggtgtagcagatgcagctagtccatttacaggcccaccactccacagtccacatggtatatgtatatttttctatatattatatattttctaaaacaatatcagagatgagaacataaatgagtagaaaaagtgctttggttccacaactttgaggtgtgaaagtgattacaaacggcttctgtgacctgttttacatttttttttttttttttttttgcatggagttgttggattgcatttgccattatttatctcttttaagttaataaaagacataaaacataaatggtatttgagatatgaccccacagaagaagaaaatactttaaaacagtaaagaaataaagcaaaacaagaataagattccattgtaaacatgtattccctctctccctttatatatattatattatatataccatgtactgtgtattacatataacagtacttatatggaatatggatcacctccttccaaccccagttggattggatgtgcttttcagttacgtatttgttatgtttttatttatgcaaatttcctttaatatatttatagcttttaagtaagagcaagagctagcttaaaaaacttgattggattggattattattattatttttttttttggaattagatttaactgaataattatatgagcactataatatgtttggtgtagtagaaaactaaataaaagtataaatatcttttctctaaataatgtataacttgaaaagtatattttgttaatcaataataaattctttaaaaaataataatattgggttagaatagattatactatactatgcttgatgcaacatatgactaaatgaagaatataataataaatttccttctatttatcaaactagataatgtaactggtcctgctgcggttataattattataatttattgaaaaaataaaatactttgagttatgattatttaagtatatatatattaggagagaaatttatactttgaacaattttttaatttttaaaa

SEQ ID NO: 307127 - DNA, 2606 bp, Cannabis indica
catagtgagtaagacggtggtaaccgaacccgaaggagagaaaaagatccaggttttgatcttgataatgctctgctacagaaaggaatcaagggctagagatcttgaacggaatgagtcattatattccgctgaaatcaatgtaagattttctttacccttatgtgtttatttcattgttttagagaattcatatttaggatgttaattcaacatacttgttagtaaatctaaatcctggtaaaatattcccaacaagtaggtcattacctactatcacaagggggccgaacttctataacaaatcttggtgtctattgcttttcattcttatttgtgtaaacacatggcaagcatctgatgtgtacgaccccgctatcagttgatcactttttgaggtcaacagtttggtgctctcattgagagcgtggatatcataatctaattaaactccatagtgaacacaagaagaactcttgtcgcaccatctacctcttcgggtcctcctcaagatccgcaaatcgcagatcgcagatcaaggcactcacgttccagtcacaaatggaatctctatgaatactgcagatgtggtgaatctcgtcaccacaacaggcgctacaagtctggccattacggctggccaaactgacacgagcaagaacattatccttgtgtaatacatcaaagaatttctaactcataatattgactcgtagactaaagcttattaacgccctaaccacgtaattatttcttaagctctatttaaattataactggtttctaaaaaaacttggtaaacaatcgtgtttgaggatcacatttgaaaatcaaatttttttcaccatatgttgttgtcattacttacttggtgtttaatgggataaaaatattggataaaagagttagaaatgtgctcaaaaaatttatgtacgtttatggatattttcaaaactagttccaggtgatcgaaaaataaccataaatcaacatgtcatcaactataaagcagtcgtttccaaaaaaacccaaatttaagtttttgtaacttctctccgagctaaatctttccccatcattcttacacttatttaaatgatataaatgagtattaatgtaacagtttaacaacaaaaaacttattctattgattccataattttcatatgtaataacttacttaattacatatcaaatgtgattcttgtattataatttattttcaaatttataactcttcatatatcacaatttaattttatgtgtattattataccatatattatataatataatctccaactcataatatatattaatcttatattaatatatgatgtatcactttttaatttttattatatatttattaaataaaaaataatataacaatgtgaatatatatgatacttataattaaattcgtaataaaataattgatcatagtttcatataataaaaatatttaaataataaaatattatttatattaaataacaatttaaattaattattatttttttttgttaaagagtttaaactagctaattatttaatttaatacagatattatgtttgtaaaaatttaatataaatatttttaataatttaaaaaatatatataaaattttagtttcatatttttaataatgtagagagaatatatacttttagtatcttattgttgctcaagaatcaattgagcatctattgttttattaatatttgaaattttaggtgttcctttttactacctcacctgataaatatgccagctcaaatgattgatacttaattctgaatatataatcttttcaaccaaagacttttatttttaaagctcacagccacaatgtaattaattaatattatcctgtaatagtggatttataaagtacacatagcaactactttttgttcattaactaataatcacaactcgttttcaaccaaaaaaatttatatttgtaaataaattatatttccaataataataaagcttaatgagtaattggttaattaccgattgtatatggaaaggatatcgatgagtttgatctaatattatattatatatttaattaaactcattgattcttttagattatcaaaaaaatctaaatttgatttgacattgaaataagaatgaaattacgtactatcaaaggaaaaatgagagatgagatcaaataataagtaatcacatttaaaagaaatataataaagtatagatcacaaattgataatagttaacccaccaagtattgatttttgtatatatgtacaccaacttttttcttttgaaagaatttatatatatacatcgatgaggcacatgtaaactttagacttatagcaaagatccaatcaaaaaagtaatcaaagaaaaaaaggatccaatcaaagaaacaaataataagataaataaaagggtaaataccattttagatcttgtgttttgcaaaagttatagattggaccctgtattttgttaaataacaaaatggaccctgtattttctaaaatagtaaaaataggactctgagcttaatttttgaattttttttttaatacaaccaacttgaagacaatgcttaatacgaaca

SEQ ID NO: 307128 - DNA, 4179 bp, Cannabis indica
gagaggagtatttttggattttagataaagtagtcatatattttcaatagtgatatatatgagtttaggaataaaatattaggtatatttaagaatagaaaatcaaatttccctaataaatttagatcttagtaaaataatatccaaaagtcatcaaggctagttttggtataaacagaacacgatttataagttcccttataacagttgatttaattttaaaataaataaataacaatacattttctattaaaccaataggctcactgtaatggtgaggggttgtaaaaaaaatttaagaacactcacaacaattgatgtataatagttaaaaggtaaaataactctccaatcaacactcttctaaactaacataaaatgacatcatgtcttatagagtattggaaaacttaaaccatctcatgtaaacgctcaaaacaaaaacaaaaggacaagggtttcattgattggtacatacatgaaaaaaaaaacattagtcaccaatcaccaaacttttctagtctgcacaaacctacattacatggtttgaattgaagattgtatgtttaagcaaataatttaaattatttgggtagcagaacagggatgaattcataagacagtccaaactcagctctacttgtttctgtgtttgtacaatacgtttgtgctgtcaatactcttacacatccacaataaaatttctataattgcaaaactaaattccaaatacttaattgcacaaatccaaacaaagttccaaaatttattcacaagagactcataataagatatcccaccatccaggtaaaccacatgctcatttccatcttattcatttttttcatcagttcaccagttcatctataaatatatatatttgaatttatctacatagactaaaattaaaccccactactctcattttccatatcccaaccccaaaacccaaaaaatatagataaaaaaagaacaaaaattaaaccccacaaataccaaccagaagaatatgataaacagaaaaaagttttagaattgaccaaacaaagaataaaacaaacaaagtcaatcttacaaaatgccaatttcctttgatgatcctaaaacaactaacataacttacattatataataacaatatcattatcacaagatcaaagtagccaaaaggatattatataaaaataactattctcacttgggtttttttttaatattaatttttttaaaaatatttcacaaaaagacttagaaaaaaaaagagagaaaggactagttaaggtggtggtggggaagaaaagatggaacttttggtattaccaccaccactactagtagcagcagtactactactcttgtcgttttggtacctgcaaaggactttgcacttaaccacactgccataaacatagaacccaggagccaccattatccggaccatcgaggggaccaacttcctggtcttatccccaccaccacccatgtcctccatgtaaacagggtcgaacccggtttccttttcgacccggaaaatgcccaagttggggtgaaccgagttggccaagagatggactaaccacacgctctttgaagccccaaaaaaggcctgcaacaaaggctctggccaagccctgttccaacccaacatagccacaatttcgctcattttcctatcacaaaacctgctgaactcttcgctgaaatgctttgttcctttggttaaaacctcttcccatgtgaggctcttgaggtgtttaaacgacgagtagtttgtctcgcatctgtcgattgggttcaggacttgggctgctgagttcttctggaacatgattgattcgaagtcctcgaagaatgatttgttcagtaaggcttctaggtagatgagtaaggttcttgggctcttcgaaagggagattttgatgtcgtatggttggagaagagatgttattctgtcgtatacttttccacccatgtggcggagctgcatagtgagtgaccggctcaacactctgatattggtccgagcttctgacacagtcacaagaaaattctcaacaacttccttgtcatcgtttctagatgtggaaagattgaaactttgacgattttggattttgcccacttgacacggcgacgagttactattgatgctgctgcactcgtccagcccggttttcaagttccggcagtagatttcgagcttgttgagcttcttttcaagctctgccatggagtatttcagcctcgaagcttcaagaaccgcatcatccctctttctggtggcttgaattagcttatgtgagagttcagccaccgcaattttccactgatcctctcttgccgccaccgccgccgccgacgacggaaaaccgtcgctgggtttggggcttcttcttgtcaaagacgagataatagacttgaaaatgctattggggctcggcatagacgaagaactatgtctgtgcacaccgttgttgtcaacaggaacaacagagatcttttctcgagcatttggtctgcacttatagcaagcaaccgttccatcatctccggcgccggtaccggattcctgccgtttcttggagctgattttcccatttttatgctgctgttgatgatgaagaggagtcggtatgtgcttcggggtcgttcccttgtccgtacaagccttatgatgatggtgatgatgatgattactaactggggtttcattatcttcttcgtgctcttcttcttgaatctgcaaccaacaaactctcccatcacacacacgaaaaaaaaaaaaaaaaaatacgaaataatggaactgggtcatgcttaaacaacccaatacttcctttaatcaattccaaaaccaaaaaatcttacaggagtgaaatgggtagttgttgtaactgtagtacatgactggtttggcccagaaggaatctcttgattagaaggagaaggagaaggtggtgatttagacgaagaagaaggtgaaggtgaagacgaagacgaaggtgccatgttctgatttcttttcctctcttactctctcataataactattatatatctatatatatatatcagtaattatatacgtggtcacagagagaaagactcgctagaaagactgagcaagaaagctccgtttcgagcctgtgcgacactgcgttttgttgtcatttcatatatttatttgtcgtttttgagtagcgttgtaatcattattaattcacactcttattggaatctcaatattttgtgatttttatcactgatgggtcaatattagaatcagaaacaaaagtttaagtttatttactacaatcttggacttggataaaatatcttatatatgaacttggattgaatttttattgggcattggggttagttgcatttgagtctgaatttgcataagagaccttcttgtagaggtaaaaagtgatagttatttgaatttgatatatgtttatataatttccaaagacatttatgaacttttttttggtgaaaccaaattgaaaaggtttgtgggtacaatttgaaattagacctttctcctaaagtcgtatgcatgttggtgtggtccttttttatatttttctaactttaagaagacgtctcaaccaatgaaaaaaaaagggtttttgatttaaggaaagcttaaccactactctactatggttattttttttttcactaaacacacaagcaaacaaacacaaaaacactttcttacattcattttgttaagagattgtacacaaatgttatgtttttttttttttgagagaacaaatgttatatttaaatcaaatagtgcttaacaaaaataataatatgacaaggcttgtacccaagatagttaaaagattgtattttttctcttatttgttctctaattatttatttatttaagggtaaataccattttggatcttgtattttgcaaaagttactaattagactctctgttttgtcaaataacaaaatggaccatgtattttccaaaatagtacaaataggaccctgagcttaatttttgacaactttttttttaagataaccaacttgaaaatacaaacagatatagaaaatgtaaacagttttatcataacacctttagatcagataattattaaattttattttgacaaaaaaacagtttagggtcctatttttaccatt

SEQ ID NO: 307129 - DNA, 500 bp, Cannabis indica
aatatttataaatatatttttttataaagaaaataaattttttcattaatcacaacaaacaaaattacaacatcaaacaaaatagtactggagacgagcaacaggccagctcctgcaatcagcctcttaataaactaaacattttaagtaaataatgttgatcatttgtgttcatcttccctttaacaacattgaccaatctaaaaaacaacactttttttttatctcagaaactattcgagcacccttcaaacacacacttattttgatttttccaaatctgatcatacactgttgcagccaacatacagttacttatagcagccgacgaatttttcctggtgttgctgatccaaaatttccataatcatttatcttaatcatatgcaaatttggtttagtctaatgctcctaacaggcccggctctgggcataggcgggctaggcctgtgccgaaggcccacccagctcaggggcccaaattttttttcctctttaaa

SEQ ID NO: 307130 - DNA, 1986 bp, Cannabis indica
ctcttgaatgatatggtaattgagttacatttaatactctcttctttctctatctcttgtctttctaagtgatgcgagagtctatgatttttcagcgtaatcatagcgatggaggggcttgaatatgaccctattggttaaggttcagaaaaactccatagcagacattttcaaggatcacttcttataacagctttcaaacacgttatttttgcaaaagcagttctaacataaatttgtcttacatatgttttgaatgaagaacaccctgaaagctattaataattaccttcatgttggccccttctagtatagctccttctaaattggcattagtaagatccgcattctgagaaaaataaaataaaaattaaaccacaacatttaggatgatactcttcattttactttctttgattacttatagggtaaactacactttttaatctacttcttcactatgtaatatgaacagccaaaaaataattatagataaaatgggattatattagccaattcaaaaaagctaatgcaagtggttagatgggtgagtgtccaaggacaaataataataactagaaaaggaaaactgatataactgagaaataaaaatcagatacctgtaagtgtgcacaactaaggtccgcctggcagaaactactattggctaaacatgcatctacagaaagaaaaaatcaacagtaaataaagtaattctttttgacattattacttaggatagaaaattaacaatcaatttgaaattagtttacaatagaaactaggacaaatacaagagtgaagcccaatctaaatagataagatgatataaccctttttgtttgtttatataaccaagatgatgtgacaattactcaaatgattatcagagtgtagaaagatttgccttgtaggtttgcactcttaagactagcaccagctaataaagctccacgcagattggccccggtaaattcacatcttttctagacaaaataaagataatttaaagggtttttgtatttccttccatttaatagatataagcaaatgaaagagagtagctcttcaactgtcttactcttgcaaagttgcattatgaaagttggcaccctcggcatccacgtcctaaggcaaaagaaaaatattagcccccaaagcaaagcaaactaagaaaacaaaagaaaaaaagattagaatcaaaattccaagtgttcatggaaattaataatttgtttttgagacagatattaacgatgattcaactttgatgatgaagaccaaaaacaattggtatgtagcacaccgaaaagaaccctcttaatctttttttttttttggtagaagaaaaaatatgaaagacatttgggggttgtaagttgacaaattgtattaaatttttccaattccaaattaaatcagagagcaattctcccttaaactcttaaacattacacaccaatgttgggctacccaaaatttaatgaaatcccaaagagtttcccccataactgcaacatcctaaaaaattatctcattcctttacagccatatcttgtgtactgaaatataacacagcaaaaatattttaatttattaaaattacacagcaatacttactcggaacttggcacactgtagatttgcacgggaaaagaatacatttctaagacaagcatggctgaagtcgacgtaagacaaatcctagaattccaagaaaaggtgaaacttcaaaaacacagtactgtaaatataactcaattaagcagagcagagtactgtcattatgactgacatggttatatgacaaaagatataattaaacttttcttcttccaaataaataaggttgctctacaaaccatatctggctggcaaaaaataagaagctcttcagcaagacgaaacatgggtgtgaaaaattaccagttttgaaagatcaaggccagaaagattaacccctcggaatctaactttttctgactg

SEQ ID NO: 307131 - DNA, 3075 bp, Cannabis indica
gtatccttcccatcaacagctaccattggttaggtttatcaaacatggtcttctaatgatttaaaattaacacatttgaaaaataaatagaaatgaaaattgtttatcttttctatctcatatttttctccactgaaacctttcatttgagaatcttacatggcataatttggaagaacaaaagagctagagtacggttagtagagcttttaaagttaactcataaataataataaatttaaaaataaaaatgtaaaattcactcctccaactaagtggatttatcttaaatacatgtttggctattttataaattaaattaaagatttagtgttaatctttgaaactactctccaaacattataaagattctgttccaagtgtggtatgggatgatattgtaagaagtaagaactaattagaaatacaaatagttctatttattgtctcaatttatttcttgttgtcaatgatattttaccctttgagatattacaaatttgttatttgtgctgtcattttaaatctttgatttaatttataaaatagccaaacatgtatttaagataaattgatttggttggaagaaattctgtgttattactaggaaagagtcttcaataaaagaaatggtatttttaaaaagtaaaagaatatgagccataagcaatagggcacagtagtccacagaataatgggcctaagaggattggactttaattaagtgctgaaagaaataccttgtagctaacaaaaaaagaaaaggcataattaaatagaagtgaaaattagatgaaatatggaatttgatactaaagttacaaaaatgtgtcatttataagttttttactcttttatggtatttttttatatttaagattttttgtggtatttaatatgccatgtttttgtaaatctattaactaaactcatattttattatttttgtttctagaccaattagttttatcttgttttttttttttggtttattttgcatttgcactttaaggtttttaattctctatctttatcgtctactttaatatttttagtggattttatgtttatttggggtattatttaagggaaagtagaaattacacattatataggaaaataaagtttacttttttatgacataaataaataatattatggggttataagtttttttatttttttacatttatatgagatttttatgtcatatattttgtaaaaatagatagaaatctcatatttataaaataataataagtttcctagaaaagtcacaggcgccgaaaaaatcatcgagaaagttgtcgccaccgaaaaagtcaccggaaaagttacgccggaaaaatctccgtcgccaaaaaagtcactgtcgttggaaaaattcattggaaaagtcaccagaaatatatgtctctcatataaataaaaatagaactaattttattacataatgaataaaaataaatagcacaaaataactcaacccggttataattgaaatgagtaattggcggtaaaaccccctcaactcttaattcacttgcaaataaccatacaaccttatattttggtgggaaaaccctccaaagtgttaaactgttagcaaatttaaggtgacatccatttatctcagttgactgctgacatagactgcctacgtgtacatcatgtgcacatggcatatttatattggtccacttaatataattatttaaaaattataaaaaataattcaaaaattaaaagaataatctaaatttataaaattattaataaacaaaaaaaatattttttctttgattttttattttcccctactttctctcttcctctcaatgatttgtctcctaccctctctcctcaagtctctttcttccttcccatatctaagaagatcctaacattacacttctattactcagacggtggtagttcatgcgagatgggaaaaataaatagtgcctattattgtgtccatatgtgggcgagaggaatgaaagagagcaagagagatgaggggtgctatgcgaatggctgggcatgatggcatttcaggcgagggaaagtggtggagatctagagagctaaacggagttaaatgggtatcgtggctcaggcgagatggggtggtggaggtgacgctcgtcgggaagtgggtcaagcgagatggaatgggtagggatggagttttggacgaaaaaaaaaggaacaaaaggtggctggaatctgggcaaaactgaggtcgattggggcagctatggaggttgagtgtggatttctttggatgtctctttttatttgatttggtttttgtcttcttgagattaaatattttgttttgggtaaaatattatgtatggttagaatcaaatttagaattttttatttggattattttgattttgttatgtattattggattttgttctgggtttttggattttatataaacatggtggtgcataagaaactcaaatctagaaaaaggaagctcaaatttatcgatgttgatgtttgtgttttagatttgtgatatttgggtttgatctttgtgaaaagtttagattttttgtttatgtatatgattcagatgggtggtggatagtggttttaatggtgattggtgatgggatagtatgaagaagatgaagaatgaagtaatataaaaattgaaaaaaaaaattatgaatgaagaacacgaaaaagaaaaaaacgaaaaaaaaaaagaaaaaaaaataaattattttttatttttcattaattggaaattcttttttataatttttaaataattatattaagtggaccaatataaataagccatgtatacatgatgtacacgtaaacagtccatgtcagcagttaactgagataaatggatggcaccttaaatttgctaacggtatagcactggagggttttcccaccaaaatataaggttggatggttatttgtaagtgaactaagagttgaaggggttttgccgccaattactctaattgaaatataatcggttctgtaacataatgaatgaaaacaaataacacaaaataacttaaaccggttataatt

SEQ ID NO: 307132 - DNA, 1214 bp, Cannabis indica
  modified_base (1164)..(1164): a, c, t, g, unknown or other
ataattatcaaataaaatataatttaaatatatttattaattaaacacatcaagtgtactaattacaaataaattcttatttttcttttcttatcaaatagcccaaacttagtgaaaattctcaaataagacagtaaaactgagatgtttcctccttagcttttttagccacgatccgactaactctcccatgatgaaaaaacagttttcttcccgttattctcttatgtaatgttctctatataatgcatatgaattcacggaagaaaaacatttgtttcacactttaaaaattataaatagttttatattacgatatgtattccgagtagtagtactcgggtaaggtatttcgacagttctctatagtgtaatagaagttcgatatagtagttcaattgggttattttatcttggagacgataagactgatagtttgcttgcacaattatggatagtgccacaaacgtcttagagagcgatttaatctatgactcaactaagatttttattagatataattttgtttattttttaatattttgagaaacttctgacaacatatattaataaaatcacacacaaaaaaaaaaaaaatactgtcaaagtacagtgctcaaataaaaaaaaaatcttattgttttgaactctattttgagtcttgttttgctaaatattctttttaatgataatagtttccaaaatgtttactttttacattgctctagacaaattaaaaatgagcttgcaaaagatgcaagactcagtcagggaacttgtatgtatatatagaagaaagattacacagttatagagagaaaaactaacagaagttagtagaaaatacaagatatcctaactaattgttaattgtttgttgaagacttgctttatcacatactttagctaaatatgtataatttaatgttgttaatactgtgtggtggccatgttattgtgaatgtattgtatagtactactttggtgaccgatttgagtttactctttaaattttaattttaatgtagataatatttatatatatatactaggtgaggttagcacgtgcaaatgccaatctttattctattttcattttatattttctattttattttaattttttattttttctaaaataaattaattgtaaaaatttaaatntaaatttaaattgtttacaatcataataaataaacaataactaaaataaa

SEQ ID NO: 307133 - DNA, 1242 bp, Cannabis indica
gtagtagttatgattttaaaacttaaatatatacatatatcatatcgggacgaattcggggcgggtatctatttcccccgcccccgccccgtttccgactcgggtatgaatctttaaacccatacccacccttgaaagtcaacccccgctcgcaggtataattctcatacctaattgctacatgtataatttaaaataaaaaattattttaaaatttaagaaatctataatcttttcaacaattaataagaaaattttaaattatttatttttatttattttgctcttgataattttttaaaaatttaagtgtcacatgtcgagctaatatatttataacacattagctacatcaatattttgttagtcacatgagataaaatttaacagaagtctagtagtgtaaatagttggagagaatttttgaggaacaaaaaaattttaaaagtacaatttagtagttgtaatactttagaggtaaaactctttactaacctattttatttactcttatataacttttttggtgaatgaaaaattaaatctaaattgaataatttattgtcctatacacattaactactaagagtctactaatgatgagaaaaaataacaccatatttttttttaataagaggaaaacttttcaattaccaaaaaaaaaaaagaggaaaacttttcattcaaacaagcaaacgtacaaactaaagccaactgctacaagaagcagcttctcaatggctaagcaacaactggattagaaattagcaattacattaacatgtaaatccactcccttcaatttatccactttaacatctatcatcctatacttaataattttcctaatctccctactaataagcttagtagagttaaaagcacaatcaaacaaatatttattgttgttcgttcagagaaaatatatcacaagtttcatgacagtgtttatcacttttgttgtcgagcaaatttcgacaacaccagttttgtgcgagtattcaagggctacttggataccaaaaatagatatgcgagtactcccttagaatagcgagtactcaaagaatatagtgtataatatacgcgagtattatgaatagtataaaatagacacagaaaaatatagtggttcagcaggagcttcgggcttggcctgcctaatccactgttgaaaagagtactctagctctgtttctttattcagatcaacccccctttgaatggagggggaagccccta

SEQ ID NO: 307134 - DNA, 2124 bp, Cannabis indica
gcataaaacccaacaaaatattccaccaagactcaaacgacccttggaggggggagccgtggagtagtgaaaacattgtctccaccaaatgctgatcccaataatagggaacccatgctcccgtctgacgaagatgattctgcagatggactggttttcccaaagtcgaacgcttcactaaagtgctccaatactgctcctcatctcggaagggaagttaagagggctaggcattatgcttcggaacactttggatccgtgagagaaggaagccatcctgttggcggccagcaaacacctactttgacccaaccaccaagcaacaacaccaaccgacaactggtccttttgacttccagcactctaacccaaatcgaatccaaacaactgcataatcaatccacaatagtacccctagattcaggtagccaagccatttttgccttgacttctttgactcctccatccaaatcaatctagggcctccagaccaacttacccagacacctacataaagcaaaggttggcgaaagagcagagcatagttcaatcctagaccaaacgattgtccgcgatgaagagtgtagagatcacggaaggcatccacaacctgtggtattcatctcctatcatagacctccctgtcgtaagcaagcagtcggtcctcatttaggcaaggacttagcaccttttagtgttgaagctattgaggacatcgctagtagtttgacagagctaactacagagaagtgggccattggtagtagttgtaaccctgtgttgttggccaatgcctcgagacaacatgcagttggggtatttcttgtttctatctttattgtttttcttttttcctttttcacttaatgccctttccatttctgatggtttcctaactggttccagatggctttcttagcggaacacacttgcagggaggtgtagacaatggcagtccagctagacctttctctagccacccagaaggatttggagctccaaattgaaaatgttatgaaagaagttgaatctcactacaaggaggtagaggaggcagccaataaaaagtatttgcaaaagtacaacgattataagatatcctttacgtctcaattagaagcaaaatacaaggcctgtctcaaggagctggaggctaccaatgccacccttaccactgaacgtgacaatgccttaaaagccaaaacggaccttgagaatcaagcagtgtctagaagccttgagcttcagaacaaaatgaatgtcattaagggattagaggcttaggttaaatctgcttagggatttcaaaagcttacaaaagaccaagtcatagctctcaagggtggtattgtggaaaaggatgagcagatcgtgaagcaatctaactccatctaagagcttaaagaaattaagctcttgtatcagcagggccgtgatgatgctttaaaggaggttactttcctacgcaaagaccttgaggctgagcgggaaaagtgtagtgaagagcaagagtcccacaataatgccttaacacgccttgtgaaccttgctcatgtcattctgctggctcgcttccaggagactatccccaacatcttcagtcatgtaggtgaggacgttgaggacttctctaagagagtcaaatctttcaaccattttatcgatgaataccttgaggcttatgacttgggagaaacaactactgatgatgggactgaagcaactattgaggaggtagaagatgtaaaggatgcacagactggcaataattagaggttgtggacattccatttgaaaaggatgatcctcttactaaagattcccctacagtgctgcctacagatccaactatttaatcacatatcccccttcaagtaattcataatttacttctcttttatcattataatctttatacttttcttggacaatttctttcaatgttcgtggagctatttttataagcccggtccgcagagccttcgtttataatctttaagactataactcctttttcttttcgtaactaaacattagataagaaagttaaccatggtttgcatgtttgttagctattctaagtggttaggggtggactatcccatagtcattagataagaaagt

SEQ ID NO: 307135 - DNA, 689 bp, Cannabis indica
taaagtttaacatagtattataacaaaaatatgatatataatccaattcaatataatataatacaatacaatacgacctagtacggcgttcaaaacgagccctaaaacactttattattattatttggtacgttggctattcaaaatagactcaaaataagagatatattgcttcgttttaatatagtgcaagatcaaacttgtctttgtggcgggaatacagagaatttagatcatcttttcttaaattgtcctataagctccaaatgctttagtgtaataaaagatttgatgaattgggaaaattaatctagcactattattaactcgattatcaagtaaaaatcactcggtcaaagcttaaaaaattacgaaagaaattattttttggcggtcagcttctcttgtttatcatttatgaaaagctaggaatgagattttgtggaaccaaaactaattaacaagatcatgtaaaaaagattgttgaaagtgttaagaatagaattggtcatttgacctagaaggattagtataaggaagatgtttgttagtttgagaacataatattcaattaataagtgtgttgtatagtttattcaaagccttttcagaaaatgtgttgtttagaatattgtaaagatgtaaacatctaaaataataagggaaatttgattttctatacttagaaa

SEQ ID NO: 307136 - DNA, 1496 bp, Cannabis indica
ttttttttctttctacttatttggttatactcttccaattaatatatatatatatatattttacttaatctcaactatattcttaaataaaaatgttctatatattatatatatacaaattactgcgaatatattatttgcaaatgatcagaaatattaaaacgcatcaatatagtaactgacacccttataaaatgtcatagtgcttttataatgtattcaatttaatattaaatttaacttatgttatattaataattaatgacatcaaaaaattgttaaattatatatttataaaacattaagttaatttgtattggttaatagcaagctctttgtaaatggtagaaggcaaagtatacaaatcacttgctttggtagtgaatcattttggtaatttgtaatatactagtggtttttaccaatacaaaaaaaaaaaacgaaaagaaacttcttcctcacttttctttttctcttgtttagtctattgctttataaatgggatatatgaaaaccaaaattccctttttcatgtaattaaattatttaaaattcattattaattttcgtattatagacgcttttataaattaatttattataacatatttaattagcataagcaacttaataatgtaatcatcaaaatggctatgcatggtttagtggaagtacttttgctgagtactttcaaattcaatgagaaggctctttattcatttatttatatatatttgtgtattttaatgggaaaggactttttggatcaaatgcatttggtgaaaccacacatggaatcttaaccctatatattaatatattcacacatatattatacatataaatattacctccaaacttagttatatatttttagtttttgttttaattatgtatattggtagttgtataactaatattttttaatattatttattcaatagataaaataattttttattaaaaaatatttaatctaagtgttattttttaaaaaaaataataatatttaaaatttattattaattatatataattagtttagttaccgtaatacttttaactttataatatttttttattatttttgaaaaatcacattttttttattttttaaataatatataataataataatagaaatatatttttttaagtaaaaaattaataatagaaagatatttttaaatacgattttaaatttaaattaaaatattagaaaaaaaattaattatgatatatagacacattaagtttaaaataaaagataagtgaaatatgtatagtaaatttaaatttaaattataatattttaaaaaaaactaatacttttgttatataatcgcattacatattaatataaatatttatcaatttatatatatttaattaagaaaattctatttccaccccataaattataaatacatcctattattaaaaaaatataaacttaaataattttaaaaattactcttaaaattttctaatttttg

SEQ ID NO: 307137 - DNA, 915 bp, Cannabis indica
cctttaaggttcttgatattttgcagtattagagtagtgtaatttcttgcaagcaaaatgaatgggtgttgaagaagagaatggaaacacttgagaagattgtaatcccggtccgaacaggtgagttcaactgcaagttttgttgaatttgatagttgggccacaatccacattggtgtttagaatttatgttttttttctcctaaatgaaatactaatttatgttttcatttcatgtttcattttttatttgtcattctgtatggtgtctgtgcttggttgttgatttgcttaatcaatttctgtttttgcaggcattgagcgataaaaagttgaaggggcaacttgtgaacagagaagagttgtatggcaagtttgcagatgttgctgccaagactgagaaggtgaagctttacttttgtaattagtcggtttgttacaatattcggacatcaaaaaatatttcaaaactagtgtctatgatatgatcatctcctttcgttttcctcatttgttttaagcttatgccaagtgtggaaggcttccttgagactgaaggaatagagaattcatggaggatcagacaggaagatattgctaaagaagtcgatcttttaagttcacgaaaacagtttgatattattttgccagaggtaacaacaagaacaacggttctgttattgaatccataggtttttcttgagccgtcaatgtttgtgttctttaaaaataatttatgaagattggatgaacttataatacaccaacaaacagtactaaatagtccaaatttattgtttatttggttggtatttgcaatttgatctttaacttaatgttcattagcttttgcgggtggttgggttctcgggcatgtgggaatgtaaaaacaaacctatgtttggtatagtttta

SEQ ID NO: 307138 - DNA, 1008 bp, Cannabis indica
aagacatcattggacatatttgtgtataaaaacaaattttcttaatagcaaagatctttgattcgatccttttttaattatagtttgactattataataattccttgaaatttatttagcaagactttttaattggttagctggtttggaataatcttgaccctttcaatatttcattttattattcttaacaaccacaatacattattttattttcatcaatcttccattccaaaatatacacataaaatgtcaagaacgacatgatctatagggcaataaattaaaatatacagtaaaacaatataaagtttgttaaatacatttatcatatatattctttcatactatgtacatggagatattatataataataatttgtaaatatttatcatattttagtaatcatatcaaatattcacaagagagtaactgttagcattcctcaaaataaaattaaacaaaactttattaactagacgatcaagaaccatgctggtcatcaattatatctcatatgacaaattataataattcatttttttggtatcattttaatgttgtatagtctataattaattaacgtaaacataaattcatcaaaatggtgttggtgtgggtgagtatatcgtctttaaataataatcaatccaagctattcggtttgatttaccaattcctttgtaaaattgtaatagtttaattcgtaatgaattccattttaaaaaaataaaaataaaaataaaaataaaaataatgataataatcgatccaacttaatacttatatgatatgtatactatggatatgatccatacttgtgggaatcccattgaattgaaaaaataaatataaaaccactaataccaaaaattaaaggtatgcaggtcatatggaaacattttgaatcagacaaaattttcaatgagaaattagaatggtcattcaaattagagataaaaataaaggttaattaggattttttttccctgaattttgacatatat

SEQ ID NO: 307139 - DNA, 2397 bp, Cannabis indica
aaaagaaaaaaaaaagaaagttttacattaaaaacctaaattaatcaactaagaaatgtaatatttttgtattataattaatatttgaaatcaacacaattaacttccagttcagaaactaaccagaatgtaaacatcccgaccctgcacacgaaaagtcagccaaagagcatgagttattgacagtattaaagaggaaaaattatgctatacggaagaaaatgtttaaatcttctataatattatgaatatagacataaattctaatgaaaatcattcgatacttcatcttacattaatattcactaaataaaatctgaaaatgttcacattttattttccaaatttcttgttaatttttataaatggcactgatacttttatgtttacaagcaaagagaatataaacacacaaaagcgtttaacagtaaatgagaaaacctttttctccctttgaatttctgatgctactccagttatcccaaccaaagactttgaacttgtaagatgaacacttaaaacactgcaaagaatagtataatcataaaaatatacatatctaagcctttgataagaaaaaaattacatctatctgcaatgactgctttaaagaattacacatcaacatatagttaaagcccatccaagatatttgggctagttcaaacaaatatatagtcagaataatcccagcaactccttttacattagtatgcaaaaagaagtgtaacaaaatgcctaatgacttacttaagcttcttctttgttgtagcctctacaacccaatcaccaaggcagtttaaattggttccttttggaagaagatcaatctgatatgagagcatacatacttaaacatccatttcatacaaaaaaaactgagaattagaaaacaccaccaatctgaatatgattacctttgtaacaactaatataataggatttgcaccagccaaatcacgaacatgagctaaaaagctaccattgaagtccacaatatcaacctaaatgtacttagttgataaagtgagaaagagttatttactgtcaatgagtccttaaagaaattaaccaacattcaaaagcaatctgattctactaaagaagaaacaaaaggataaaagtaatactcaccaatttaacaatcagggctttctcataacgcaagtgagataacttctctctgagctgatcagccgtgatgaactgtttcccgccagaataacctccatttccgccaacagcagttatcatgtgtccatgggacagaagcttacaccttccacaaagaacacttctaagctggcggtgtttcttcttctgcacaaattcatttcacatgtaatgttaatttatgttgtggaaactagaattgaccgattttgcaaaaccatttgagtgcaaaattgagtttgaacatccaaaaccctacagccaaaacaagaagaaaatatatcccacaaagaaaagcttcgagattttataccaatgcatatgtatctgcatccacgtaacccggagcatcaagctccgaggtctgcaacggagctccacagccataacaagaagctacggcagtagagaccttaaatggcttctctttcttcttcttcttcttattctctttcttaacaagcttcgcagcctcaattgagcgatgtctttccagaaagcggtcgcccggtgtcggagcggcggcgccggttccgtcaggtccgggagtagggtccgataaatcgaccttagaaatgggtgagttattgtagccctgttgtgggtgcgataatctacagaggacgagagaacgctttgagtggagtttgggaagcttggaactaaaaagggtgggattgtaggggaaagagagaggagatagaatggaggagagggttttgagcgccattaatgggcgttttgaaggtttagatgtaaaataggggtcttggggtgggttcccgttgagctgggagtgggaagaccgaacaccgaagaggatattggacattaatgtagtagccaaaaagaaaaaagattatggaaatgtagttatgtagtatatctactaatcactaaaatgtacaatggcgccaaataatacattattcttttttgggtttaattaaattttatctagttgtattagttggttaattctttaagtaagtatttttgttaaagttgattatggctcctgccttctttccctttcagagtctgttgggactcaggtttggtctccgccgctagaagattgggttaaaatcaactgcgatgtcaaagtcggaggtgaaactatgagtgttgtggcgattgcgagagaccataacgaatcagttttgtgggtggcggcaaaaatgctacaattctcagacctactcactggagaagctgcagctt

SEQ ID NO: 307140 - DNA, 1131 bp, Cannabis indica
gtcagatgtcaaatgtaaagtgttaataaaagtcaaagggaataatactaagagcagagtgtcaactcctgtttgaaaagaaccataaaatggagatttctgttcaaagttaagattttggcattattaattcatccaaacatgactttttacatttgaaaaaacttcaaatgaatgatcatcacaaaaatcgagaaaacaggaatgaaaattagtttacaaacaaaattaagagaatttgtcgcataattagtttagttgaattgagaagaaatactcaatctcattcctttagcattttgaaaataaatatatatattatctataataacaataaacaaaaatggtggaaacctgggcaaattgcaatgtttgggttgccaacgccacttggtgtattgatgattaggcctactattctcagagcacctgaaacctccatccatgaaaggacaatctggagaattatacaaaggatatgtttcatcccaaacccaatttccatcaaaaatatcacaaccgtctccaccttcatcaagaaagctcacctccttttccaattcttcattattctcaaaactcaacgacgatgacgaaacgttcataccttcattctcaaaactcaacgacgatgatgaaacgtttagagtttcatactcaaaactctgcgacggcaacggagatgaggccactttaatgcttcccagccaatcaactgaaccgggattaaggttagaattaggaagtggggtttcgaaattggagtagaaaaatctactaacgaatagaacagtgaccaaaaagaacgctacagccgccaaacaaagctccgcaagactcagtcgctttaaaattcttgaatgtattatgttgatgttgttgttggactctggcgctgattctacaggattactgtttttcctcattctgtttcgatcacgtaaaggaaccttttttttttttggtggaaaggaatgtggcttcacagatagggtgtcatgccattaatggctgaaaacaagtttatgcatttgttacttgtgactcgtgagatgttttatttatttcttattattatttggttttgtgtaggtagtcttctctttttttttaagaaataaaaataaaaat

SEQ ID NO: 307141 - DNA, 2680 bp, Cannabis indica
aacttaactaaatataaatatggacagttttccgaacacttcagcgagctttcaatggggagctatttctgatcatagctattgtttggttaagcacctcaagattagtaaccgtggtattcgtcctttccggttttgtaaccactggactcttaaagatggctataaggaaaaggtgttagagttttggaaggaacacattgtctcagatctgaaaagtttacaccagcagctttttaggatcaaacatgtcctaaaaagtcgctatgtgaacaacaatgagtcggttactgtcaattacaaggagacccgtgagaagttcattgaagctcaagagtttttggttgtgaatcctctctgtccttctgctatcaatacagaaagattgctgtatgaacagtttcaagaagcccggagccaatacttcagctacttgcgccagaattccaaagtgagttggttaaaattgggtgatgaaaactccagctaatttcattctataatgaaaaagcggagagctgaaaacaagatctgttcctataatgttgatgggattgtagtagatgattataacaaggtaattgatcacttcctaaatcactttcgcaattttatggggaggaaaagttcggcaaccaggagacttgaagaagattgtctggtgtttgggaataagcttgatctcaatcaacaagtgaacttaactcatcctttcagcaagaaagatgtgaaagatgccttatttggaattcactcatccaaaagcccgggtcctgatgggtttggtgctgaatttttcaagaatagttggaatgacattggtgaggatttctccaaggctgttctgggtttctttcaaactagccagctccctcaggaagtcaatgaaacatcaatatcccttatccccaagcttgataacccccaaggagctagtgactacagacctatttcctgttgtaccacgacttacaaatgtatctcaaagatgatctgttctagacttgcggaagttcttccttggcttattcatgagaaccaaggggcctttgttcaaaagagacttttagctcacaatgttctgatcctgcaggatctcctcaaaggctatactaggaataacatttcctcgagatgcctcatgaaaattgatctgagcaaggcgtatgacacggttgattggtgctttgtaacagatctcttaaaaggtctctgcttccctgctaagttcatttcatggatcttaagctgccttcaaggtgcctcttatgtccttcttcttaatgggaggattcaaggctctttcaagggtgaaaaagggcttcgacaaggtgatccgatgtctccccttctctttgtgcttatcatggagtacctcactagactgctcattcagagttctaagaagaaagggttcgggttccaccctctttgcaaatcgttaggacttgtaacctttgctttgcagacgatctaataatcttttgcaaaggtaatgagaagtcagttcagatggtgagaaaggcatttctccttttcagtgagtctacgggtcttgttgctaacaaggcaaaatcttcagttttctttgggggtatctcttcagttgttaaacaaaggttgttggaagtgttagaaatggaggagggttattttcctttgaagtatcttggtgtaaacctaagacctaccaaatggcgaatagaagactgtggaatcattctagacaagttacataaacacctgcacacttgggctagtaggaatctctcttttgcaggaagggctcaactaattcattcggtccttcttggtgtcaggaactattggatgaatctgttcttgcttcctaagaaaatgacggcggctattgacaagtgttgtagggactttctttggggctctaatggaaataggagcaagatgcatattccttcatgggagaaagtttgtcttcccaagatttctggcggtcttggtttcagggagggaaagaagtggaacatagctctcatggcaaagtacatttgggccatctcgagcaaacaggatattctttgggtgaggtggattgatgcagtgcacttaagaggggtgagcttttggacagttgattttaagcatgatgcgagttggtacttcaagaagatacttcggcttcgatcaacaatcaacgagtccttaatcatggctgctgagttgagaggtaaattcaatgctaaatcgttttatttctcttactgtcaagttcagcgtgttgattatgctaggaatatatgggatagattgatccttccaaagcatagatttattgggtggcaaattgtgaatgaccaattgcttaccagagataatattagtaaaattatgtccatcccttcagacagctgcccagtatgttgtatggaaaaggaatctcatcaccacctttttgtcaactgttactatacccgaagtgttatttctgaggtaactacttggtgtggaaatttctcttggccttctaacatcatggactggttttcgagatcttctaacagttttcaggggaaagttcttaattcaattgtgttggcaactttgtacaatgtttggatgaacagaaattgttgtatctttgacatgaaatgtaaaacagttagagctatgagtaaggagataaagttttgtgttaaaacta

SEQ ID NO: 307142 - DNA, 1265 bp, Cannabis indica
agcattatattgttttctgctttctttattttatgtaatattacttggttattgtgtgctcctcgtctatatctatgactgtacaaagagaaaattcatatcttgatcagaaaatgaaagtaccaattcattctcactagttatatgttcttatttaattttttattagacatcatttttcttttttcattataaaattaggtcattaataagcttcaatatatgtgtaatttctatctatatataagagcatggttaattacatatatagatacttttgttatttaagaaattcaataaaaaaggaatcaatctagcttggatatatatattggtgtcttatgtagaaatcagaatataaagcagtttatagttcttttttttttaagaaactaactccaaatcatacttaattttctggtaaataaataaataattatctacccttatttataatcttccactactctcttgctatattttaataaagttaaaacaaaatggctattaatattttaataaagttggttgctatttagctgtctttcccaactagctagaatggtatataaatataatagatgatcagagtgatgagtaatatgaataaagaaataactacacagatcatcactatatatatatatatagtttgtacctatatatttctattttcctttttcatctaattagaaaagacttcacagtcagaaataaaataaaagatatatatgcaaaacatattctatatagcgaaaaatagtgaagaatattgtatggagagttcgttaatttgacaggacaacttccaagtagtttggagaaaagataaacaaacattgctaataagtgatataatgaactaatatttaaccccaatagatatattgcagcataaatcaatctgcataaatatatatatatgtatataatacaattccatatacagcatatatttatatgcatgtgtcatatgcatatatgtatggtatacatgataaatgcaaagatattctatagagtttcaagtttcaacctcaaaaatttatagaagactttattataaacaaattattagttctttaaattttgcggacaaccaaacataacattaatatagttttcctatccacccattttatcgtacactattggtcccatttaaagtctacatatttaatacagtatacatatgtgtataataaaattgatatgatattagttaattaatatgaagctaaaaataatatatttttttattattt

SEQ ID NO: 307143 - DNA, 2694 bp, Cannabis indica
aggtagttttagtttttttttttttttgccttttgtaaagttgaggatgatgctaattaattactactacttatttatagttaagttgtttctcgaattaatgatgatattgaacaaattattaagtagctcatgaaataatataaaattatgttatattaatgacctaaaaagaattgtgcatatattaattctaatataaggtagctattaattgtgtaaaattattattattacgtggatgcatgttacatgcagatgggacgtattggagagaaattagatatagattttgtgatatcagcaggagataatttctatgataatggactaaagagcgtaactgatcctaaatttcacaactcattcacaaatgtttactctgctaaaagccttcaaaagcactggtatacaagtaagtttacattattttatatcaaattataatgataagattatgaattatatatgattgaattaataatgtattttggtatagtattgggaaatcatgactacaggggagatgtagaggcacaattaagccctcttcttcgaaacattgacactcgctggttttgcctaacatcttttcttcttaatacaggtacctgattgttacattatcaacgctacttaagtgatatttagttagagataataaaaatcttattcttattcacatttttatttttatttttattactatagatatcttctcattacttctaaccaaattctaccaacctgttcaaataattcctttgatttggtttgtaggtatatagtgaataatataaatttttttaggatataattgtctaagtatatatttatcatatttgatgcatttttgttaatgtaattttgtgaaaagaatataaggagttatttgatttgggaaatatgtgatatatatatattattgtgattaagtatagaaacggcagaattcttctttgtggacacgactccatttgttgagaattactttgctgagagtgaacatagttatgattggagacaagtatatcccagaaggacttaccttgccaactctcttaaggtataaatattcattcatatgatcattcatgacgtatatatattcaaaatatatattataaataaatattgattggataaatatatttatatatatatatatataggtatttaggaaaagcattgggagaatacaaatgaccaaatggaagattgtggtgggtcatcacccaattagaagtgttgggcatcatggtgactaccccagagagcttgtaaaacaccttctgccactgctccaagtaagtcttttcattcccatctacttttctaattaatgaacaacaagttctttcgaaaaaaaaaaaaaggtaagtcttttacatcattttttcaagaattttataatatatttatattaattttaatattatattcataaaagtaaataataaagttctacatttataatttgtatcatagtaaatattgtgtcaaatttaacataatatttactatgtgtcaaatttgtatcacattttgacacactattggcacatattttttattaagtaataagctaaattttaattttgcatcacttatttgtattataaggtgcttaattacactatactgatttagagtgtgttatgagagattagcgatttattatattatttattaaattaaaatatataaaacccgacattaaattcaccaataataatttgttatttcttataatatttggaactataaagtgcaccttatcatttctctatttttaattactattatttactataatatacatattcttatgataattaatagtaaatattacctaaaaaaaatataaataataaatatatatatgtagttagccaaaaaaaaaaaaaagtaataataaatatatattatatattaatttgatgaacttatatccttctgatattatcctttgtaaaaaaaataatattttttattaataatataaagtattgagtgtacatttagaattaataatgtgtcatttcaacaccaaatggttttttttttttaattaagttgtttaaaataacattaatgaaaaatttaaatcgaatacactcaataattaaataatatatatttttttaaaaaaaaattaactaaaaatatatcatcgcctatttttttaaatacttctcgcataattcattctcatagacttagacatgtttcgaagaatttattgatgattaatattgacaatactcttgtcggttactctcataaataaaaatataagtagaaaaaatgatttatagcaatttttaaacattattgggattcatgtattgaacgaatatacagtaaaaacatatcatcatatttggaaaaaagatatgcttaataaataaaatattttctaagtagtacataaaaaaatgaaattttaaatcaattataaaattttattaactaaacatacatgaaaataattcactcttttctctaatgtgaatcattgaaataaatctgtacatggcttggtgtaaaaatattagattgagttgaagatagaaagagaacattaatggtaaatattactaatgtggttttgagactaaacataacaatacgatatggtatctcctcacgagattaagcataacaatgctatccaataacacatactcatta

SEQ ID NO: 307144 - DNA, 1908 bp, Cannabis indica
ctatccgaagaacataatggttcaattgaataaaggaagttagatagtctcatatcttgggaacgaggattaaatggtatctcatagagaggcttagatgtaaagacatcattcaaatatgtaatcaagtacactaccaaaccacctctattattccaaacagcaaactccatttcatgtattccatagggttcttcaatattcaacataggtttatcatcttcccttttcaaaaacatacaccctgcaacatgcgatgtagaatcaccgtctgcacaaaagaaattgtctacaaaagagatctctccaattgtagtaccactgtctaatagtttgaatatgcaatgactatttagaacaaaagcaataatgttcctactaaatgtcattgacatgatcagtcctccttcacttataccatctgccgaaacaatcatttccagttgagaagagttgtttggcgaaccagtatcacgctctgtctcttcttgaagatccttttctattggcaacatctgcaatcggcctaatgaatcagacaacagcacagagtgcttttcctcttccttgtttaaggaaactacagccatatatttcaatgacccaatggataaattcccacgaaaaaccttttgcactatggtaagagtgtatgtatcaacaataactacagcacacttagcacctttcttattctgagactcctcactatccgccgaaacatcccccaacacagtagaatcatcagcaaaacagcacgaaatacatacatactgcggcttagagtccaatgtcctcaccatggatgggcttcccacccaaggaggcaacttccgtctccgcctgcaatgtccactacctctgctccaaacgcacaatacaccatcagaacatgcactgattaaggcatcaccatcaccacagctagaattggctgttgaatgatcagacaaatatttatctgcggcatttcccgaaactacaacaggattgcaaatgtcaagttctgctattggtgcagcatgaccacacaacatagctgttggtttaaactcctgttcaaacgagttctaaattacacaaatgcaaattccatacataaataaacgaaaactaaccaaaataggcattgttctagcaaattgcttaacggagtcttaacttctatattagcatattcgttcttgttcttgagcattggccatggcataagagtgatatgaagaaactaatttctgctatattcagttcaaactgagttcgagagcgagttagaattacctgactggaatcgtcgttggaggaggagaggctccaccagatgatggagccatcagatccgccggtatagagcgtcggaggatgattaagcacggtggttgccgtgacttggtgagacggaatggtgtccggccatatgcaagctacggatcggcacctcatgactcagtgagtcgtggcgagtcgggatcacatgagagatggtcactgtaaaactggttgagaaaagatcgagttcagttctttcttctggctacgtcgtcaacaaccttccggcctctaaatgggctcactactgcagcccaataaggtaattgggctagaaatcctggaacttgggccgtaaagagctgagatgaaaaagggaaatttacatggtatactaacttttgctattttttacaaaaatactgccaggcggtattttttacttttttactgtatttttttataagtttcatactacagtatactgtgttaagttttcactcgtgttctactggtgttttttagttgttctactgttgttttgagttgttatgctttgtattttactggttttttttataaaaacacagtatttttgaaaagatttctgtgtgaaaatatttttgtaaaagttaatcc

SEQ ID NO: 307145 - DNA, 781 bp, Cannabis indica
ttttctttctttctcttttctttcttcttcttctttgctttttcatcgtcccttaacttgatgaaaacccgaaaacccccacacaaaaccccaaccacgtgatcccctgagccacgaatccccacccaaaaacccacacataagaagcacctgattattattttgaataaattttttattttaaaaatgtattttttccttgaattttcggtaagtcattcttgttagccaccatcctttaaacctcccacgggaacccaaaatactgtgccaccatccatgttttaattacaaaccatcattgtaagcccacataaaatgatttcaaataataagggtgaagcttttcaactttaagatgacccaatgtttcaatttggcatcaaatctgaaccaaaatttaaaactcaaaaattgtaaatatagatgcacaaatctaaaaccaaaacataaaacacaattctaatctcaaaaccaagacctgaacacaaaacacatatttgaattcggaacttgcacccatctctagttcattccttgtcgttattacaactagtgctggtcgatttgtgacagaggacgcaaaggagctcggggtttggattcctaggtttcaagaggtcgcgagtttagtgatgggaactcgctttggatcgttgatggtggaggggactcatcggcgtcgagttgagaatgacacgaaaagaaagagaattagagactgaatgagagggggagagggatgagttaaggttttcagaagaggaagaaagaagaagaa

SEQ ID NO: 307146 - DNA, 3672 bp, Cannabis indica
agggactacggttgtgcactggttttgacctgtaatctatggctcttttgtggctgtttttcagtgtgatgatgatgggagactcgatggcggatgttgatgatattgtggctatgactagcaagttgggagttgagcaagagaaggactgggaagagaattctgatgcagtggcttccttcgggggatgttctttgatcgggaaggttatttcgaaacgggatattggggaaagattgttgactaatatgtttgggagaatgtggaaagggattaaggattggaacgttaaggtgtatgaggaggatggggataaccatattgtgggtttttcttttaaatcacaacaggatgcatccatggtgttgtccaagcaaccatggtatttaattttaatggaggtttattgttattggaagcttggccggatactggacagtggaaggattttaaattgaacaaaatctcttgttggattaagatgagaggagtgccactcaagatgttcacacaaaggaatgtccggcgtatattggagagatggcaggggtgatcgaggaattgaaatggcataatgatcggaggatgtttctcaatgggtatgtccgaatgcggattggttttcctctgaacaagagcttgttcgttggtcgttttgttccaagtgatgggaaatgttattggattcaattaaagtttgaaagattatcaatgctatgttacaattgtggacggtggggacatgagaaaaaagactgtgagaagcctatgttgatggaaaagaatgaagatgagcaattagttccgaagtacggcccttggttgaaggaggacgaccctacgccgaattgttttgttgcttttcgacaaggtcaggtggtgaatgatgaggaggtggctgagcaaggaatagatgggagggagataccggtgaggcctcaggtgggtcgaggtggtcatttggtggaatctggtgttgaaagctccgacggttcggcggtggccggtgaacgtttggtggaagaggcgatacaggggaatgctgaaagtccggagatcgtgggagttcagttaggaagtgatagtgggggcttgggtacgtgtggaaaagaaagaggatgagtcaatggattgggccgggctttggaaatagagagtggaagcccaattaattcacagggctttacttgtgataatgtgggccgtagggtagggattcaagaagcacgtgctacacatgtgaatactgatggacatatcaacaacatttcggatggggtttcaccagaggccgattctgaaataaaaaagaggaaaacaaatggagaaggcattgcagaggagcttgatagggaaagaagatattttaataaaggtaaaaaagttgttgaggacttggtattggatcaggggagtggtgtttttgctcatggcttgtccattggtggggaggggggtagtgcgtctatgggaggacatcggaggaaagtatcaattaaaaatagagcacggcgacaggccaagttggctttggtgggggcgattgaggggagctctttggcggtaggatcgatggctaccgctccgggagtagcgggggatgaatgtttggtgttcactgctgatggtcttcaatcacctgcgacttctcctttgaatgtaacaaatggggttagtatttctacttctgtggatttggtttctccaattttttctgttgaagcggcgagccttgtggagcaaggccgccgagctcaatgaaactcttatgttggaatgtccaaggcattgggaacccttggacattaagagctcttcaatcccacttgcgggagtttaacccgagtattgtttttttggcggaaagtaagcttactagatcgcaggctatgcgtctatgtgaggttttacaatttggggagaatttttgggcagtagataggattggtttgagtggtggtttgttgttaatgtggaaggatgacattaaattaagagtggattctagttcttctgggcatattgttgctgaagtggcagggaaagggttccttccatggacacttacttgcttctatggtaatccggatgcttcgtagaggaagttttcttgggaacttctgaggaagatatgccgagagactcatggatcatggctgttgtggggattttaatgaaattgttagtttggcggaaaagagtggaggccgaatgaggggtgtttcggccatggaagaatttaaaaaggtgttggatcaatgttgtttgatggactttagttcggttaagacggatttcacgtggtgtaatgaacatgagtctaatacagttatggaaaggttggataggggcttgtgtaaccaggaatggtttgatcaatttgagggagcggatattcagttgttagattggtgggaatctgaccatcggcctttagtggtcgacatgccgattgttgtggaagaagctcagaatggaaaggctaaacgaaatacgcgattccattttgaggaagcttggtgtgaggagaatgaatgtaaggctattgtggaaggtacatggcggaatggagaaaggagtgcaaccgcggcttcgtttcgtggtaagactagtcgggttggggaacttttgcatggtggaataaaaagaagaagaaggagttgaatggaaggatcactaaaacaaaaaagactcttaaggagctctcttctttacagcaacccggagtatggaaagagttaaatcaagtggagaagcatctgaatgtgttgttggaaaaagatgagcaatattggagacaaaggagtcgagcaatgtggttgaaatgggggataaaaatacaaaatattttcatcataaagcctcggcaaggcgtaagaagaatgaaattagagggttgatggattctgtgggagtgtggcaaaacgatgcagctatagttcagcagcttattgagaattattttcaaaatattttcatggcttcggaggtgaatatgggtgtgattgatgaggttctactagcggtgcaaccgaaagtttctcatgaaatgaatgaatctctgttagaatcttttacggaggaacatgtggtccgggctgtcaaggatatgaatcctactaaagcccctggggaggatggtttaccggcactattttatcaaaagttttggacttcggttaatgaggaagtggtgcgggtttgcttgaatattttgaataatggggcggatctgagttgtttgaatgagactattatcgctttgattcctaaagtggaaaagcctactatggtgagtgagtatcgtccaattagcttatgtaatgtcatttataaggtggtctcaaaatgtttggctaatcggttgagggagacattggatgaggttatatcggagtcgcaaagtgcatttgttaaaggccgacttattcatgataatgcgattattgggtatgagagccttcattgtatgaggaagaaccgattccagaatgggaagaaattggcgttaaaattggatatggcaaaggcatacgatagggtggagtggggttttattaggtgaatgatgcttcgtttagggtaccatgtgaagtgggtggatatgataatgcgttgtgtgacttcggttgtaaagcccgcttagttaatttggaaattagcagttgttta

SEQ ID NO: 307147 - DNA, 1305 bp, Cannabis indica
tctctctctctctcctcctctctctctctctctctctctctagctttctttccctctcttttattttctcctcacgatacacactttatttgttttattcttttaattgtttcaaacaaaatgggctttagcccttattggcccaaacccaacaaataaggggcgaacccaacaacaatttatatagaaaattctacaatattttttttgaaatgagtgcatcgatacactcttatttgtatcaatatctaagaaagtattagtccaattttatttgtgatcgtataagttgttatttaagatatctggaattttttttgagaaattcaaaaaagtttaacacgtcaaaaatagaattcaaagactcttttacatgcgtgacatttttactttatccgcgtgtgaaataaacggtttgaacattaatttttatattataaattattctgaatttctcaaaatttttcaagatgtcttaaataatgtacactactatgaaaaaatttggactaaattttttttatagatgttgaaacagttaggagttgcattagtacactcattttagtgaagtgaattatagaagtaccctatatttaatattattatcacttaaataatattcatattttattacaataatacctaatttgtaaaactaaaataaaaaaattaatttgtgagtgaaattttcaaatgtggacaagtaaaaacaactacaaacaaacaaaattattaagaagtcccctggcattgtggtaggggcactattatatatcacctcatcaaataatatttatcaaataagattattgtgaagattttatcataataaattaattaaaattagcaggcctggatatatagatattaatattcatatttttttttaaaaacgatactccaactatatattagccacatacaaagattacactatatgcatttgcagtcatataattaaatatagatatacacacatatgtgtgtgttcacaaactaattaaactaataaataaccaaatgtagtatgtacttgatagaggggacgtaatattaattatataataattaaaagctgtggagaattgtgattaagttgatatttgatgcaaaaccaccacacaaacaaagtagtgatgatttgaactaaataattaaaaatgatccataagtcctttttgacgaccatgctccatccatccagagccggcccaagcattttgggggccttgtgcgaaattttaaaattgggccctttagaaaaaaaaaaaaaaaacccatatacattaaaactacaatttt

SEQ ID NO: 307148 - DNA, 844 bp, Cannabis indica
tttacaagtaatcttaaataactaaaatatactcaatcttgaaaaaataatgaacttaattctttttaaataccaaaaaagataaaaggtctacaaaacaacttttttaaaagggtgaaaattcctatacaatatttttgtactaaggagaaattttacaactaaatataaatatgtaaatatatattatatttgatagactaattccctaataaggtaaatccaattaaatatttgaagtcatttaaagactgtagtactgatcatggtgtgtctttttgtatgtatatatgatatgggtaaaacatatatagtattgtactaattcactatatatttatatttcgtgagagacaaaataaaattaataaataaagctttgtactttttggctttgctgatcaaccaagttgatcatttatttgatgctctgcttataaataaatatatatataaaaaaacattgtcaatttcataagtgtacatatataagtcataagtgttggtgaacttaattttttgtgaatggaattttcaaattttggacatacaatttattccttattatcggttagtaagtagtctcactaaatactctaatatgatcatgcatgtaattacaaaaatagagctatctattatgtatatggctaagcactttgagttgagaaataatccaattttgagtatagaacaaaacggcttatattagtttgttaattaattacaattctccaataattctaatatcaaactaaatatccttgcctcccccaactcctccaaaaaatattttattaggaaagggaaaaaaaaaaggtagtgatattgaaagctcaacaac

SEQ ID NO: 307149 - DNA, 4470 bp, Cannabis indica
aagaacatcatttgtaggtttggttttataactaagatagtatctgacaacgatacttagtttgatggagagttattcactgaactcggtgagaggaataaaataattaaagcttctcgtcagtatcgaggcctcacgcgaatgggcaagtagaagttgttaataaaaccttcaaggctactatcaaaaataagtttaagctgtcactggaagatgggttgatgagctaccacaagttctctgggcccatagaaaaatggagaaaatagcaatgggacacactccattttcatttgcatttggctcagaagtaatgtttcctgtaaaagtaaatattgcgacccacaggcgtgaattctacaatcaagaacaaaataatgaacttcaaagtaagtccttggatctgcttgaagaaaaatgcaccgagtcacaagtagcccgtgctacttatcaacatcgtctcactggatactttaataaaagagttcaaaagaggctctttaaagtaggggatttggtgagaagacgtgtctttgcaaatatgcgagatctagtagctagagtgtttaacccaaattgggaaggcccgtacatcattgaaactatggttggaactggagtttataagtctgcatggcttaatggctcactaataaaaaaaccattggaacagcgagcatctacgaccatattaccagtaatttttctcgtaatgttgtagtgtaatagttgttccttatcttgaataaagatttaaacatttcaagtaattataaagtttcttttctttaatattacttgggggcatacctgtgcataataattagatttcacctgagatatatgcaaaaaagatctaggctgttaaaaactagaaataaaaatttaaaatttttttcacaaaggaaagaatgattgttaaaaccttcctttaagtgaaaattcaaaaagtagttgtaagtgagattttttctcattaaacaacaaaaagctacgtgtgatctgaataaataatggatcgcatgatgtaacatgtattatgaacgagataaaaacatgtcttaagaagataatccacaaggtaaagtatgaaaagaggattaactacttatacgagcaatcaaaaaatattcaaaatttgtttttaaaagaactgttcaaatatttgaattttgctcttaacatagcaaaatattaactactcatggaaaatatagtagaatattaactgcttgcggagcgcatagaagaatattaactgctcgcaaaaaacacagtagattattaactacccgcataaagcatatcaaaatgttaactgctcgcatatgaaataacaggataagactagattggtgcgcgtgtaaccctaaaatatccaaagccaaattgagaaaagtgttttgttatgaataaaaacgtaataaataaacattattagctcgagaaaagcatggtaaaataacataacagtaaatatatattttagcaatgttggccatccaacaaagaaaagtttaaatattacaaaatttcaggggggagaaccgctgtctcagcctaaaaggccattgttcaaaaaacaaaacaataaaaactaaatctacattgtgggagatttagtggggatttcttcctcttcctcttcttcaacgtccttggcatcctcggcttcatccttttttgtctgtttgcaaaaggcaagcatctcatcggctccctccatcagaaagctttagtccatgtttgaatttctcatccacactcgataaatagatcatgtggcgatctaatttaaacgagctttggcattgtgctcagcttcttcaagctttttatgagcctcttcaagtgcttcttgggtctttttattagccccaataagatccttggctcatttttctacagcctcgagttcagtcttgagggatttctctttttctcatgttcttcaactttcttttttaacctagaaatcttagatggggactcattccattactttgcaatggcttcatgttggtcatctgattttcaaagctcgaaattaattgggtgatgttttgaagacccctttgttgagctacaaaggaaagaagagaagcctacaaaaagtgaggttagaggaggactcataaaaaatattatacatgaataaaaaatgaagaagaactaactgagtgcatgagatcataactcctcaccgtcagactttgataatcacccatgttaattaagttccagtcctcttgttgaaaagtcttgtgtgatgtcagtcgttggtagcatgcaggaagcatacttgcgagccctcgataccttcaaaaacgggcaaggggcaagagggctccaagaatgccatcttggttgggatccagagaatttgacttggtgaatagacacaagggcttgtttgccagagctcgcagctgccgaaacagaaggaaggacttggggcacctcttgcttgattataagctgagtcgaggcatgctttttgttgtttggtgacttttcaacctcttcaacgattatggctttgacccagaagcggtcttcaatgcgatagatcatttcttgccttttcggagcttgaagagcttgatagaaagttttcaaagtccatatatacaagacaataagaaaaccatcaacacttgtgcaaaataaacagaaaaaatgttgtgagataaaagataaaagggattaagaggagatatctcccaatctggatgaccagccctatcgaaattagtgccatattgattggcaatcccaaagtgatgcttgggataccaattggcaaatctaagggaaataagatctacacaattccagatatagaagttacattggctatccttgaatttgactagtgtagtttgttcagccctaagaatggttggggaccatccacaaataccaaagttattacctcaggaggcatcatcttcagcttccttaggggtcgtgttcttctgatagtggctgcgagacacataatctctatcctactcgtcagctggtacaagcacttgttgacaatctaaaaactttgggaccttaaggtcatgagtagattgaccttttccaagaagagtgcaagccttcaggttgttcctctgcaatatgaagtcaactgcttgcaatcaaaaaggaaggccaagaagaatcatgtgtcttttcttgatcttaggagttgtaacaggtctcctggtaataactgttaacataacaaaaataaaattagtaaagtatagacaatgtgcattgaaataaaactcaaaaccaagtttttgagaaaagctatacttacgtatgatttgaaattttatggtgttgatgggaaaaagacccgcggtccaaaataagtcattcttgaactcctttttgttgggacgcctcacaacattcatgttattattggtatatgtcccgaggtagtagaaacgacctacgcttgcttccttatagggtagaactttacggaataaaaataaagaatttcaagttgggtcggactctcccacttcagaaggtgatataaacactttcaacaggccgatatcctgtatgagtttggagataacttgaatggagcaatgcctacgtagtagcagaagtccttgaaatagtccctaagtgggagaatttccccaactcttatatgctctaggctccaagcacctatcttagaaagttcattggttctgtaaccttcatctcaagctagacgttcaggtggataacaactgaattcccgccacgaacttacctaaagtggaatccctgttaattcctgatgtcgcatgaccttaagacttcccaaaaatgaggtcctatagatctgattttggactcaattaactcagactcaaacgtcacaatacgatcctgaggagtccttgatttgtgagctttctcagccattatttcaaaatctaagtcacctggtgaaaagtaactgttatcccaatttttgcactctaacgtggcatcacatgaatggtgacacgtggagtccacttggaatatctgctctggaagagtggtctgagcaggacatatcgctggcacgctcagagcgaagtattcaacaatccgcacagagcaaccaacaattagcgaattcagctttctcatcatgagtcatcagcacaatccctataactcagggatcaatttacgtggatatggcctacacacgatcccactatcagtgtatccaacctcagtcccacgatccttgtattcagcattgatcccacgatctttctgtttatatgcattgtaacgagaggggaaactcttcctctccaagcttacctgccctataaatagtgatgtatgttcactgggcaggggatcggtcgaaaagttgttgagttaagactatactattatctaagaattatatattcaaagatactattgtaagagctataaaaaaagaaatctttctctttgatc

SEQ ID NO: 307150 - DNA, 2717 bp, Cannabis indica
taaaacttctcatgctagatatctgcaacatagtggaaagttattttcagtccattttcacttcggatggggttaatcatgatgctcttaatcaggttctggctactgttccttgcacaattacggctgcaataaatcttgctctcactcaaccatatactgctgatgatgtttctaatgcactttcctctatgaaagatgatagcagtccaggattgggatggtaatgtcggtcatgttttactctaattattggcacattgttggtcctctagttaccaaaactgttctggaagttcttaatgatggtgctgatccttcaatcttcaaccaaacattgatcacactgattcctaaagtgaagaaaccaacttccatgtcccaactgagaccgattagcctttgcaatgtattgtataaattggtttcaaaggctatcgtgttacgtttgaagccgtacttgtcaatggttatctcagaatcacaaagcgcttttcttcaatctcgtcttatcacagataatgtgttggtagccttcgaacttcttcattctctaaaacatttgaaaaagggaaaagaaggttatgcagccattaaacttgatatgagtaaggcttttgatagagttgaatggcattttgttgaacaaatgatgattgctatgggatttgatcatgcaatagtggagcttataatcagatgtattagcagtgtctcttactctttcactgtgaatggttcaactcatggtcatatcactccctcacgtggtattcggcaaggagatcccttatctccttatctattcatcatatgtgcggaaggtctttctaggctttttcaacatgaagaacaacttggaaatcttcaaggcatacgtattgctcgtggtgcgccagctgtttcccacctcttttttgctgacgacagtcttgttatttgtcgggctaataagagatctgcaatggcaattaaaagttcacttgactgttattgtcgtgcttctgggcaatgcctcaatgaagacaagtctgtgctttcattttcccccaatactcagatgactacccaactcaactttcagaggattttacatttggcaatcaaaccatgtcatgagagatacttgggtttaccttcctattctggtagagacaagaaagctttgtttggtgagattaaggagaaattatggaatttactctcagcttggcaggaatctttattctctattggtggcaaagaaattttactcaaagctgttgctcaagcggttccgacatatgctatgagttgttttaaactatctaaatcgctgatcaatcaaatagagacaatgtgtaataagttttggtggggttctaattcttcttcttcgggcataaactggaaaacttggaaagctcttactcaatctaaagttgaaggaggaatgggatttaagagctttgttcattttaatcaatctctccttgcaaagcaagcttggatggtttttaacaatccaaattcccttcttagccgaatcttaaagccgagatattttaagaattcgtcattcttggatgctaatttgggatcctacccttctctaacttggagagggatagtttggggcaaggaattgttgttgaaggggctgcgatggaaggttggaaatggtcacgatattcagtgtgcttcggacccctggctgccaggatcaacttattttaaacctctggtttttagaggagatgaccgatcaatgacagtggcacatctaattcaagataataggcaatggaattatgagttgctacagtctcttttcttagactcggatgttatcaagattcaaagtttgccattaactctttttgaacagcaagacactttgatttggcaccatgaatccaatggtctatattctgtcaaatctggttacaatttggccacatcacttgaagagcagcaacctactgctagtgatctgcaatcccagctgtggtggaaaaagttttgggcgttaaagctcccatctaaagtccgaattttcttgtggcgtgctatccatgattgcttaccagttgctaacatcctccattatcgacatattgctgaaacggcaaactgctctctttgtagtcgtggtgcagagacagtaactcatgctttattcttttgcaaaagagccaagcaagtgtggaaattggctgactttactcttcatgaactgctatacgacaacatgaatttaaaggaattttttcttcatgtgtcctctttgtggtcagcatcaagacttgagcaatttgcaactatcctttggagtatttggacagaaagaaataaggagagacatggcacaaaaccaaaatcacatgaggttctcctttattttgcactgtcctatttggaggagtatcaatctgctcaagctccttcaaccactgttaactcagccactgcatcagcatcagctactgctactgccttcaacagagatgccccatggctgaatcccccttcaggccgcctgaagttgaatactgatgcagccgtgaatgccatttcgcagacctccggttttggagcagttcttcgggatagtaatggtacaattgtggctgctatggccactccttaccgcggctgcttctctccacatgtgatggaagcgttagctctcatgtatagtctccaatggctaagagatcttcaactacctgtgcatt

SEQ ID NO: 307151 - DNA, 897 bp, Cannabis indica
aaaatttaatatacgtgcctcgcacgtagttttttgctagtatatttataggcactataaattattattgttgctcataaattcgacacctaacaaaacatgatgaaatagataatataatgataaattaagttaaattatatatagctaatattgttctaaataatcatcagttaaaattaaactggcgagagtttataaataatattatgcatttcaccaaattatttaccaaattattctttaccaaatgattgattaaaaatattctttaccaaattatttatttcaccagttttattttattaataaatttataaaaaaaaataatgtacatatacctttctaatttatttaatattaattaaattttgtaataattcacaaagaaatattaagtaattggactattatttaattaagcctaaatttaaagtgaaaaccacttttgtgattaaataaagtgaaattaatatactttttattagtcatgcattatgacagtacactcttacgtacatatgagataacatatatgtaacaaaaaaaaacaaattaaacaaagttattattatcaaaaatatatatatttaagagactttacttttttgaaatttcgtacgtacgttgcatattattgaagttttatcaaaataattaattaaattggtcttgggtcaagtcaatcccttggtaaactggtaattgtataacaattaatttacaatatttatagtataatatttatttgtataggattattattcaaaattataatacgaaatacgaattaataatcattgccggtttaagggtggaacagctgaagtccatgctcaaagccctctgcctaaacttaaatacttctttaataaaaatgtctcaaatttacttttt

SEQ ID NO: 307152 - DNA, 859 bp, Cannabis indica
agttttaacttcagtttgctgaggagcacgcttttcgcccataacctccactgagggattatcatcagatatcgcgtaaatcctcaaagttgtcttgagagacgtagctaacattttcttcattttttcagtaagtttttgctgctcagctaactttgcctgagtagtctctaactctttggataatcgaagcaggtttgggtcatggtcataataatagccatccttgtaatacccatctttcacatagcggtcgtcattgtcctcttccttgtcctcagagtttggatcattgtcgatgccatcaagcaagtcttcaatgttttttcctcgatttttaacatcagcggtatctccttctctcgcatcgtctggttggagattgggggcgagggggtccatctccttcataatagcgtcaacatactacgagtgtcgcttttctaatcgagtgtggtgggcaaccctattattcatctcgttttctagctcccctatgattcagaaaggtctttcttgagtaggctaggggagaagtcgacgatgctggctcggaggcagtaaaacaaacttggtggaactaaaggtggaaaagtcaaagtagctgtctctaagtaaatcctttgggattcgtcgatcttgagtcaactggcactggctcgcgatagtagctgtggtagtaatgtcccggagcccgactactgacccgaggtgtcgaacgagaaagtcataagggacgttaaacataattctagaagggaattaccataaaaaaaaatcgagtggcagttaaagtgaatgtttattagtgagtcgggtggatactgcaataagcctctctcgaccctccatttctcat

SEQ ID NO: 307153 - DNA, 3003 bp, Cannabis indica
aaaaaaaagaagagagaaagaaaaatgttgatcatggcgcctatgtatgaataggagatgcaaaataagagagaaggacattacaaaaggaaaagaaaataaaacaacagggatggaaaatatgtttatggtggtactcaattagcttattgtgaaatagctttattgtttttaaattactattataaaactgtgtgtaaaagtcacttatttgtaattttatttctacttgtttttatttttttagaaaaaatgtggagatttggtgggcagtttgaaggtaataaatatttttttaatatatttgttttaactacattcggtgataaataatagtctttttcgagacaggatgaatctcctaaaatacattttttgagtcagtgtcaaactccaaatgaaccaaaattctattatctcattccatgtatcagaatatgaagttcacgaaaaacagagtaaacgaaaaacaaaagagaaatacagagaagatgaaagaaagtaaaacgagaacttgaaatctttattgaatagacaagtgtatttatatacatcttagacacacacaacagaattagttacaagatatttgtgtcagacggaagttgaaaaaacagttacaaaactaactgaaaataccaacttaaacagagtctattcaactatattaacatcccccctcaaactaaatggtgttggaaccatttttagtttgaattttaagtacaaaaacctatcagttgagagagctttggttaaaacagctgcagcttgatcaacggatggaacatagcgaacagcaagttgattatccagaatttggtccttacaaaatggagatcgatttcaatgagttttgagcgtgcgtggaagactggatttgctgcaactgccaaggcactttgattgtcaacctaggtgacaggaatttgatgaatagagacttgaagctcctgtaacagagatcgaatccatttgagttcaacagttgtatttgcgagagctctgaactcactctcagtgctggaacgtgctactacatgttgtttcttggcaaaccagctgatcaagttgtcaccaagaaagacaaggtacccaccagaggatcgacggtcatctatactgctggcccagtcagcatctgagtaagcatgaagagtcatgacagaagaaggtcgtatccataatccatatttgattgtgcctttcaaatacctgagtaatttcttgcaagcttcccagtgaacagatgtatgagcatgcaagaactgacttaatttgttggtgatgaaagccacttcgggccttgttaaagacaaatactgaagtgcaccaagtgtgcttctgtataaagtaacatcaggaaatggttctccttcagtgagagaaagtttgacagtagaactcattggatttggacttgccttggcaccctccatatgtaacttgactaataggtctgtaatgtactttgtctgagacaagtacatgccggttttgtctctgtatatttccacacttaagaaataatgaacttggccaagatctttcagagaaaaggatttgttgagatcagtaatgagacttgaaataagagaagcattggggcctgtgattaatatgtcatcgacatatactagaagtattaccagatttgtgccttttccataaataaagagtgaactatcggctttggaatcatgaaatccccatgaccttagagtcattctcaatttatcattccatgctcgaggggcttgttttaggccatagatagccttgtgtagcttgcacacatgagttggattattggtgtcttcaaaccctggaggttggcacatattgacagtctcattgagagggccattcaaaaaagcattacttacatctaacagagggacatcccagttgtgagatacagccaaggagagtactgttcgaactatagtaggttttacaaatggaccaaaggtctcttgaaaatcaattcctgcctcttggagatatcctttagctactaaccttgacttgtacctgttgagagacccatctttattgagtttcaccctatggatccatttacaccatatgacattcatggaggaatcatatggaactagagtccatgtgttagctttcttaagagaaaatagttcactgttcatagcaccattccactttggattagatagagcatcttttaatgatttaggttcagtaggtaagagtgactctggtaaagggtgctttgtggctatatatgactttggtttgaatatgccactttgagacctagtgcacatattatgggaccgagatggacaagtggcagttggttgttcatttgtaggtgcttgaggggtaggattaggtatattggtttgactggtaggtatttgtgttgtgtcagggagtggtgaggggacaacagtggtgatactagggtgttgaaccgggtttatgatgggaggtgatgaaggggctatttgtgtaggaactatggaaggtgtctgttgtggaatgcagtgatcacggggggccatattgctatttgaggaaatagagtgtaataccctggaattaagaaatgaattagcaaaaccctaattagataattatgaataattgaggaattatattattatatagttcaatatatgtgaattaatatgaatttaaatatgttaagaccatgttggtgagctaggggcattttagtaattgtgacccgggaagggtaaaattatggaattaatttaattacgtgcttaatagaactatattattatatagtatgcctgtgttatcttttcaggtgtgttctgacaggttggcgcggtatagtcacaaccgggtatttcaggctgaacggggttcgggcccgaaatgcaatttgggattaaaatgtcggcattttatttgatatttgataatctgaaatttgtttgaaattaaatgtgtgtgaatgacaaatatgcccttgagagtgtttatgcatgttat

SEQ ID NO: 307154 - DNA, 1168 bp, Cannabis indica
  modified_base (58)..(58): a, c, t, g, unknown or other
attttaatattttttgaagatatatttatttttataaatgatatctttttttaaaaanataaatataaaaaatatttttaattcatgaaaaatgcaaactgacacggaattgggagacccccatatggggatggagccgtgtggcacaaatcagatgattgtcccggaattgggcggacggccgaacctagctcactaggacacgtggaaatagaataataatagttttttttttgagttatccttaggctcggactatccgaacctttaggttcgaaaatcatcgtttttttcttcctttaattacccgtttctgtccccatttttgaaaccaataaattatttgtcgttttccttcaagcttgggtcccataccacactgaaaacgacaccatttatgtatatcatcacttataattcagaactgtttgctttgccagagcaaatcctgtacgtgctttaatttagtatcccaaagattatcttcttttcttttatattctatctagtttttcttttctttttttattattattatttatgtttgataatatgaagcaaagacagatggtattgagattaacaattgcaattttggataatgttaatataatgacttggtgttttcgatagtgctttgtttcaactatgatggattaatcttttcgtaagttgataacatttttcgtattttcctaaggagactttgtatgttttaatgggtacgcaatatgcatgtctttatttaattgattatgttgataaacaaaaaaatatattagtggttcatgataatttattttatgtggccatatattagtgtcacatgatatacttatgtttttaaaactacgtataagtctagatatgtacatatatataagaaaaaaaaacctagatcagaagagaaatgagattcattttctaattgaactttttttttttttatttaaacaaatgttaattgacttcaagtcctacagtttcactggaatcattttgactatttcacatcatcactataattataaagcctttcttattttctaattaaaaaataaacttaaaagtaatagacgacaaaatcaagtctagttaaatattgatattattccttacacgaatttcttccataaattttccagttatctcattcacacttgtaaat

SEQ ID NO: 307155 - DNA, 2544 bp, Cannabis indica
atacagtgtaggagtagttaagacaaattttagtcactaatcatataataatgtgaatattaatatatacactttacttaaggccaacttgtattaattaacacatttgtaattgtttattttggaagagaatctctagttgttgtttatagacttttgaattagaggtgaataattgaaccttttattgatttaagataaacttagattggttttttttttttttttttattaaataaataatatcctaaattagattggtaagaatattacattcactccaaccatatctaaattatattagatgtttgttttattttattttcatatatatatacataaattataatagtggcatgttaccctatagaggtgaaattaattatgtcctaactctcaatggtttagttgacattatgaccatattgacaacaaaaattgtccaatacaccatgatttgcttatttggtaaaatctcaatttacatatatgaacaaatataatttgtctcatttatatatattagaaaatttttacaatatactcttttgaaatgggtgtaccaatacacttttatttgtttcaatatctaaaaaatattttgtctaactttattttatagtcgtatatattgtagttatttgagatatttagcaaaattttaaaaaaattaaaaaaaaaataacatgtcaaaaattagattcaaagaacctgttgcatgcgtgacatttttattttatacaacaatttgaacattgatttttatattgtaaattattttaaatttctcaaaattttacagaatgtctgaaataactataatgtatacgactataaaaaaatttagattaaaaaattcttatagatgccgaaacagttaagggttgtatcaatacatctattttagtgggatacattataaaaacaccctatgttttaaatcctcattattccattataaaataaattacatttatttaaatattaaacaacaatgtagatgataatgtgatttacatgttaatcaagagaaaaatggtgccataataatgtttactatacattaattttttttacaataatattacaaaattatatttatttaattatattattatttaaatttatccaaagagttggaaacccacgttttaattataagaaatctttccttttaaggccaaacattattggaaaaaagctagctttaatttgtctcatattgtcttttaaatgaagcctaaatatagggtaggttttctttggagccaagatggaaaaataaaataaaattaattgaaaataataataataagtgaagtgaagtgatcatcctttatatactatcttataagtcaatcaaaatatcattttatttaaaatgatcatattttgtaaccttatttgaataaaatgtgttattatatgctattttgcttcatatttatatgtttttttttatttatgtttatttatacaaaataatcctgtgtgaacttaatattagtaattacatacgaaaataatatttttttaacaattattatttaaaatggaaaagttttaataatttatagaatcggagagtgtaattgaatcactcaattacttttaattacataattacagtacaataaacaaattcagttacagcgtaacttttcaaacacagttttaatcacaatgtaactaatttttatatatttattcaaaatcaaaatttatatttttgtaaccaaaattattaaaagaaatatttaaaatcaatgaagtgaatggacaacattaattaattctattttattaagaaatataccataataagataaaacaaaatgtaggattaaaaaattaattagtgtatgttgatcaatgataaaatgagcactagagactattctaatataaattttcaaatataattttatgttatgtgatagaatacaacaaaaacaaaaattaaagtacaatacataaacaactcccaaggataataatgataattacaaaaataacactaatatgtcttataatatttatatttatatatagagagatatcaacatcaaaataaaggtaagaagataaatgaaatatcatacgtgtggggaactcttaattggtgtgaggtgcatcatcaaagtcaaaaataccctatcttttaagtagtttctaattccaattatcttattaattcattacccccaacaagaatattcttgtataaacacaatatactaacttatgttgaaaaagtgaaaagtcttaatagtaaaaacccaactaaactctttgtatattttgaaattgtgtaaaagtcttaatagtactaaaaacccaacttcaactcggctatgtttggtaggaggaagggagagtaggatggatggagaagttagagaggatgaggagtaagagagatggagaggattgaaaatctcttttgtattgtttggtattaggtgtgaagtgggaaggatggagaaaaattgattagtaaaattacaaattatccttttaaaaataaattttatatttttttaa

SEQ ID NO: 307156 - DNA, 4355 bp, Cannabis indica
atattacatgtgttgtaatcttctcttctacctttcatatatatatgtaatatatatagtgtatatatatgtattgtaatatatatttaatcaatctcttattttagtccttgtataattttacaatagagttgtaataaatcttgattttctttcattgttataaaatctctaacacatcatactatgttgaatttatatagcaatatagatcaatatgggtgtgagtttaattattatctaaaatatttattaattaaagttatgtgtatatactatacatatgcacatgtgatttatataaataacaaaaatgatataattattaagaaagaaacttatcataatagtgcaaacatgttgatgtaatcatgttgataagttgtcggttcttatatatgtgtgacttatttgatgatgagagttaacaattatatgtctttcatgatatatattctaacgtgttttaatttgtctctttcttttatttttgtcttatatcttattagatgtaatttatacaaattttagctcatccacacttttcttatacaaacaaacaaaaaaaaaatgtaattgtgtttgttgaatgaaattttcggcaactaattaattagagttgtatgaagtaattaatgaatactagaaaagagaatttttatgtaattaagacattaatgagcttagtccacaagtcactgtataataagagtatttattacaaatttttttatacattattggagtatttatcggctcgtaatagtggtaaaagatcaccattgtcgtgtttgtatgaaccatgatttgtataattttttaaatttgatcttaggacatgattgcctactttttatgatgtatttgggttgtctataggtgtttggtgagactagatttatctcttatttatgatttgatagctcatttatgcatctatcaattgatgtgtggggtctcgtaaaatcaatgaattatgggtttaaacccttaagcacgtctgttcaacgtaaggtgtcaaatactttttcccatgccgcattaaatgcgcatacaatgttttcatcctcaaatagtgtgttacacttcgccagtcctctcgcacccttttctgggtcgacttcacttggagaggaaaaggcaagagccatctaatgtccaacgaccttcccgaagttgactatcctgtcattattactcctttgaaataatagactctgggagtaattaagtagctagcgtgtcctgtaacgcgggttccattaccacctagctcgctcctgagctgtcatgtattttggcagaaattctaggcaacatttaccctcaagttcttttttgcaattttacaaaatggagcttgcaatgtgcctattggagtgttgacgtcatgtgcaacgtgccaattttaaatgctgctcattattttcctcatttttgatgaaaacgattcgatttcttattcgattttgatgtctttattaattacagggtgtcagactggtgcttgagtagtgtaaccgtccttttgagtttattcatctaataattgttccccggccgttggatcatggggcttttcactatgtgaattaagactgttggatgattgacgatatgtgccgccttggctagtctataaaaactcttcattcttattcctcaagatttttattctcatatttctcagaatcccaagctagtcaaaattccagacaatcccaatttttttctactttttctctgacgttgccaagcttagttttactaatgtcttgcatcagaatctgcaactgctcgaacttcttctatttgtaagtcactaatcacaagcacttcttctttccttgttctgatattgtaacttctttttttgatatgcttgtatgaatgtgatgttggcagtactgtatctgcaatttgggtatgtctccaggtcatctttccatgttagggcttataggactcaccatttttcttttcttttccatcttcagcactatccttctttatcatggtgcaattagcactcatttataggctccccaatgttctgtttttggttgattcatgaattgactgagcctgtttacaacataggctaagttttgtctagtttggcacaagtattgtaatcctccaataatgctcccgtattttgtgggatttcgcagagcaatgcctgactcatgagtgagtttggagtttgagcacataggagtcgattgtggcttggcatccaacatttttgtttgagtgagaagatctttgatgtatttttgttgcgtgaggaagacagtgttggagtttttttgcacttcaaacccaagaaaatagttaagataccctagctattttagagtaaatttttgatgtaaggcttgaataacttgctttatttgattattgtcacctcatgttattaagatatcatcaacatagactaataagagtagaagctttccgtgtttgttgctatagaatagactagtatttgatttggattactaaaaatctaatgatagaaggaagcactttagcttgtcatactaggccctaagtgcttgtttgaggccataaatgccttgtttaatttgcaaacacggttgggaaactgaggtcaatgaacccttgtggttgagacatgtagacactttcttgaagttcccctttaagaaaaaaatattgatgaatttgttgtatttcccaattgtaagtgtcagcaagtgtgaagatgactctaattgtacatggtttaacaacaaggttgtatgtctcaaaaaagtctatcccaagtgtttgttaaaaaccttttgccacaagcttgactttgtatgtgaaagtcaaactgtcagtattatattttattctaaaaatccatttgttgttgataatttaagcatcacctggattgggaactagaatccatgtgttgttccttactaaagcattattttctgtatccataacatttcccacttaagattagcaagggctgctttaattgttgttggttcaagatctaattctgtggaggttaagtaagtttttggtttaaaaattcccattttggctcgagtaagcatggggtgcacattttgtgttggtggtggattggatgtacttgagcttaaggaattggttgttgaggattagggacagtggagttgctgttagtgatggatataaatgatgacttacttggaggatggtgtgggggaggaggtggtatttaaggtgctggaatgtgagaaactttatatgtgttggaatctatatagttagatgacacagtagtagtagaatggtctgtcaaacaaattttgtatttgagttcattgagtgtatcacttctagctacatagactcgctcactagggtgtaagcacctatacccttttgagtttagacaactttaaataaataagaattttgctaatctaaatgacaccttatgagactcatataaggtcttaatatgggaaaataagagcacccaaagactataaacatgttgtagtcttgtttttgtttgaatagcttttcataggtgaaagaaactcaatttttttggttaggaagcctgtaaatgatgtaggcagctgaggtataggcttcccaccagaaagccaagggcatttgtgcttgcgcaagaatggtgagtcctgtgtcaacaacatgtctatgttttctttcaagcctaccttgttgttgatgtgtgtttgggcaaaaatttcttttaagaatgcttagagtttgaacaatttgtaaagtggttcaaattctttacccaaatcagtttgcacacttttaagttttgtttgaaagaaactctctacataggcattaaaatgtaaaaacaaactgttcacttcagatttggtgtacataggaaataaccatacatattttgtgaagtcatctacaaaactaagatagtatttatacctataaattagacaagattaattcaacatgcattgtagttttattagtggtacttttaaagctgaaatggtgttgcttgccaattcgacaagcatcacaaaaagtgtaatgtccccgcttcaagcctccattgagcccttacacccacggaataatggctcttatacacgagtacgccactctagctgcttcctggattgacgactgaccctacagaccaacacgagtgtttccagcgtgctttgtccccactcgcacgctacctggaaaaacttctcaggaggtcacccatcctgaaattgccccaggtcaagcacacttaactgtggagttctttcgtgataggctaccgaaaaaaaagatgcaccttgttgatataggtagtaccaatcaatccatttaagctc

SEQ ID NO: 307157 - DNA, 1608 bp, Cannabis indica
tagacttggctttaatgattatgagtaatcgttattttaacaattatttttctattagctattggtggtggtggttcgtgctataccatttcacgtttgtgaatggtattgcatatgcattgacaaagtctgttactagtccaatagaagttcatatttggccagatgcttgttgaaagatttcttagtgtactcttgtaagagctaatttatttaattaatgataatggttcttccttcaaaacaaattaaattattataagtgtactaagttatatctatcaattattatatatgtacaaatatacatatcttttcaatattcaaagaacttttatatataattggagacaaaaataactaattagtgtattttaaaatatttgattaaaagaagtagacttgtaataatattaaattttataaagggaaatttgtgatcaagtatcacaccaacaaactatatttataataatagtaagatatatatgagaccttagcaaggaataataaaacattaataaaattaattgaactttctaaaactgatcctggagattactaacagttgacttgtccaactggaaagccttggccaaaatatctcttggaatggcaggattagacccaaaaacagcattagcaatggtaataacaccagggttttggctactcaaagcagagatggaaacagcagattttccagtgccaccaacgttgcgctgaaagtgaaccaatcccaaaggaaagacgaaaacatcacccttttggaggacctttgtgatgagctggttgttaggatttgatgtgacgaaacccacttgaagggtaccttcgagaactgttaggatctccgtggctcgtgggtgcgtgtgcggagccaccacgccgaaaggagcgtagtcaatccgagccaaggagatgccaagagtgttgaggccaggaatgtggaccacgttcactggtgtcacctttgagccctgagggtttgaagtgttgccggctaagtgtagccctttgaacgagaaatgctcagcaattgctagttttgagtccaggcatgcatgtccgtttaatcttgctgcaattaatgagaaaaataaatatttacctgaaattgtttgtactagagtactgcatgtacaaatctcataatgtaacacaaaaagttaattaaataggaatagtaatcttgaaaagattacaacttcatcataatggtattaccacaaaaagttgttacaaggggagaagctttcacccaaattacatttttaacattttggagaagaagttgacaaataacagtagaagcaattaattacatatattttagttttattgatttaatcacaaaataataactatcaattaataaaactctagttacaaatatattgtattcacttcatataaattaggctaattagtaattttttttctgaacttttttggccgttaaaaatttcccccgaactattgagattgttaaatttaaagacttttgtttaatttcattcaattttactatttcagtgattgtttatagtcatgctccccagacttttatacataccaaattatgcccctcaaattttgatatgtact

SEQ ID NO: 307158 - DNA, 1576 bp, Cannabis indica
gagcttgacagagacgtagccctaattttggggtgaactctgaaacaaatctggtgatttctttcctattacttgtttttcattcatttaaacctaaaatctgtgtgtgtgtgtttagatctgggttttctgggttcctagggtttggaatcgagcaagttctcagagagaacttgctctgctagggtttcgagtttgtgagtgtgtgagtgaattgtgtctgagtgtttgggattctagactcttctattgagtctttgaatcaaaggtttcatacgacatcaagattggtgtcgtggggttaatacggggtcgtattggtctaagttttacttagacaagggaaggtcaattctgaccttaagactgatattattggctttgttggtgtagggttaaaacagtaaaatcctacaaatagtatacggtacaatttccactgttttggacagtaagtttagtctaatataggctggctgttgtacttttggggttaggttttggacaagttaaactttattttttaaaagtaccacttttatttaatagttttgagtttcatcatttttcttttcagcgttactctctctcttttgtcaataaccttttttttttgttttggtaaataattaataagctttccatagatctctgtacaaatcaatattttcattgcagccactccaatacccatccaaagacttagaacccatgttgtaattgttttgttagagaagatgagaaaaagaggtgattgtgttgtgtgtttctacctcagtattaatgtatgtatgaatactcattataattaatgcggccagcaaaagagagtagaaacaatctggaatagcaaataaggcttcattaacctcaatctcccaatatatatggtctcattaggagcttagcctgaatagtagaaacaatactggatccttgtctcaccattatcgattaggctacttcctaacaagcttttatagtagctaagaaaagcctcaggaacttaatttattcacatcatctatccaaattccattcatatggaataaacagaattctttgctcccctcttcaagctttgatggaataatttcgtactgtcatctccatctttcatccattctatcttagtattttgtcttaaaaaagagattaaagacttgtgtgcttcattctactcatttcacaactttatttaatcctaaatcaagccgttacaaaaatgagttttagtgattcatgttaagtaactctaaaagtatttagtgacatgttaccgcgtgttattaatgagggtgacttaaaatataattttcagtgacactttatacgtatcactacactcactctctgcacgccataagtgtttagatttagattttgtcagactaataaaatgtaacaacaacacacataatagtcaatatatcctttttttttctttttttttttattcttttactattagttttggagatatatatagtgacccacaaaaagagccactatattagatattttttctaaaagaagtaatatttaattcttataattcaaattttatatattataa

SEQ ID NO: 307159 - DNA, 1954 bp, Cannabis indica
aagtaacaacctctgacagaggaaaaacagaaaagataacagaatacaactaacaaaactattctgtaatatcccccctcaaacgaaatggtgtaggacacaattgaagtttgtttttgaggtagagcaacctgtccttgctgagaacctttgtcaaaatatcagcaacctgatcgatcgaaggaacataacagacttcaagttgtctggccacaataagatcacggacgaagtgtaagtcgatttcaataggtttggatcgagcgtggaagacaggatttgctgcaaggctggcggctccttgattatcaacccatataataggagcagatggcaaaggaatgtggagttcagtcagaacagaggtgatccatttcacttcagcaacatactttgccaaggcacgaaattcactttccgtgctagaacgggcaacaacgggttgtttcttagctgaccatgagacaaggttgccaccatagaatactgtatatccaccagtggaacgacggtcatcggggcagctagcccaatcggcatctgaatagcctgtaaacagagtcgaatggcaggtttgatgagaagtccttcattgatggagcctttgagatatcgaaacagccgtttgcatgcctcccagtgaagagtggtgggggcatgaatgaactggcttaacttgttgacaatgaaagcaatgtctggtcgagttaaagttaagtactgcagtgccccgagtgtgttgcgatatagacttgggtttgaaaacgattcaccattagtgggagagagttgcagggcagtatctgtgggagatggactcggcttagcaccatccatatgaagcctggtcaataattctaaaatgtattttttctgagagaggtgtaaaccagatggtgtcctgtgaacctcaactccaaaaaaaatagtgcaaggcaccaagatttttgacagagaattctgtgttaagatcagtcatgagcttggtgatgagcacatgattagggcctgtaactagtatgtcatcgacagacactaatagataaatcatatcagtgcccgatccatgaacaaagagtgaactgtcgaatttggaggcagagaaacccttgtgatagagtgtctatttgagcttatcattccaggcacggggcgcttgttttaggccgtatagagccttctgaagaaggcacacatgggtttgttttgttggatccacaaagcttgggggatgttgcatataaacagtttcattgagtgtcccatttagaaatgcattagatacatcaagttgttgaaccgaccattgaaaggagacagcaagagtgagcagcagtcgagctgtggttggtttaactacaggactaaatgtctcagtgtagtctatacatggtgtttgagagtatccctttgcaacaagtcttgacttaagtctatcaagagtgacatctgcattgatcttaatcttgtgaacccacttgtttccaacaatggtcatatgaggttggtatgggactaatgtccatattctgtttcgaataagggcatgcatttcattatccatggatgtgtgccattttgggtcagcaagtgcttgttttggagaagtagggttgtgggtaatagggattcgggtaagggatgattggtggagaggtaggctttgggtttgtaaacaccagttatagatcgtgtttgcattgggtgagtgtttggaatggtaacaggttgtagagaaggggctatatgggaggtggggaaggcatagttggtatgtgagtgggttcaggtgatgtttctgtaggaagatcatgttggcttttgtgccctaaataatactcatttcaatataatcagatttacttattaataaagatcagaaatagtattttatgttgcatggttcacatgatttatttcatgattatatttataatgtatgaattccatttaa

SEQ ID NO: 307160 - DNA, 3545 bp, Cannabis indica
tttctttttttttttttaatgaaaggaactcttggtcttctgggtagctcttctaatgaggagtcatcagtgggaaaagtagtagctgatactaaggttgaagaagagtatgtgggtatgtcatctgaagttgagtctgatcttgaactgggtttggggctaagccttggtagttgtgttggtgggaaatcatctaagccgtccacttggggtgagtgtggtcgtattttgatggctaaggacttcccttcttctcgtggaccaaactctcgtttgactaatattaagactggttctgttgctgttgggactaaaagaactgctgctgactctgtttctcaagatggtggctcttctcctcctagggtcaggtattaacttctctctttctctttctgtttggttactgggaaaattgaggaaaataagcagttgggtatttgaaattgttatcaagattatgttttgatgatttcattatgatttgtgctgtgaaaacagtcaggttgtgggttggccaccaataagagcttcaaggttgcataatcaatcaaagagttcaaggacaggtgaagatgagaaggtgattggagaaaaagaaaaatctaaggagggtttgatgaagaagaagaataataataacaataatgatgttaatggcaaagaacaagggcatcttggttatgtcaaagtcaatatagatggtgtagctatagggagaaaagttgacttgagtgctcactcttgttatgaaactttatcccaaactttggttgacatgtttttcaaaccaaatttgactgtcaacttgaatggttagttacttagttagttaccattactaagcttttggatgatctttctttaatttgttgttttggtattgactgttgtaaataatgtctatttagggttaaatggagagaaggagcaagcagcaaaatcttccaagcttttggatggatcttctgagtttgctttgacttatgaagacaaagatggtgattggatgcttgtaggagatgtcccttgggggtatgctaattctctttagttatactaattaactagataattgtagtttcatttctttttaacaacgaaaatatgagaaatcgtcgatccaaactagctcatcatccaccctgagtgcactatgttgtccatggaagataattgatcaatttagtatttgcttatcatattgcatctttctcatttttccattttaggatgttcctccgctcggtgaaaaggctgcgaatcatgagaacttcagaagctaatggactcggtatgttaattcgcagttaatcttatgtttagtttcgatttcaagcaattttttagctcaagtcaagttggattatctattgcagcagctccaagatttcaagaaaggaatgaaagacaaaggtgcaaaccgatatagaatgattttctactttctttgttccttttctttataatgtgccacagtttttacaacagaagcaaagtagtagagaagttgatgagatagtgttttgctgagattggtcttcacaaccagttttatatgtttgctctctctttttttttttgattttccaaatatatttttatttcattttggtttaaaaaccactctttggttcttcttgttgtctttaatcttcttttttatggtgaaatattagggctatgttagtttttacttttacaacttcatatacagtgctagcagaacagcctgcttacttggttaactgctggttttctcatactgtaaatattggagtatctttatatatatatattatatctctagagtgttttagtttgttgaaagaaacatcttggtgttgttttgattattgttaaaaaaatcctattatttttggttgtgttttatattttatttactcttttattacatcaaaaattacatctagaataaataggatttataaaactcgaactatgactcttgtaaagtttttgtctttgcaaagatttctttcgaactataaaaatcgttgcgaatatcccctatagttgcattctgctcatttctttaaataatttgttgatataacactaatataacattaatctagttaaatgaataaatagcagtctaatgataaataatgagagtatatatgtgtattcttaaagctactatttgtaaatttgacgccattaaattggattttaggtaacttgattgaagctattaaataaattaatgtactgcaattatacttataatttatagctacataaataaattattttgaaagatgatcaaaatgtaactggaggacatttttaacaatttgcatatttaggaagaattttcgcaacaagaaaaaaggtaaaattttattagggtaaaattttatagcagtcatagtttagggtaaaaattctatttattcttacatcatagtttagggtaaaaattctatttattcttacatctatgtataaactagctaagaaaacttgccttttacagcaagtaatctcatagaggaagcttaagtcttgacagagtttcaaactaaattggaaaattttccattaacaaatgaatctcatcctgagaaaagggtataaagaagtttcaatttttttttgtttatttattttgatttattgttggagatataaaataaaaataaattattttattttttatacttaatattttggttgtttaaagaaaagtattaataaatatgaaatatttaatattgagaaaataacaaatttaaaacaaccaatttatgtattattgtagattagattgaacgaacatctttttactacttagtcgtttctattagtcgtttctacatcaagtatccaaccattttttcaaaatagtcttattcgatctcaatagaagaatcggtattttattactaactacaaatacgttataatcaaggattactatatcaatcactatctacttcaaaaatcccaaatgaaaagagaaacatttacatgaaaaattgttgtccttgctcatgaaaaattggacaatgttgttaattaactttatgcaatcataacactttagacctctcaagctaatttctacccaattcaaggaatagttagtggtaatggctttaggcataattaccttctttttaaatgattgtgggacaactgtattttacaatatatcaaaaatttcaagctctttttttgatttgatagtcatgctttcttgctggtttccattttatatttctcaaagtaatttataaagtttcactcaaaacaaaattaggttattacttttcaggacatgaccacattctctcaatttggccaaagtgaaagtgaaatttgagtgactgaaactcacttcagtaagattttctttctagttcatctaacttcaaacaaaccattatttgttatgtatttctttttaaagcactaccgatgtaaaaaagacttttatgtaggggtgttcacaaagtatccgatccaatccaatccgcacgatccaatccaatccaatccgcaaaatgcggatatcc

SEQ ID NO: 307161 - DNA, 2356 bp, Cannabis indica
ctctaattttccacccatacaaaatgatggccctgatctttctggttcaatataatccccttgtaacctctcttcaaatctctggtcactacaattcaagaaccaattcaatgatgtcctaatacccttgttctgtaacctattgtacctaggtttaatcctagactctaaactataagtaaagtattcaggaaactccacaagctcttgcaatggtctccccatctcactcttgaaaaaataataactgttcttcattcgatcaactctcaatgcaaccaactgtgggcatttcacaaccatcttagctacatcaccggttggtaatccccgtccgagcagaaactcaacaggtttcagtatcacattttggttaagactgataatctgtggcatcttctccattactcgagcaaagccttcgggatcaaccttgagcttcaaattgaaaaagtattgttgtgaagacatcttagctttcaatggcaacccaatgatttgtggatactgagctataacagatgcaagtgattcttttctaactccaaaactcaacaaacattccacattaggcttaactgtctcatcaagatcataaccaagtatgtaagccctcttctccaacatcctagataaaatcttcttaggcaaacctaatgaaactaagtaatcaacaagtggtttaatcattgtcccaactctcattcccaaaaaataagggtactgagttaccattggaccaatatctctaggattaacaccaatactaacaagataagcaactgaggtactcattgttccttcaagcttaaacccaagtatttcaggatacttcatcaaaacataaccaatatcttccttctcaacatcgagtccgcgaagcgatttaataacaggagcaagctcaacaacaacactagcatgtaaaacttgaggataattcttaacaaactcaccaagttttgatctttgaataccaatcttctccaagtaacctaaaacaggtataagattttttctaacactacatccaagcattaaagggtactcatttatgtcatcaacagttaatcctaacctcattatgaactcaactcgttctctcataacctcaactgtagaaggcaattctaagctctctaattcatcagtaattatgcctaagctctttaagtaatcacatattataaccctagacacaagcttctcttttcttccctgaaccacaccccaagtcactgagggcatttcgtactcgggaaactgagttgagaacacacaaacctgtaaaacccttgaagggttttggatttggggaagttggggagatgggttttggttggattgtgaaactgggtaagaatttggtgggaattttggacttgtggagagtattttggtgattattcttcttcctctcagtagtgagctcgccattttatgattaaattagaacaaattaaagcaacgaagaatattactgtaaagattaaaatcaataagaagagggaatctaagggcttgcttacctgtgtgtttatggagttttgagagaagaactttttcgactgagccaaaccagagtttgaagaagaagaagaagaaggaagagcatttgagaagcagggtttagatgggcttgggcttgggcttgaatttttttaatgataaatatggcatttttatcatattcttacaaaattaccataaaatgagaatcttcaagttaatgtcatgaatgagcatagctattaggtagaggtgtttaccgattcgtttctggattttcaattttcatttttttaaactaaactaatgttatgattttttaaaaattcaaaaccaaaccagatcaattatcaaactaaactaaactaaaccactcaaaaacgaattggtttaagtatatataaaataattatgtgaattggtttgatttgaacagctagcgagatttccaaaactgtgaccaacccagagaattttaaatggttcgaattgatcgagtaattcacaccagatttatttggttgtctcaaatagtttggtccagattagttgaagtttagaactacacactgcggattacaacactcctattattaggtaccttaagatgtctaagattgtactataccaatatgcatcttaagtggtaagtaatttgtcaaattatttattcaatcaaatgtgtgaaactcggtaatagatttgtattgataacgtatgttaacttattacgagattgtactgataacgacatgttaactttttatagtaattgacactttaagttaaaaaattgaaagttaataagagcatgtttggtattattttttgttttttgttttcaaaa

SEQ ID NO: 307162 - DNA, 2121 bp, Cannabis indica
gtataggctgatactagggttggtggtactgtactgtttgaccgtatcacatcggtaaggctagagtatgactagcagctggagtatgaccagtgaaccgagtataggctgatactgtaacacatcggtaaagctagagcatgactagcagctagagtatgactagtgtaccgagtataggctattactttgtcaaaagtaccgtcgtacgaacgttcgggactcagtatcgtgtgggacacggcagttaggattgtgatcaggggtatgggcgtctgatcataacccaggcaatcagtttccaagatcacatgtggccattgattatctagatccaactcaaagctttacggatcctaatttcctcagcagcttcaagtgtcaccgagccatgaaacatccttgtgcgaccctcgtgtgctcctctagccacatacccaacactgtagctttaggcctcgttaaacactgccgcatcaacattgatcttaatgctattattatttggtgctacccattgcttcgctccgtctcccaaaataaaaccagtgaaaaaaagctcattaccagatctttgagcaagtagcccttgattaagatagtttttagccaatgaaacaatgttatccgcacccaccactttgttttgccaaactctatcattcctaacattccaaatagcccagaacagtgccacaaaaaacttgatacggtcaatatcgaacaacaagaactactcaatgcaccaatcaagaaaagaaggaccaaattacatatttgtaccaatgcccacccgattccaacataattgagtggctagataggtgaaaagaacatgcaggatggtttccacctctaaagaacaaactggacaaggaataccaacctcaacgttcttcgatcggagttgagacatagtagggagacaatttttaccagctctccacaacagattcttaatttttggtggtattttgagttactaaagcttcttccaaaatctatccacatccaaatcatcaaaactagtttcaccatttgactcttaaagaatttcgtaggtgctcttcacagtatacaaccctaaattttccttgtgccatattagggtgtccgtagtttgttgagtttggattggaatctgcaacaccaactcgcgatcccgctactccaatacatctatcaagactttggcatcccaaccataccattaacagtcataaggttacacactcgagcatgggagagacttgggtgagaagaaataattattgggttctcagtatcaggaagccacgactcacaaagaatagggatactgatgccgtcccccacaatccaccgagtgcttttcattattacagattgcacttctaagatgcttcgccaatcaacacttggattggagtcaataattgctgtaaggaatgacccattgggataatatctagctttgaagatacgtgccacaagagaagctggtttgacaaggagcttccagccttgcttacccaagagagccaaattaaaatcacaaagattatgaaagcccattccgcccttagttttgtgtttgcaaagacgcttccatgacatccaatagataccgggggtgagtattactagatgattgccaccgtaatttagtcatcaagctctccatatctttagtaatctcaagaggcaacaaaaagacgctcatagcataactagaaagagcctgagcaaccattttgattaagatttacttgtccgcacgagagagaaattttgtaccataaccttgtattcttttccaaaccttttcttcaaatatcctaaagccactaatttattatggcttaatgagctagggagaccgagatacaaactgcattcatgagcaatgcccatacccagcaactcagcaagtcttactttcaaattcgcattggtattggagctaaagaagattgatgacttggtgaaatttacctttcgccccaatgctaattcaaacttgtgaagaacttcttggacccgaaccgcttcctcatgagtagctttacaatacaaatagttgtcatcaacaaaaagcatgtgggatatccttggagtgccattggccactttacacccatg

SEQ ID NO: 307163 - DNA, 1035 bp, Cannabis indica
ttttactataagtaatttgcgtcataaatacttaagttttacgtcaggtagtagataagtacgtaagttatatttttgacaataaaaatacctttcgttactagtgtagaactggaaatttactatgggttgatgcatttagattttgaggtatatttagatctgagcattttgagtggaactttgtttgttgggtagatctaaattagattgattctatatgtatttgtagacgaataggttcgaattaaaggagtagggacaggatgttaatttttgtgtaatttttgtgcaaggtttttgtgtggctttacttatatacgtttgattgatgttgtatttgtaaggttctttttgtcggttctgggaaatttgagtagagctttgtttgttggattagttagatcaaccttctcttattgagaatgtttttgagtttaagtgggtgaatggtttcgggtgaggaaattttttaagatttttggctgaaaattttttttgggttggggatgcctttgttaagaaaacaatggagaacacgatgatgagggagatgaatagatttagttttttattaatattattattattttgtgtatttagatttataattaggtttaattttaatttttaattttaaaatgatttttaaatattttaatgaattttaaatagtaaaaataataattaaatgacatggatcaatgtgaggatgacatgtggatacttatacgtaacttaatggagaagtacctacggaagttttagaattctaatagaagtatttttacggttaaaattttgagataaatttagctatttatgtcttactacttatttacaagctatacaagaaatggttacatgtttaacgttatctttatggctatttatttctttttgtaatcagtgtggcgttccttggtaacataatggtatttaatagggaaattttactatttgaccctaataaaatatctcatatcaaaatttataccaatttgtataaaacaattccactattactcatttcta

SEQ ID NO: 307164 - DNA, 2434 bp, Cannabis indica
taatttgtttttcctttctaatttgagtactaactctgttgtctcaagatcttattcggctttcaggttcaatagtttatgagaagtcaaggtccaattcaagatttcaagatttaggtgcctcaattcaaggtataattctctagctttcttttctttgatcttcctaagctcaagataggttgtagtgtatgattttgtgagttaagtttctgtgcattttagggttgtttgattttgagttttggtgttagattgaatttatttgcgttgttttaggctttattggttgattattgaggtgtttgtgctaaattggagcttgagaagtctagtttggtcctttaatgttgttttgaaattctaaatttattattaactttgttgcccaaattgggtctattatgttatatacatatgttctggaggttattggaaagtttagatttgaattggagtgctggggatatttttgggttttcctggactgaaccagtcaaacggttcagggggacctataggaaccggtcgaccggtttagggggacctgtaggaattggtcaaccgattggtccccaagaaaccccaccgaatgcacttctagttggggaactgtctgccggttgggataattttttgaaccctagttttcccgtttttgtgatttttagggtattatcatgttatccatcgatagggatatttctagttttaattttaagtctccaggaagtggtttagagtgtctctcatcagaatttcgaatattttggtttagggccctgtaaagcatcgagctattgttccactgaggctaaccggcacacttgagcatggaaacgacataagattggcataaaatatattatatatgcatggtttatttgtgattgtatttattttgggttatatcataacggcacaaccattgtgtcaattcgacagtacaggtaccgtactggttaagagtgatcttcaccccaaaaagtattagttggtgctattatagcgacacaaccattgtgtcagtttggcgatacaggtaccgtacatgttaagagtgatatcatgaccaattgtacttttgggtgctattggtgctatcatagcggtacgaacatagtgtgagtctcgcagtgcgatcatagtgttggtagtgggtgagatcatggtcagtagcaactgttgagaatgttcttaactatttagagcttagcatttgggctcaagacaacttaagcataaaaccggtattgcattgttttatattttttatgcatattttactgagtcggtcgactcattagtttgctaccttgtgtaggtaagagtaaagctaaggtggaggagcactgtgtaggggctcagcaaggattgtacatatcgcgacagtgcattctagagggtttcggtcttactaaattttgcgttatattttttagcttcatgtagtttgtaaaaaaataaaatatatattatgtaactatattcttgctataagtaatttttaactgtggttttaaaattcaggagcccgacctacgaggttttataaatttaatataacaatattaatatgattagcaattttttgaatacaggcattagaattattatgaatgtgtacatggtactgagaatgtgtgatatagacacaatatgagtttgtgaatcgatatattatggttggtatattttgtacgttttatgttatatactgtatgttgtatgttgtatgctaatatctcaggtacaaatgaggggtgctcatgggtggggcatgatacgggataaggtcattaaatgtagatataccctagcatgtctttatcttacttgtgtatgatatttttatggtaaggtgtgatacgacgatagtgctattgaatgtagagatattttatttcatagcaatggtatggctaaatgtgcaaaggttattgttgtgctagtatatgcccggttatgtatgtaatggtcatgatatgataaatggtatgatatggttaacatataattattttataatattatagttattctatgagtataatataagagttatgatctctacatatgatgttatgattatttcatagtattatattactaatacatctgtcatgatttatttaattttaaataattaaatttcgaaaataaaataattaaataattaaataaaaaataaaatttaattttcgaaaattaaaaaaaaatatttatttattttaaaaaataataaaataaatttaaatttcgaaattattttaaaaataaatatttaaaattaaacctactttttgaaaaattaggtttcaactaacctaaatatcatttcaaaatttgctaactacttttaaaaattaaagttattttataaaaaaattaaataaaaattaaaaaaaatataaattaaatatctttttcagat

SEQ ID NO: 307165 - DNA, 2650 bp, Cannabis indica
gcatcaatatatccattttaagggggtacattgtagaatcaccctatattaatttagaccacaatatttatgtaaatagattatttttaacgttgcttgtaaatttttcttaaattttagagtcatttagaaaaaaaaaaaaaaaaaaaaagaacaaagtaacaataaaattctatatcaatacaacaagtaactaacatgttgtcttatctattatgtattttttaaaataataaatcattgtatttaatattatgtagtcataaacaaatcactacaagttgattaattctggccattactatacaagaacctatatatatagacagtaagacagataatagttaagtgtgggtgtgtggtgtggtgtgatatgtgggtggaactcggtcacggacgggatgactagcagtgggtccaggcagtactactgaggaaaatcctttccgtgaccgaccgcctctcgtgctcggctaacaaatgacgacaaaatatataccgctgtcttcaaacccatgacactctgttgtattaatccttaatcgattcccccaatcctggcagaaagcaagactccattatggtccacattatcattaccccaaattggccattaattatcactattatgtcacaagctaattacattccaaagatctaagtctaatgtgatcaatactaacaaacagccgaaaagggtattaccgtcattctactctaaaacactaataactttctcgatttatattttgtataaaggacttcttatctacctccaatcctcatgcacattattatcgtatagataacacactcaaaattaacgttatctcgtcaccatgaacagcatgacaatatccactttcttcttcttcttctacttcttatcttctcatttcatctcctcctacagtgcttctgatccatgtgcctctcagtcaaacagcttattagatctctctgtcatacccatctacagcaaatgctctcctttcaccaccgcaaaggctgactccttagtcaacacagtcatcaacatggcctcaaaagacccgcaacgccttcagtatttgtccacccttgcggcccaaaagaccacctcagccccaatcgcttcgggccagcaggcactccacattggtaactacatagtacgggcaaagataggcaccccggggcagctcctcttcatggttctcgataccagtaacgacgcagcttgggccccatgttcgggctgcactggctgctcatcaacaactttctctccaaactcatcttccacttttagcctattagattgctctgttgctcaatgtactcaggtccgtggactttcttgtccggttactggtacatccccttccccttgtgtttttaaccaatcctacggtggagattcctccttctcggcctcattgtcccatgattctttgcggttagccaaagatgttattcccaatttcgctttcggatgcgtcaactccgtctctggtgggtccgttccgccacaaggcttgttgggcctaggtcgtgggccaatgtcattgctctctcagtccggttcactctactccggagtattctcctactgcttgcccagcttcaaatcctattacttctctgggtcgctcaaactcggcccaatgggccagcccaagaacatccggaccaccccattactcaaaaaccctcatcgaccatccctttactatgtcaaccttacaggagttagcgtgggacgggtcctggtcaacatagccccagaatacctagcatttaacccgcaaaccggatccggaaccgtaatagactcgggtacggttataacccggttcgtggaaccagtttacgcggcgataagggaggagtttaggaaacaagtgaagggaccgttctcaacgctaggagcgttcgacacgtgttttgaagtgaatagagaagagctggcaccgttcataacgcttcactttactgggatggacctgaagctgccactggagaacagcttgatacacagcagcgccgggacggtggcatgcctggcgatggcggcggcaccgacgaacgtgaactctgtgctgaacgtgatcgctaatttgcagcagcagaatctgaggatattgtttgatgtggccaattctcgtttgggcattgcccgtgagctttgtaattaagtaacttacaagtaggtaatgagaatgaatgatccgtacgtacgtagtcctttttctttactaaattaataaattctgtcgtaagatggatatatgatattggattatgtatgtataatgtattaatttgattttaattacgtacccaacaaatattcgatgatctttgtcgcgatattttgatcttgatgaatgtttactttgactgtgggccgatagagcttaacagcaaacaggggcggaggggacacatgcccccctcaactttggggtaagttgaaaaatgcctcttttattcatcaattaatcaaatttacctctaattttatatttatttgaaacatacctctttttatatgtattgtacccaaaatacccttacataagagaatcacaatgagtatcttgaagtgacagggacaaaattggtacaatgtttaaaaaaagaggtaaaaatgatagattttaaaaaa

SEQ ID NO: 307166 - DNA, 1604 bp, Cannabis indica
atacctctagttcagcagccgaattgatttgatcaaagtccaggggagtttctgtaattccagcatttccacttgaacttgcctcaacttgaactcctggatcggattcaattagacgggattcagaagtcgatagtaaggtttcaacaacattcccacagcttgatgtgggaacattgtccaccacaggatccttttcatcttgtacagcttcagtttcagaattaacagggaattcggaacaagatacagtcaaagtctgatccatcttctctttctgactagctgtttcatacacatcatttccctcacaaggaatagaatttacaattggggttttactagattctttcgtttcctgcatattactagccttttcttcttcctccgggccactctcggatgagctccctccagaaaattctccaacttgtttcacaccagttacagagccagaactatcatcgccatccttactagaatcagaatgattcccattattcaaaacagtggatttctcactctcctttcctacgtcactctcatcatcttcatctgaatcatcactatcacttacacccatttggcgctttcccatcctaatcaatttaaaatgttcagatatcaatatcaatgagcttaaaatatttagcaggagccagcaaagaataacgatagcatggatgcataaggaaaaatatgaacaaaaaggaacaaaattgaagcaagaaaatttaccatattttcaatcgcttagcgtcagcagcatcgcccttaaaggcccctttacgcttccctttcaaaccctcttcacgctttcccttcacggcctctctaactgaatctaaaacctcagacacacagcgttcggactcttccctatacttagcgacatacttctcggccgcaccatccccagcgcccttctttcctttcttcgcaactttctttagaaagtcatgggccttcttctccagcttcctctcctcctccgtagctttccactcctccagcctcttctctgcgttcacgtgtctcagccttctcccactcatatcgcgacacgcgtcgaagttgttcgtcttcttcaagtttcttgtccccgcgcctcgaagcagcgaaccaaaccctcccttcccgccgcgaagacgaagagtcagatgcaccgtcggaaagctcagatcctcgtcggcacacgaaagcacggaatcatcgtcgagatggcgcgatccggtgatcaaccgctggagatgcgagggtattttggtgatttcctggaggcggtgcttgacatcgttagcgtaaacttgtggggttgtgtacctcaaaatttagggttttcctctgcagaagcatgaccatcagctggtagatcctgggctcaccggaaattgcagtgacatccatgatcacagatggaaagggctgtttctagggtttggaatcagtaggggatcaaaatcttaagccaggagagaatggatgtaattgtaaacaatcttattttattggggtcactctatttattctatggatttttcctttcctactgcaaatatatatatactaggtgaatgtacgtgccgagccacgtattgctagtt

SEQ ID NO: 307167 - DNA, 1210 bp, Cannabis indica
gtatcgcccccctcaacttaaattctgggtccgccactaatgatatatacgtcaattttaatagcaaacgctaaaagcatatatgtcagctgcaaactgacgaaagatatcatatttgtagtagtgttggattttctctttggaggggttcagccatgagaggtttaggagagaaagagtgtttccaagttctgattcttattttctaagttttctacataattccaagattttatgacaagcttaataaatggaaatactaaaatgctttcacttaaataataatataaatgtaagaaaatagtcattcccccaataactcatgtaaacctataatttctatttgttcataaaagaaaatttcggtacctttaaaatacaaatttataccaatgtgttatttttgttaatccattgagttttcacaattttccatcacaaaataataaaatacttatttacatatatagcacacaaataattttataaaatctccataatttagaaagaatatgatcatatttacttagttttttttaataataggctttatgtctaaatttctcatattatttcataatttacattaatatactagttaattattaaacttgtatgtttatttatgtcaacattacatgttaagacaaaaaagtcacaatactatgcaatgggtggagagttttcttctattataaaatattagttgctttatctttttgaaagaacatactaagacaatctaaggacatactaagtcagtctaagaacatactaagccaactcgtaaaccgcaacttaaaattgtgattatcataggaaaaaattctcttaaaatttgataataaaactatttaatatcataaaagataacaaacttaactctccaccgagatcctttatagtcttagaccaataatatttcacttttactctctatgaagatgctttatagtcttagaccaataatgtctcacttttgccttccatggagacgttttatagtcttagaccatattcaatagatagtaaaaaagggccaagatacaaaatgatcctaaatttaacaattaagttaataaatgtctctttttataaaaaattaacaaaatgtcaattttgttaaaagtttgatgatgaaattacaattataaccttaaataattaagtgtttggtatagttattttgcacaatagtatatcgttttta

SEQ ID NO: 307168 - DNA, 1652 bp, Cannabis indica
caaaaagaaaaactacacatattttttggtgatcttttgaaatattataataaagacatacacaatctactccctaaattaactgcttttatatatacccacttagactgtagagtacttggtttctatgaaagagatggacaaggacatcttgaactggaaagatcataaggcctctgatctccttaacgaccaaccacaagacttcaacaccttcagactccaacgtgtgatgatgatgaacatgaaacagcagccaatgtcgactacgtctcataataataataataataaatcacttttaagcaagcaatggattagtatacacctaaggaaacaaaggaggcaatggttgaaaaacgtagaaggatcaatcatggtggtggccactctcattgtgtccaccacatttcaggccgcagttaaccctcccggcggtgtctggcaacaaacaaacaacacaacccaagcaagcaacgacatttctgattgcagcaaccaaacatgtattgcaggaacttcggtcatggctcatattgacaacgacaattatgccttctttgtttggttcaacagcattgcttttctgggttctcttagtataataattttgattattgggggagtacctacgaacaataagttttggatttggctatttgatttggtgttgtttgttactctgttttgcgtgggtcagtctttcttacatgccaatatcttagtgactccagatcatggtgattattatgaaagccttgatacggtatacaaatgctccatttatgtgtgggaggggatgtttgtggttatgggggcttggcaccttgcttaccttgtcattaagctacgaaattggttgcacaagcgcagctgctgcaatattaatggcagaattaaataattcggtggggagcctcataaataattgagaatatttgttagcttgatttttgtttctatttgaaagaatgaataaattgtagtgttaattaaggaactaattacgtacgcgtgcatggtaagtattacgttgtcgtttaatttgcagatgtaaaatgtttcaaattaataccgaaagggtcaatgaattaattgtgacaaagaatcacaccactatattattacaaaatagatagtactgctaccaacctccacatctaaattggaactataaacccaaatcagtggaactatattgaaattaaaacaacaaattgagaaggggcacactggtgagcaataaatattgacaacttgattggttataagacgtttgcaagaagactcttgatcaccaatagtaaacaatagatatttgggagcccaaaacaaaaattaaacgtctcattaggcctttacagagaagattcttaactaacggttgaaagcttaaagaagagataacatacctctgttgaggccaatgtgtgctggcaaagagatgtggtctatagagaggcgccttgttcgaaggtgagggtagtatggtttggtttcgtggtttgggatgcttggaaggttaggtccagcgttttctcagtggttgaagactcagtcctttgcaaatcgagttgcacattttattgctatatgaacattgctattaggcaccagcctagcaccttctcgacatgttgcgttacaattgg

SEQ ID NO: 307169 - DNA, 2049 bp, Cannabis indica
atatttaaaagttaccaaaaatctaacgaacaataaaagtattttctcaatttaccactaaaggacaaaatcgagtaaaagtattttatttatttcttaggatcagtgtcgtctaagcaatcatattactactgatgtatataaactagaaagctctgtccacatatatataaatatatataaagcaattgttcattcatttataccttttgcctttctcttttcttgctcttttttgtattttattaatttaatctatgaagaataaacttgcagtcaagaatgctagagaattaagtgatatatgtcttcaatttcatctaagaaaaagacaatgccagttacaagaatagtggaactaataagaacagtatgacccccatcccccatttttagagagtacttatttatatataatatattatatatgtgtgtttttaattaaagggtaactttaggcattcaaattacaaaagatggtagcatagttagaagaatatttagggacatgtagttgaattgagaaagttaaataaagcagcctgccataatgattattggtataattttttggctggaaaatgttcatcatatatagtccaccacaaaagctaatctgtttttaaacaaatacattcctaaataaaataccaaaaatgaaatctttaataggctgtacacaacacaaataaattccaataaagtactcagctcaaccttcaagccttgtcttccaagaaaccataagtttagtttgttaagataccaaacttattagctagttggtacataggtttgcaaatggctttggttagatagtttaatttgataatccacaaataacttcaaatttagaaaaagggtaataaaaaaaagccaagtaatgaatagaaggggaaaaataaaaaaaaataaaaaaaaaggtgggtatgttttgataattttattgttggtggggacaaacaagcattttccaataaaatcatgaaattagtgcactcctgtgtatcttttggaggttttacacttttgaaccgaccagaccatgatgaggggagtgaaaaagaggggcctttcttttgctatcttattcccttccttctctcacccatttcccctaattattcttcatgtactacatacatcatttttgtattgatgtttctatccccactagcctattacacactcaatacactaattttagaaaattataatcgatcaacgttttcttttctctctctctctctctcttttgttattgagttgtaatgtttattagaatctaacatatttagattttgaacaagacagagaaaaaaaaaagtttaattaaataagatagatttttcttttcacgactcttgtgcaatcttttcttatagggtgttcgatatgagagggtattgcgttgtactataagattgactttgtaacgaattattatttaatttttttcataaataaaaaaaagaaccatacaatttttatctagtttgttaaaataaagaaaaacaaaattgtatgttttgattaaagttcacgaggtctaaaggctattcccatagtttctttcactttcacatatgtacttcatttctagaaagttaacaatgtgagttaaataagacacaattgttgggtggtgaaacaaaagaaagtaagatgaaaaagaaacttaaatatgattaccataatataatcagaatatatctaatacctaaactatattctttttcttaattcaattcaatgccttttgtcccaacgatgtaatgaaccttggatcacaactaaataaagaatctaaagcaatggttttgatacacacaagagagaccatcatatctagttgtccaaccgaaaaagtgaatactatttatttgattttgtggctggcttgttgagttaagctaatcttccaatgtgaagataaagttcaaagaaaccttttttcataacatatgagttgtcgatttgtttatcatcactaccacctttacaaacatatttagattatgggttgaggttggagagagagagagagag

SEQ ID NO: 307170 - DNA, 785 bp, Cannabis indica
ggatatccacataattaatactatttataacaataatgtaatagtatagctaggctgccatcgtcaaattaataccacttcactttaatatcatttagctttttattaattaggatagttttctccaattttattaatagccacctcatattaaaatttaggaatacaatttgatacatatacaaatcactacattatatattaagtgtttatattataaaattaattaaaaataaaaatttctcttttcccataaaagtttgatcatataatttttaagggttcgaaaattttgaaatttatacatatcaagttttgttggaatttaaccttatatatgtaggaacattaatttattccacacatacttttatagccaaaaaaaccataattacatattgcggaatatattggtgtgatataacaacttttctcatgctagcaatagcagcaatagctccaagcctgcaaaatgtaagagtaagtaataaaaaatcgtacgttcaaatgcaacgtacatgttgtcgtaagatataattaaccaagtaagaatactaattacgtccttgtacgacacaactagagttattcattaaccaacactacttgcagtacactgatcaaatatcctattttgacttttaattagttttatctgtacattatttgagaaggaaaaaaaagtttttataatctgtacatttagggctcgtttggaacgccgtattaggtcgtattatattgtattgtatcatattgaattggattatatatcatattttata

SEQ ID NO: 307171 - DNA, 685 bp, Cannabis indica
gtgtaaatattatttcacttaaaaatattcattttttttatcaagaaggaagaatgcttcattaatcacaaaccaaagcaatatttacaacaaagcagtagcctacttgctgcaaaccagcaagcaactcactgtagaactaacacaaacaatagctctaattacgtaataaattttgtatgtatagtctttcatccttcctcaattttctatttttaacggcttgtattctatatttcacggtacacttaatctctcgactatatgcaaactggaattagagtatccctccaaattacatctgttcctgtttagccaaatattataacaaactgctgccaaaataaccacattcaatctctgaatagtccttgaatttttcgaattctgccaactgttccagcccgagaagtgcaaaggccaagctcttcaaccaatccactcaaaaatctgctcaattaccttttgtgacagtaagcaggagaaaaataaatgctcatgggattcatttgcatagccacaaaaaggtaaagcaccgaaaccaaaggcaaatgaaacttcagcaagttgtctctagtcaaaaattgagaattcacgacttgccaaagaaaaagggataaataccattttagaccctgtgttttgtaaaaagttaccaaattggatcctctgttttgttaaatga

SEQ ID NO: 307172 - DNA, 1543 bp, Cannabis indica
actgaaaacaaaagcagcaggtagaagaggacgaaaccatcctgtccccaataggcatagtcctagaaaaagccctccaaaaagcaccatcttcagttctcgggtgtaaatcattattccaaatccacttccaaaaaggtacgtggacccaaaccgctcaccctgctgcaccatgtatgcttgtttaacagagaacatgccattattggcctctttccaaacgaggagatcattactaagcttagtcgctaattggatggtactgatcttctttccaacttcgacttcaaagagaaaacagagatagttagaattccatagcctcgttctgtgaatttagtaagtctgccaccgtcctcaaacctggagctttgtctcgaatagactccatgagatttctgaactcttcataatttagcaaaggaatccaaggttgataccaaacatcgatcgaagccccggaagctataaccgtacaagatcctttcataatcacatgcctagcattgagaatccctttccacacaaaagaatccgagtttctccttttcacagaccaaaaagattcccgagggaaatattttgctttgaaagcttcagtccaaggtcatgaaatacccgaggcaatacaccaggccagtttggccaaaaaggcatgattggtgtcttccattcttctaaaacccaggcctccagaaaacttaggccgacacagcgagtcccaagatatagtcgccaaaaatctctgtttatccagcctcccactccaccaaaattttctgataatagcatctaactctcgacaagaagtgagagcaagttgataggtggacatcgaatacgaaggaatggctgaagcaatggcttttacagctaccattctccctgcaaaggatagggagcgcattttccacccttccaaacgttgcataagctttgtccttaaaaaatcgaagtccttcttcttctttctcgaaaatacaaaagggttacccaagtatttttcggcttcattgatggtgctaatacccatctccgctttaatattctcccgaagagatttaacacagtttcttgaaaagagaatgtctgatttctgtttactacataattgacccgaccattcctcaaacttcttcaaacatatgccaatgttgctagcttcaaccgtattagctctggcaaaaagtaaagtgtcatcagcaaacattaaatgagaaacagcaggggcatttcttgaaatcttaataccatgaatttctccattttcttgagctctatccaggagtcttgacagaatttcattacaaagcaagaaaagatagggggacatgggatctccttgacgaagacccctctccggcctaatcttcttgagcggtttcccgtttaagagcactgaataagagactgtggttacacactgcataattaagttgacaaagtccacacagaaaccaaaatgtgacagtcagtagtcccgtgatccgtaaggggaaataccgggtaagctgtgcaatcccacaccgcctggggaaggtca

SEQ ID NO: 307173 - DNA, 2597 bp, Cannabis indica
aggttataactcccacctaaatttattttaaaagaactaggcgatagtagattgctatgatagttactaaattctctagattcaatgatcatataaagatcaaaagagtttaatggagacaagtcccaatcccaactagcatccccatgagaatttgtactatactagtcggcaattccatagtaagaactattactagtaaactgaacatgaaattttaggtaccaactttcaaacctatgacatagaagattaacacagttctagatgtaaaagttgtactaactatccctaaacctgaccaaacgagtatgggttgtatcgaggacggtaggggaccatccataaaaatgagatgaattacctcgaggagcccctttaggattcttggtggcttctcgagttgcgaggttatttctatagcgagagcaagtcacataatcacattcctagtcatcggcattcacaaggacttgttcccaaatagagtacttgtgatcctttacacccatggtgctttaagtctttttgagaaggccataagccctgagattgttttcatgcaacaaaaagttaggtgtagcagactgattggggaggttaactagttgctcatgacaacattgaatagccatattgggggtatgtcttttcaaaagggctaaaaaataaaagaaaatatacaatgagtaatgagcatgaaatcataacacaagaccaatttaaacaagaacaaaaatacactatatgtattaattggaaagtagttgtcttgactggatgaaggctacttgtccataagaaatcttgcttgaactccttatttgcaagtttgacaatcatcttattgtcaccactatgtgttcccaaataatagacgtcgcaagaaaagtttttcctcgcatggtaagctttaaaggcgtagaagcatatgacttccaaaggagaagggccttcccatcgcagaatatggtagaaatatttcaaataggcaaggatcatgtaagccttggggatatgttggaaaggtgcaacgccaatgtagtcacagatatccttgaagtattggcgaagagaaaggaggttccttgatgtgctaaatactccacgctccaatacacaaggagttgctaatacttcatccagacccacttagcaagcgagttaggggataacagctatgctctcccttctctacccagcgcacaacaaattcattgtccatttatataccataagaatatacaaagggtctaatgtatgaggaaatcaacctaacattagaatcaatacgtttagcctcgaacttaacctctggattatgaggaatctcagattctaatctttggaagtcatgatgtcaaagttcagatcacttggtagaaaagcaacagtcactcgaggtaaaaataatgaccttgctaagggaattttcacaaagcttggacattcaggcaaggctacttctcgcaaacaatgtcggctaccctcggttatttcatcaatataatgcctatagcgagctaatgtttcttcttgattaatcctaagggtatgctctctaatcttttcatcatttatttcaagtatggattgaggtttgtaggtttgaggtttaaaagaaatggcttggaattggaagttaccaagtcttacaaattctgggtgttcataatcatgctcagaatgaggtattgtctggtttaaaagaaaaatgcctcaaaattttgaaaatgcagaacctaaaagctcagagcacgtaaatcgtcaaaccataattttcaacattaaattgctaagacccacacaaagataactccttacaaataaatgaataatgcaaataaggatagagaacaaaaaataagaaatagccaaaggatcaagataaaacacttactaggttttcagaagaaagggatccatgaagaattcctcactgaaaactttttataccaaggggcatgatttgaaggaaaaagttacgagaaagagaagggcatgaaattttgaaagaaatgggggttagcagtattaatttcttgaagcttaatgaaatggaaatggcaaaatggaaggagatgttgatcttatatcgagctatggtaactgtttgattgtaatgattgctgatcaaatgagtgggaactattgggagaagaaaagttaggttattaaatgttgaaatgatgttctctcgaaacactaaaactgccaaaatatagcatgcattcattattaaatgggggaacaatacgatcgtacccttcgttactagaaagtccttttaaatcttaagaaaaaaaattcagggggcaattgttataactttatttcgaccacaaatatagtcacgacacgtgtaataatgataaaaataaaccagctcgtgttgtacaagaataaataagtttaataaagtgagagtaagcatatgatcttagtattatatattagtaaaaatttcttgccacagttgatatactgattttatgttagggattgaagatatgttgacattgttccagggatattcttgaattataacaaaagagatatatcaataaagtgttcaaaacttttggcatgacaaatac

SEQ ID NO: 307174 - DNA, 773 bp, Cannabis indica
ttttaacaaaactaatatagatgtaccacaatgtttaaataatttgtttctaattctaaaaaaaaaaaattgaaatgaggacatttactaacatagtcttatgatttaggaccatttgttatatttttttgaaatgaggacataaactaacatactcttatgatttggtaccatttactataatttcccatcaaacaattctaactcgtatgatataaaaataaaagaaaaattccatcatgatcattttgctctattatttagtagtttgccatctttctcactaattattttgttttaaaacacaacttgaaaatttaattattttaaggttaatgaataatattctttctgaaccatataaggacaaaaatatatatatttttatatatattcattgtgttaaatttcgtgcaatataagtcaaagttgctgaatgtgaaaaggtgataaaagtgtttaagataatatgggattgaaacacgttggacggtgaaggagaaaatgaagtattttcaagtgacaaaggccgatggattttcactcatagtccaattagtactactctcatcatgtcggtcactcaccaacagcagtttattttgtctcttcctaattcatgcatttttaataatattcttaaaaaatttacaaaaatactgatttttttctctatttttacaataatactgccacacggtagaaatttcttttttattgtctaggcccgtttttttttctttcatattgtccaggcccaatatgtttacttt

SEQ ID NO: 307175 - DNA, 1202 bp, Cannabis indica
tcatagcttataactattatctcctccaagcattttatattccctccatgaaatcaaaaacttatagaaaaaaaaaatattttgaaggccataagtattacaccaacatactatactaattgcattctttatgttattttcacatcattgttctaagaaattaattacaccaacatactacaagattaaaaagaattagtataaagaaaaattacttacaaagtgatatatactttaaggaggaattgaaacaatgaattttagtaaattaagttttcttatggattatggtaataccaatcaaaacactaaataaaaataagaaagataatattatatatcattagttctcttacatgcattattgggatctttctatgtacatcaacttgagaagtctccgcctccacttcagttcttacaaaattctttgcctgcctcttcaaacttttattggcaaaattttttacttgtccaactattatttatagtacaaaaaagtgagctcaaaaggaaaatggaacggatggatgtggattcatttattgatattagttaatagtataaaagagttttgttttgataatgaatagaaaactgaaactaaaaaaatataataaaaaaaaggaatacatataataatactttaggttacgtttcattagttattatcataaataaatagatataatgccaaaacacctatatacaaaattaataaaactaagaaaaatgaatttaagatgaataataatgtaggttacgtttcatttctttctttgtactaatatggttttctaataaattataaaaatctgaaaatgaaatgagtaaaaacaactagaaaaaattactaaaacaattaattagaaagttactaactttttttcttcctttaagttgacattaatttggctatatcggttacgtttatatgaattaatgtgtaacatatgtcaaactaaaataaataagactttttttatgtatatgttggagatcaatgctagttgatcctattcaactccaagctcgaaactaaagaactcatacacaaaagctaacaacaattgctcgagaataaaaataacaaaactgaaatttattgaacttgtaatgttagtacattatgagcttaagttaataaggaaagaatgaagtattatagataaccacttgaggttagctcaagtggccataag

SEQ ID NO: 307176 - DNA, 2367 bp, Cannabis indica
cggttggggtgagatagagagagagagagagatgatgcagagagaaagaatgtgagggggtattttggggttttgaaaaaaaaaggtataatttttttagggtttaaatttttggtttaattaataaaatttttttaattttttttaagtatataaaatcaaatttcccttattaattagagtgttatagaccgatacagttcggtgcagaacgtatcgtacgtatacagagactgttttattctgggaacgccatggttgctagactgtcgtgcacactttgggtagagccgcgaaacgtcttaaagaaagcgacattgtccgcgacttagttagattattctatcggtaattcgttccagtttcattgtttttttaatttcgaaataataggtatatattaatgtaatgtaatttagaggaccaaaaagtgagattgagaaagaaaagttatagatttggagaaagctaagaagaaaaatttagtgtttattttagattattttatattaatttgactttgaaaagttgtattggatacgaagtaaattaaagatttttattccactattaaaaacaaatcaaaattttattcacataatttaataatacttaaaatctcatttggaagctttttttaataattttattatgagagaattttattatatagtaatttacggtataaataactaaggttaatttttaattataaataaatacttaagtttaatttttggtggtaataatacctaagttataattttaaaatttctgtaagtacctggttaaataaattttcatttggcgatccctaattagtccaagtcattaaatttttattattaagaattaatttaaatatactaataagaaaataacatatggatataatggcttaacatttaacggttaggtacttaacatttagccttcactttatttttatatacatagaaaattttacacaatattttcttaaattttattttttaaattactatattgtattttcttctattagcattctatattaatcaagcattataattttattattaaaaaacatagtttattctaaaatagtaaaattacatatgctatttaaaaatcaaaatacataatttaaaataaaattaaatattaggttgcacctaacataaatctagtatttttaacaaatatatctatctacacctaattacaaaaccatattcataaataaccgataataataggtggcttctggtaattacaactaatattaatgtgtatttatttactaattttaccatgaaatattagaaaaccctttttcttgttctaaattaaaagtagttagattaaatatattaattattacagtataacatgtaataagcccattatcgttttgtcaagataatcacacaaagatttaaatttctaatatggacaagaaaaaagctcaagagcaaaccaaagtaagttaatcatttctcatttcaaattactattatatattattttatgaaatgtaagtacgtacacactttttttttaattattatgtattacattaattatataataataactaatatcttctaattcatataaatgtaatgattcagaaagtagttgcagaattctcagtctcaatgtattgtaatgcatgtgaaagaaccgttgccaaaactatctccaaatttaaaggtgataaaaattttaccatatcattattcttcttcttttttaaaatatatatgattattaatttgattattattattatatataggtgtggagaagtatatgacagacatgaacaagcacagagtagttgtgacaggaaaaattgacccacaaaaagttttgaagaaattgagaaagaaaacagggaagaaagtagagattattcttaaaaacgacaataataaatcattattagattgtcgtttggagacaccaaaagaagaagagggtaataataataataataataataatttatattttaataattatcataataattgcaatgacactgaaacgcttatgatgatgttcaacgacgagaatccaaatgcttgttctctaatgtaagactaattaatacatgtacatgtctaactctgatgatatttgtaatagtatattcactaatcaatttggattatacatttagttatttttgtagtttatttatttatttagttcaagagcttgtagtaaaagaaatttgtatattaagaaatagcatgatgtattaagtgaatgtggtcacgaataaagggaaaaaaagtatgattctaaatttatttgttagattcacaattatgatgagtttctttcatttatcaaaaaatataagggtaaataccattt

SEQ ID NO: 307177 - DNA, 1307 bp, Cannabis indica
aggatgttaatgaaacatatttgttagtaaatctagatcctggtaaaatatatccaaagtgtcctcttttgaaatgatagacgaatttcgagtatagcggaaacatattttgaggaatgaagatgttgttgagctttcttatggtgattccgaagctttggttttctgatcaaatgtgctcaacggattttagttttttacagcttcaatcatgatcttcgatgattagcaaaatgattttgtgttgatcgactgttttttcgtgaaagattgcatcaatcgatttgagatattttagaacttggtaatgtttgatcgatgtgagatttttgcagatatagatgttaaatcatggatagtttgattatcggttgccttttctagttcgattattgaaatcagagtttatgataagcttttgttccattttcatggagcttcgaatgtggagttgcagagctctaatgaaggttgtgaatattgcttctgattttttcctagtgtgatagatgtgtatttatataagttacaaagggtatgtactacgcatccattattttaattttttcaaaaataattgagttgttgaagtcagtggtttcatcacctggagaaaatggtggtttcttgaaatcacgtatattaatttccatttttggtaggagcaaaaacagtatttgctacaattaaataccaaacgatatatacctaaatttgttagattttaggtatattagtaagcattgccctttaatttatacattatattatttataacagagtctcgtttcggccatgaggcacttgttcgttctactgtagggatgtattttgtgtgaggttgctgaggttgctttagtttgtttattcttacattttattgatgcactcatttttcttctcttataagtcttctgttgttgatcaccatttgggtacctcttgcactaatcaaccgcccaattagccatgtagaacaactaatgtttaaagctcaattatatgcataattcggtgaaattttttaacaacggcatgattgaaactagcaataacacattgacaaaatcttatttattgtagatcatataaagtctagctttaaacaaattaggaaactggaattataattaagaatacaattctagttcgtcaatgtctgccgttctaataataataaggaaaaaaacatttgaagtgatctaatatgaacaatataaagagctaattaggatttttgctcctaggacttgacatgtaccaaatcatgccccctgaacttttagtcattgaaaatgcccctgaac

SEQ ID NO: 307178 - DNA, 1297 bp, Cannabis indica
tgtttgattgattctggtcgtcttctcaggtgaagtcgccaaaattaatggtggttctctttctgattgaattttcatttcggttgcattggtttgctgcgtagttgcacgatggttgcgtgatagttgcctaggaagcatagatcatgggttaaaggtgtgtgtaagtggtatttgtgtaattttttttagttggaatgtatatttgtttatttggccaactagaagtatttttgtaatattgttactttttttgattaaaactgaaaaaatcccaaacaaaaaatgctggtttttataataaaaataaataagagtattttttttttttttttttgaaaatacctcaaaaacttcattaaataaactaacaagaaacaataattttggtgattacacgaggattcacctcccataaattaataagaccgaagtaaaagttctttagtactccccacctaaccaaagcatgggcagaggaattgtagactctagaagaaagatgctcaaacagttcaaagaaaagaatagccaatttctagttgttgttggcatagtcgtaaaagataagataaatataattcaagctatttttgcagagaaggtgacgacttttgacctgtttgaaggagaagcaaaaaagcgcttatggctaggttgaaagttctcatacaactcgggtggatagatgcataggtatgccaagtactggttggttcaggcttgcataaaaatatgtttggtttattaaaatcaagactgtaatggaataaaagttaccattacaatatttgatataatacttagtttgtgcttttaacttttgtaatagaattcattgtaataggcattacaacaattctatgaattttcattactctcatgaatgagcattgcaatgattactacataataaaaagacaattttaccatttttctctttcttagtttttctttactaagtttattttacccctaccaaatttactttaccaccacattttagaaatataaataaatgataaatgaaataaaagtatttttgtcaatacaatttttattacaatgttcaatattctcattattattactattacattctattatatggttataattatatcctgctaaactaaataccacctaaataaataattggtgggcaattgtcccctatcctttgctaggtccaacaattgtcaaaaatatgtactaattttttcaaaaaacttagtacaattatcacagtgcatcatatcatatataggggtgttcatccgatccaatccgcactttt

SEQ ID NO: 307179 - DNA, 934 bp, Cannabis indica
ttttactctatattatgtgaagttgaatgagatagttgagacgaaaatgatgacttctgtgatgagggaggcatgtgaaacattatgatgaatcttattattattaattaattagtgctataatataaatttatatatatatatatatattaccagaaaataattgtgatgtctagcatgatgtagtgaaacccaacatgcatgtattccattattctcatcaaaatctattgcaattaaaataaaatataaatattattttggtatgatatgatcttattaaatattttgaacttctccaaagtttgaggatcaaaactcaaataatgatggatccaataaggataaatttaataataattaagttaaagacatatatgcatgggctgacccaaaataaaagtgatgggaacctccttaaaaaaataattgggaaaaaaatatatatattaattaattacaatatatatttagtaaaataaaaataataaaatataaaacatagtaatgggggctttttgaattacatccgtagatgtcatcatggaaaactgcggaaaagaatttacattttttgttctcaacgcgtgtgtatatgatttggagacctaggaacaaaatattttagggataaagaagtgacaaacaacaactaattttgttcaagtttgttaaatatattgtaattatgaggatttatagtctaaacatattgaaaataatagagaaggatagaatatgatttgaaaatttaagtcaaaagcacttagtaaaattttgtgagtcttaactctttggttaattgaatatagggtctgatataattatgttctgatgtacaataacaatatagttatataatcatatggagctaaaagttttctattacaatgacaagaaagtaaattttaaaaattaagtctattcaatggac

SEQ ID NO: 307180 - DNA, 914 bp, Cannabis indica
aattttggctaaagatatcataagcacaaaataacccacaagcttctttaatttcagatttcccaaagtgttcccacaactaaccgattgagaatatttttttctttcccaacatcactgaatttgattattttcttgaatcatgttttttgttttctagtttttttctttttctttttttctattatttctttaatatatatatagaagaataataaaccctatgatcatgacattggttaacctagctggtatctaataatgaacaattccatatacatgcatgtactattctaaatcttttaccttttaaagtaagaaaccattgttaaagtcacagtacttatcatcacgtttagctagccaattataatattaatattaattggattaatatatatattttttttgaatgaaattggattaatatttagtcccatattataatataggatatacatatttatataattaacgtattaatttttttttcttaatttgttattgaattagcctatgcgtacgtacgtacttcaatctaattatagtttatatatattgcctttaattaaggtttcaggaattcaaattaatctggttcttgcaaattgagtggccatgtatacataaaatagaagaaattgcaaaatagaaaaacaaattgtgaaaaataaaaagtataatttagaaagaaaaactattataataacatgtaaatataattttttaagggttacacccctacttattgtggctcatggtttaatttttttttgggtcattttacaatcttgtatacattatttcaattaatcacaaaatatgtgcaaaaaaaatttattactattctctcatttatttttacatacaattagattttttttttctaattttttttattaatatatatgtat

SEQ ID NO: 307181 - DNA, 985 bp, Cannabis indica
aaaaaaaaaaagaaaacaaaatgattccttttgattaatccaaaataacaattacaagatcaaaaggaataggataatcaccgatccaaacaaaaacactatctaatccagtagtaaacttggccaagttaattacgggcaacccatcaattggctgtccactaatatgacgatgaataatggtcggaaagagagatagtaccatttttatttgggcaatcaaagcaccatattgagatagatcgtcagtacaactagtaatagagattactaaagttttacagtgagtttcaacgaccgagaaaggaaatgctcttaagaacaccattgtatagcttttaacagggcttagtctttcataactgcgtatgatagatctatttcagtttgtatgctttctaaattataatctcaatttgttttatataattaaatcatgcataaaaggtatgaagcctgataacagttcagatcaaggccttcatatatatatattaatagtactgggctacaagaaaaaaaacaatttaaaaaattagctaataagctggtatctgataataaatggagtatttttaattaagaggaaaaatggctgactaaattatataaacttaattagatgaggttgcgatatgatatttaattaggaaaaattgtaaggagcaccttaagcaatgatctttaattagttaggttaattaattagtcgaacaagttgttgatgagggcattagtggcgttaccgagttgttattgtctttggtacaaaccccaagagtatagatcgagggaaatgaaatatacacatcaatactttcccacatttatccaaacaacatttagttgaagaatacttttctcttctgtacatgttggaaaaggaatgcaccaaaaactatacacacaactaaaggtcttcaaccttttttatttctttcatttttacccctttttttactctttattttctctctctctctct

SEQ ID NO: 307182 - DNA, 1162 bp, Cannabis indica
aaaaatgcaaaaaaaaactgttttgaagtataaaaatgaaaaaactccttaaaaaaattgaatgaaaaattattaaaatatttatcatttgaaaaaattattttattggaataatattttaatattttaaaatgtaaccaaacaaattaatagaattaattttattttcttttcatgtcattttacttctaactaaatgctacataagtatataaatgtgcctaaaatggatgtctagggtggctaagctgcgagacatttttcttatatttaacggcttaaaaaactagttgagagtaagcattttaccaccaaaccactcattcaatacttttttattatggagaattaattaaattcttgacggtataagagacaataagttcatgttcaaaatgaaaggatccctttcaaaggttacattttggccaagtgtcttggagaacattttgttaagatattcctaaattgtttgcaatattaattttgacaaaatgatagatacgaagatcattgtaattggttaagtggcctttgaaagaaactactcttgtttgtggtagagtagtatagtatgtacaaagtcagaatcaaattaattttttcttaatttaatttttttcttgaattttagaagattcttctttactttgatatttatttggttttattaagtttggcatgctgtaatcatcattttacaatggactactgtgaatctgtgatcatgtaaaggctactctgtggatcttaaatttcagccaaataattagctgttatgaaaaagtgttgggtatgtatggcaattggcaataactatacacaacttgattgtgtcaattaattttaagataattgaaccatgtgatatttaagtgctgggatctccaatctaacccactattgataccaatattcttattaagtattagtggtacttagtactatctaaaaattacaccttataatcggttattaatattttcaaaaaattatttaattaatttatattatgagaattgctaaaaagtatcactggtacttagcatatttttcggtgtcatactgttattagtgtaatcaatgacagacccagaatttttgttttgtgggggcttatttatcattaaaaaatatttatacttatattataatcactctt

SEQ ID NO: 307183 - DNA, 1359 bp, Cannabis indica
acataaaaatattgcataaaatacaattcaatataatacaatacaatacaatacgacttaatacggcgttccaaacgagcccagaatgaaattttttagaatttgttcgaaagagagagcttacaataatataaggccacattaaagatgagatttatagagagaaatacttatccaagaaaaaatattaacagttacatcaaatttataaatgacatttttaaaaaaaaaaagatatttgtaattatgtaggcacctttactcatagtcataataactttttttttgttgaagtgtttatatatacattacattacagacacgcattctcttatactctttatggccacttaagtagtcttaagtgattactcagaataactctaaatattagcatagtgatatatcaaatctcatatattataatttaataaatataattcataatttaataaatataattctaattggcaaaatacaactggtgttagaatgatcttttttcctaaaagtgtgaaattcattgttattatctatttggaaacttgaaaattgaaacttcaagaataagtattaaaaataaaacaaaaggtttgccaatgatctcaaatttattcttttttacttaaaaaagagttatttataagtggaagacattctatctagagatgattacaaatagttgggctcaatttgtaccaatgaatttagtatcaaattattatcataggtgaatatttcaataaaaagagtgcaatttacataataataaataattgaaaaatgattaattaagtaaagatgatgacagcaaaagccactaactttgtttgttagacaatttaagattctttgtacatgttcatgatgaagagagtaaattggtgaaagcaatgggaaaacatgttctatcacattcaatcacatatgggcctaagccttattcccatttggcaccataatgtgtgcataatgtgtgcatttcttgtggtagccacatacgtataaatatataaaagggtagaaatgtaatattgcttctgaactaatatctatgcaactttttaaataataattctagggaaatttacatagtatactaacttttgtcatttttttacaaaaatactgccaggcggtattttttacttttttactgtatttttttataagtttcatactgtagtatactgtgttaagtttcactggtgttctactggtgttttactagtgttctactgttgttttgagttatattgctttgtgttttactggtgttttataaaaacacagtatttttgaaaaaatttccgtgtgacagtatttttataaaagttaacccaaaatttcagtattttt

SEQ ID NO: 307184 - DNA, 1668 bp, Cannabis indica
gtcattttcattgacgattactatagatatggattgttggaacttattttaccaggattttaatttattaatcatgtatgttgattatacaatataaaatctagcatcgtaaaatatgaaatacttaaaatgaccaataaacatgtaaaattttataatcacttacattaatggtagcagaatataatggatcctttcacttagtactctaaccctcaaatcaattctgtagtacaatatcacaaagtactgagttaggatctccttccttaaactaaaatgcaacagttcttcataatctagaggtttgattaccttcttgattagtgtatgatggtattcaattaaccattggaacatattttaagagagaaatagactttagtaatccaagaatagaaggcgaagaagaagagtgctttctctagggttgaataactttgaattatttgattgccaaagttatcctctctttttatttatagccttcacactagggtcaggttagatgagatgggcttaaaatcaaaagacaattaggcgaaaattgaaaaccattaacgggcaatagatttggagttttccgacattatttcaacttagtgaaataatgtgttgtttcttatttttaccacttatcacatcctcttgggccttcttgatcatggctcttgagttattttacacgtgtgagaactctccacttatctaacgagtcgtaggttgtagtgttcagctcactaaagaaacaactgaagttatctcaagaccagcccacaagctttaactcatcacttgagaatgtcgttaggtctgtgaattgtaattgattaatttaaatgaagtataaaaaaactttgttcaacgctttctctcatcaaagtaaatacaatcacattcatgtgaactaagttgaacgaaaaaagtacactttaaggtagtagttgtatgtttcttcttcatccaagcttagttgatgtgatttgcactacactaatgccctgtttgacttattagtataggagccataccataatgatgtacctcttaacctagagacaacttcgtcacatatcgttagtttaaaaggcgattgattcactttcacgaggtaaagtgatctcactgtgaagcaagctgttttgaagacaatacttctatttgtagtactatcgtagatgcccctcgttttggtatcatggtattggcactagcttcaagttatagtcatagtctgctaacttataagttttgggttcaagcacttcaatgatgacatatggtccttcccaatcaggcccaagtactcctactactgcgtctttcatttacaagaatactcatcataacaccatatctccaggcttaaatttttgtatctttaaccttgtagtgttttgcaaccctttgttgatacgccacctttctaagctcaaacctttctctgatatcttcaatttcatctagggattcggccaacaactaatggttggtttcctagtcgaatgtcagccttcaatgagatgaagatgtatgtgagctctatagggatgatgctgtgacagtcagtagtcccgtgatccgtaaggggaaacaccgggtaagctgtacaatcccacaccgcttgggaaaggctaagtgggatgattttgagactctgtaggtatg

SEQ ID NO: 307185 - DNA, 2920 bp, Cannabis indica
aaatgaaaaatcttagaccaaccaagaaaattcttgaaattaagatctacagagacagaaagtctaaagagctagttctgtctcaggcagggtacatctcaaagttgctaaacatatttggttttcaagatgccaaacctataagcacaccattagttcaacatttcaaattgtccaacatgcaatcacccttaacaaaagatgaatcccagtacatggagaaggtaccaaacacaagttgggtaggtagtattatgtatgttatgatttttactcggccagacctgtgttatgcaatgagtatggtcagtaggtttatgcataacccatgaattgagaattggaaggctatcaaatggatgatgaggtatctaaaggggacatctactttgggcctaaagtatcatttagagtttaaaacaccaaaaatcacaagatatgtcgactcagattataatggttattcagaccccagaaggtcacaaactagctatgttttttttctaagtaattgtacaattagttggaaagccaacctacaaactatagttgctcttttaacaacagaggtagaatacatatcatatactgaagctataaaggaagctttatggctaaaaggaatggcaactgactttgacctaaacaagagaaaaatagaagtgctcagtgatagtaagagtgcactacacttaagcaagaatcaaatatttcatgagcgtactaagcacattgatgtgtggctaaacttccttagagaggtaattgcatatgagaaagtcaacttaaacaagatttctactgctgaaaatccctctgatgtgttgaccaaggctgttgttacattaaagtttaaacattgtttgaacatacttagaattttagaaatgagaattgttctaagttctaaattgttcaactttatatttgttatgttttatacttttttctaactgtcttttattatttcctactatactaacaatcaaggtggaaattgttgttagttgtgactgttagtacagttaatcgacaattagtattgattagctctagttagttctttgcactcttagtgtacaattagaagtagttagtttcaagtgacaaaacaaattggacaaattatctatataaagtccctatttttcacttgaaacacattacattgtaagtaaattatataagacttaactatcatcaataaagagctgtagatttgattcattcaaacacattgtaactagttatggttgtggggcattcgagcttgaaactcaaccgccaaaaagttagccaaagcgttggtagctctaggcatgggcactatgtggtgtgaaataaataaaaacacagagagagattctcatcagtacttctcacaaacatggtataaatcatctataccaatcaatctgtattttgttactgtaccttaacattaattttttgacactttattaataatatcttataacccaattacggaaaattgaacctagcttttggccagaatgaattttgatttattttgtatatcgatctatttataaatgaacataaaatttaaatttatgatcatgtatgttatgggtgttttatttttcctttctggatttttaatttgttttacttttatttatgttgatttcaaaattaaaatgtataggtaaggatgtaagaaaatatagtcttgggggacattaaatttatcaaattaggggactcttaatatatatttatctttatatattaaaagtgactatctaatcttattattttcttttttttggaaaaaaaaaagaactttattaaaaaaaaaccaacaaaacatacacaacaaccacataccaatcgccgctacacataccagccagaagggagactaacacttagctattacattacatatataagctttaagcttgtctttactctcatctaaacaactcaaaactctatctgtaacagtgttctttatggttttgctcatataatgcactgttttacaattacaatcaaagacacagaaattctgattcacccaaatgctataaattgttgtcgacaacactgcatttataaccttatcttgtaacgatctaagcggctttgtaaaccaatctagccactccttgttactctgcagccactctataataccaagccaagaagaaatttccaccagcaacctcttagttaaggggcagtccacaaacaggtggtaatgtgtctcaatctcaatatcacaaacaggacaatttaaagaaaggagagtccgtacattgccgagatggtcccttgtgagctgatgattgttgatagtgtgccaacaaatgaaatgatgttttgaaatgaccattttgtgccacactcttgcatcatattgaacttcctgaaccgagaccagctgagaataaaattgttttgccttaaatctctcttttctagcagccttgagaatctcttccttgtcaatgatacttctaagtcttagaagtttttggaagtaccaactagcatcattcttaaaagagagctaccaaaaatcttaaccttttaagtaggtagcattcacccaccgaacccacaagttgacttgctttttcgatatggcccaaataaatttggccataagggtgatagtccacttctttccttcacggaaaccaagacaaccttgcttcttatgaaggcaaaatttctccgtagaagaaagatgaaacttgattttatttcccttgaaaccccaagaaaatatctacaacatttgtcaataacaacagtaattttctaaggaagaatgaacaagctcatccagtagttccttattgttgggttttgtgccctaaataaaacctattttaatataatcagatttactaattaataaagatcagaaatcacattttatgttgca

SEQ ID NO: 307186 - DNA, 2415 bp, Cannabis indica
tagtataaaaagaaaagaaagttctcactatccaactaatacaagtaatgactcttgacctagttttcttcttgtcaaacaactagagaatttgagacttcttcttcttttctcttctctcattcaaaattcttagtgttcttcataaaataatttcaagcctttagtgattgagttcatgcctacccatagaaagttattcctcaatgatagtgtgtaagactgtgaagaatccaaacaactgaaggagtttcgggctcagatgctacataaaggatacaagggttagaaatctaagcgaaatgagtcatttaattccactgcaaccaatgtaaggtttctcataccttttatgtatttattttcatcattttagaagttcatttttagaatgttaaaaatatactggttactaaatctaggtcctagtaaaatatattctaacaccactatgtgggaaggtgtttcgagcaatggcaagtttgcctttagtatgttgtactaaattctacagggtactcatataggcctccaagcaaagcatatgtattcaggagattacatatctaaattatcaatgaaatgttgaagttctcactttacatatgaaattcgtcactctccacgtgtctgcttggcttgctgactatacttgtcaattaaaattgtcaaagtgaacaaagtagttcaaaaaaatgggagagagtacaagaaagaaaatacgtgcaaaactaagtgtagagttccatgaatgacactacacactttggggcaaggggagaaagtaatttttttgaactcggcaaggactagctaccctcagttgacaaaagaaatacactcctcttcgcaaaattcacttagccaaaagaggtcttgaaagacactcacaacccattgctgaaacaagagggatgcctctcaggcgtaagaaaacacttgcaaattaagagagtagcgctgtcaagtacaataagctccctcacatcggagtaaaaggaataaacaaacattcacaaatcaaaaggctatagcgcggttaagtatgataagctcccttacatccgagtaaaaggatgaataaataagtaagaggatgacaccgcttaaagagtaatactcccttttatgaaaatatgcttaccacagcgggaaaagtcacttggtcaaagaataacactcagagtcattcgaccaacatctgttacaaatgctatttggcctcatgacgaccaaagtcactcgaccaaagagtgaaaaaatatcaatcgacctcatgaaaaccaaagtcattcggccacaaagtgaataaatgtcactcagcctcatggtaaccaaagtcacttggccgaagaatactgaacaaatctcactcggcctcacgtgaccaaacaaatgtcactcaacctcatggtgaccaaagtcactcagccaaagagtgaataaatctcactcggtctcgtgatgaccaaagtcactcaacctcatggtgaccaaagtcactcggccaagcaaatgttacctggcctcatgccgactaaagtcactcgaccaaagagtgaacaaatatcactcgacctcatggtcaccaaagtcactcagccaaagagtgaacaaatgtcactcggcctcatgatgaccaaagtcacttgacataagagtgaaaaaatgtcacttagcttcatggtgaccaaagtcactcggccaaagagtgaacaaatgttcgagcctagcaactcttgtagagaaggatagacctccaccattagaccgaggaaaaagttatgaagtgaagaagagaaaggttaaagcctcctatctatatatactaactgcattatcgaagtacatgtcgagggaaaaattcacaaggtatccaaaagacaccttaataaatagtccccaagaacacttaaaagaattcttgaagactacgggggcaagtgctaaccccaaaaattagcacttgtaattttcgaggttagctaaccaaggcatgagggatggcatcgaaaagatcacccaacccaagaatgactcaatgtcattattccttgagagcgactaatgtcactcggccatgttgcatccaaatgtcactcagccatgtaacatgcgaatgtcacttggccatgttgcatgcaaatgtcactcagccatgttgcatgcaaatgtcactcagccatgtaacatgccaatgtcagtcggccatgttgcatgcaacccacacttctcggcttggtcggccataccttgggagagggtatactcaaggccgaccaaccttcgatttgatgcttgtacatggccagccagccctaagctgggcagtgcctggcaacccacacttctcggcctggctagtggagtttgtgcgttgacatggattgatcacaccaattgctggagtttggt

SEQ ID NO: 307187 - DNA, 1750 bp, Cannabis indica
gagcaaagtataattatcatatttgtccaaattatgtctcatatctataaacaattcagtttggttggaggtaattatatagaatgaaatggaaaggaaataatcttcattctatttctttgcttggttgcatattaaattattagaatgtcattctaaaatgtcatttctatccttttggtggaatattccattttgaaatagaaggaaagaccatcttaatgcatgatgagaaaaaattcaataatttttttatcaattttttatacattttaaatttattttattttattctattcctatttctatttccacttttattctcattactatatatttttattcttccaaaacaaacgccacttaaaggaattttctaggaaataattttcagaattatcaagccttttattttttagtaagtgtttgttgataaattactccatcatttgtgtaggttactaaacctcatctcaatttctttggtgacccaaaaaaaatgcgagtcaccaaaaatatgtcactaaagggtaagtttgtagtggtatgaacacattatatacttatttataatggtaaggatcaaatactttaaaattcaacaccctacgtctcatggctgttattatctcttaattaagtgtaaatgagattaaatgggttatttagagattatgggagctgatagaaagtatcatcattattaaaaatgctcatacaacaaagctcacaaaatagtaactagttattagttactaaatttttcaaattttgtaaataactttccaaagcatttcaaaccattctcacttaattatataaaaatatatatcacttatacatattataaataatataaataaattctcaacatctatattttcattatatttgaattttaaaagattaaattgtataacttttctttacacacttaattagatgataatataaaaaatattacaaaatgtaagtaactttacttatatgttacaaatatttacacttgataattagttacttatatatttaatttaaatgttatattatttaataaataaataatataacatttataggtatatgtgaaaatcccacattaatttattttaactatttaattaactgcatatgtactatatgtaaataaaaaattataggcactgattgattttggaaaagcacacgagttaataaagtgttaattctaattaatatatagttttctagttgtcacataatgtcgcttgtcctcttttggtatataggaactattccttttagccttaaccaaaggccaacataagtaccaaaacaaaagattaatgtgattattttattttattttattgagcacattattattgtggacattttcccacatgaaataaatagtagaatattgagctatatataagaatatggactatttcactcatcactaattagttttgtgatggaactctataattttcaacaaatcatagttagtactatttaaaggtgacactttatgattagttagtgatatttttaaaaactattatcttaaatcatatggaatctaatacttaattgtactaataattttagacactaagaaggatattaagtattaccggtgccttttatcattttcttttagaaaacaaccatacgcaacttctttgacttcactacacaacttctttgtaaattggagaattttcactacttacggtttttttttaaaaaaaaaactaaatattta

SEQ ID NO: 307188 - DNA, 1375 bp, Cannabis indica
taaaagaaactaattaatttttttaatttgtttttttttaaatatttatagttttaaaaatttgagaaaaataaatataaaatttgagaatattaagattaaacatactgcctaatattaaaataacaataaaaaataataagattacagataatatattaatatttatatatgtatatttaaattaacttaaaattgtataaattcaattaacttaaaacaaataatattcatatttatatatatatttatataaatttaaaataaataatattaatatttataaaactaaacttactaacaccgttaaatttaacggaatattcttatattcttaaaatattccgttaaaccaacaaaaatcgcgaggaacaagttcaagttcgttaatggcaagctccctgctcctaaagaagacgatgacgaatttgaactgtggaatcgatgcatcagcactgtcatttcctggattctccatgttgtgtcgaatgagatagttgaaaacatcatgtatatggataatgccactacgatctggtccactcttgttaaagattaaacctgaaaaatgctcctcgtatttttgaagctattcaaaccaaacaatcccttgtccaaggttctcacaacataaccacgtatttcactcgactcaaatctctgtgggatttgattcaagaatataggccacaacctgtttgtacttgtggtgccatgaaaataattcaaaattatcgaaatgaagattgagtgcttgagcttttggttggactcaatgaattgtacaatggagctagatctcggatcttgatgcaagatttcattcctaatatcaagaaaacttatgatgcagtcatacaagaagagagttaaaggtgtctatctaatgcttccactaaaggtgataaatctgaatttggatcaaaccagggtcagtttactggagctgtgcaaccacatcgatccaatttagtctgaactcattgtgggattactggccacaccatatctaggtgtttttgtatacatgattatcctcatggacataaacttcatgggaaatttcctaatagaaatgccaatgctccaggaaataatcatggtcataagcctagtgctcctaatgctgctagtgaatcagcaggaaatgttggcaaaagtaatgaagttatttttattaatcaagacctagtttctagtctctcatctatgcagtgtcaaaacttaatggcattgttgtcttaaaggattccagaaatgcccatttcccccgactgaacctcctatggtctctcaattgtctgggagatttaaaattgcctaagtctacttggatcattgacataggtgccacacaccatgtttgtcatgtaca

SEQ ID NO: 307189 - DNA, 1872 bp, Cannabis indica
tctaaaaataaagataagttatttgaatttataaaatttaaaatattaagtattttttgctccagtttaaaaataaaaaagaaaaaaaccacactaaagacaatgcattccatattatatagtattttgagtacacaaattgcttatattattttagttaaaaaaatagtttattgtttacgtaattcaaaatttgcaagggcattcacggaatgaaaattaagtgaaagaagccggactagctcagcaacgggtgacatatggttcagatttgagttaggcccgttgttaacggtggacacgtatggctatggtggacccaccccagttttcccgcgcgaatcctcgttcaggtttgctttcgtcaccaccaggtggtcctaccagaaactgactttctcagctactgttgcacaccgcgttgacccattatccagctgtatgatgacgtggcaagccacgaagacgccttcgcagtgggcctggcgggacgcgcccctctctattatcaaatctttcaaattcaaaaacttattatatatcaagaaaaaaaaattattatatataaaaaagaaaaacagaaatataaattatgacgataatgtatttgcacttcttatgtttgagattaagacttgagaagtatttttatttatttacttgtttttataaactgagaatagattcgctttatgctgtttcaaagtacaacgaaaatctatgcaccccaaaaaaaaaacaaagtccaaagaaaatagaattatgatgatgttaattgtgtaagaaaattgctgcattaatttcctattattcatcctattctgaaaacaaattgaaagggaaacaaatgttgaagctatgtgtccctctcccaacatttccactaactatatatatcattatacatacaagttggcttaatataatttgttttcattttccaaatagaaaagacaatttcaattcactatcactcacgtctgaattggcaaatattgatcaattaatgttatttgacatgtttatgacaaagctaataaatcaataattgatctattcatatttaaatataaataaatgtattttataaaagtttggttgcttgtgctgatggacaacaatactaattaattgggcgcccatagagtatgtacttatataaaacattatattcatgattgaaaaacatgtaactaagaaaaaaataagagttggcatgcaataattaagtaaagggggtccataatgttaaaacttaagcttggatttgagtagtatcgatagtagtatctatggatggaaaattaatgaatttgatgacaaaaacgggttgctaaggatagggcttttggtgggtcgcatatcttatccttatacacctattgtggaatgtcctttactttgttccaaaaccccacttgaagaaagttgcagagtttaaagagttgtaatattacacacaggctgatgattattccttcccatttgcatgaaactccctctgcattgcatttacgtttataaaatgctttacaacaacaataacaataatgataattattaattaagacaaaataagtgagtgacaataggccaatatagggaatcttttgaaaatatcttgatcatattcttgtacaacttgattgatggggtgctatgttagactataatatagtatatgaaatatatcatatataaacgatatgtaatgcggaaaaactataaacatatggataatatatatacaatgaaggatcgatattggagttctggctttctcgctctctcaactctctttagatggaatttgctgaatgaaatcaaaatgagtaaggagctcagggatcgagaccctatatttataggtga

SEQ ID NO: 307190 - DNA, 1404 bp, Cannabis indica
ttaagaggcatttttaacgatcttaaaagttcatggggcatgatatggtacatgtcaaagttcatagacaaaaatcttaattaaccattaattaattacatttgttctttcttttaatttattaatcttttttttttatgcttttgttttgacattctataaatcaatatttaatccataaaatcacaaaactaattattggtaattagtaaattaatctctctctgaatgatactgtacttttattgtattacttaattacatatacttccactaaacaattactataaattaagtaccacaagtactgcatataatagttaaaaaaatctagctatatatataccataacattatagtaatcattctaataaggatcgtttattaaaaatgaacagagagatatataatatagtaataagtttaaatggctaaggttggaaagttgtttacagtgttaagcatcgatggaggtggaattaggggcataattccagccactcttctcaccttcattgaatccaaacttcaggtatttaattattgtacatatatatgtaaatatatattaattttacatatatattgtatataaatatataaacattaaatttatatatataggaattagatgggaaaaggcaagaattgcagattatttcgatgtaatagcaggaacaagcacaggtgggttggtgaccaccatgcttacagctccaaacaaacacaacagacccatgtattctgctaaagacatcaccaatttctattttcaacactctcctaaaatattctcccaacaaattaggtaataataataataataattaatctcacctatttattatagaatatatgtttaaaaagaagttaattaattaattacatttattacacagtggaataagcaagtacacgaaaagattaccaaatctattatgtggtactgttatggggccaaagtatgatggtaagtacttgaggtcccttatcaacactcttctaggagatcttactttgaaacagactttaactaatgttctcataccaactttcgatataaggcttctccaacttgtgattttcaccaccaaccacgtaagtaataaatcaatacaattaattattattatttttaattaatttcatctcttataattgtccactactacaaaaaccccctttagaggcggtttttaagccccttcagcgtcgattttcgcgaaattcgctaccgacgctgatcagggcaaactaaagggtttaaatgaaccgacgccatatgcacccctatggcgtcaattcctagctaataaccgacgccatatgtagagtagcaatcgacgacatatgtgcgcgaatttcagttttttcaatttttttttaaatttaattatataattt

SEQ ID NO: 307191 - DNA, 1077 bp, Cannabis indica
ggcgccaatctgagaattggcgccaacagttttgccgacacactattgcggtaaaagcttatcaaagcaggttcatagcggataagggtattttttaacactggggcttctttttcaccggcgtgatttctcgccggtaaaacagagtttaaccggcacatttagtctacgcgccggtaaaaaatcttttaccgaccaagattctcagacaagttttgccggcgcagtagtgcgccgccaaagctttgccgacgcatttagtgtacttttgccggcgcaaaaatacaccggcaaaaagagttttcttgtagtgatgtttgagacaggttgttttattgagagaggggatggttaaggataataaagaagatgaaattgtaagggtttggaaagtgtttggggaagctatatattgataaagttttcttgattagtaatattaggatttaaaagagggttttatgtgtttgcatcctccatttgttgggtaaaaattttactcacgacatatatcatcgagagcttttatgggtctgataccatgtgagaaggaaaggaaagtaaatgtagttatgttcctagagaaaactagtactgattatataacccttagaataaaacaatactaaagcaagacgcatgtccatcaaagaggtgaccaaacaccataaaattaggaaaagctaaactattacaaagcttaaattaattagtgtttacaataagtgattccatttccttaaaaccacaaatatgaagattggtttttcaatttgaggattgtgtaattggtattaataaattctcacttaattataaaaaatctatttaaatagggatgacatgaaaagtttaattttctttttgagtttttaagttcaagaaattggatgtgccaatttttttttatatataaatatttctctaatattaaatgcggttatttaacggaaattgtgatcttaatatttttttttaatttattcgttaaagttaacatttaaaattaacatcgttaaattaattaattatttttttttttgaaaaaaaaaattagttttaaatatcaaaatttaa

SEQ ID NO: 307192 - DNA, 1891 bp, Cannabis indica
aaaaaaagagaagctaaattaaaaattttgtcctacgaattttgacatgtattaaagatgtcatctgaatttttaaggtcgttaaaaatttttactgaactatttcagattgttggatttaaagatttttgttcaattttagtaagaaaagtttaacatggatggaagtttaggggacatgattttgatatatgtcaaaaatcgagcgatatgatttggtagatatcaaagtttagggaacataatttagtatatggacaatcatcgaattagtaaaattagacaaaaatccttaaatctaataatttcaatagttcagggagaatttttaacagttagaaaagttcaagaagcatgattttatacatgtaaaagttttgggataaaaatcgtaattaaccaaaaaaaaaaaaaaaaagaaaataaagcattatttggttggttggttggttgtattgtagccatatttattacttatttatttatggtagaaacacaacacaacaaaacaagtgagtgttgtgtatgtgtaccattccaagcttcaggcttcagttcattttgaaaattgggtaatttcctacttctgaggagattctacacgcttgtctttgtggtcactactctcaccaccttctacttcatcgttttcatcttcttccaccattttcaacttagctttaccaaggtatgtttttgagctttttcttcataataatcatcttcaacatcactaattacatacatatatatgaatagtgatcatatatccttctaatttatttttgaccaaattaagtgaatttcccttttattcacttcatgcttgctttatatggtttatttaagttattcagtagtgtaaagccttcatttatttttgttgtttgtactttgatcatgtatgtatgataatttttccctcttttctgtcaaaagagaaaaaaagaaacaaaacccttttgaaagattctatttttgacaggatatattatttatagtgatcaatctaaagatgtactggcataagtatctggtggtgggtttgtatttatgggccttaatatgttcacttcttcctgattcttccaatggtttaatgagaattaagttgaggaagagagaccttgatcttgaaagtatcaaagcagcagcaaaatttgaaagagagcataaatatttgggtagtagtagctcatcagatgaagatatagtacctttgaagaactatttggatgcccaatactttggagagattagtattggttcacctcctcagaattttactgtcatttttgacactggaagttccaatctttgggttccatcagcaaaatgttacttttctgtaagatttttcttttttgcaaaattttcatgttcttttttatctaatgttcacttaatcatgaaaccataataaatgcttctgcagatagcttgttatttccattctcggtacaaatcaagccggtctaccacctatactagcaatggtaaaattcttagttatcacacttcatttcaagttatatgttatgtaaaattaaaagagtaaatactattttgaaactagtgttttgcaaaagtgattgatcgaactcttagttaaataacaaatcaaatcttgtattttgtcaaacgaaaaatcagacctgtattatctaaaatagtacaaaataataccatgtaggcatgtactcagtttttgtctaattttttaatataaacaacctgaagatagtttccaacgtgaacagatacaaaaatataaccagtctgatcataatacttttttagattttaaaaaacacagggtatgaattatcatttaacaaaacggatggtcaaattggtaacttttacaaaacacagagtctaaaatagtatt

SEQ ID NO: 307193 - DNA, 2621 bp, Cannabis indica
tttgtttaatgttgtttgtaggatatggtatgttttgcgggtactagtagatacatattattcaaattttaaggtatcaatattttgtaattttaattatatgttcataaccagtttctttaattttattaatatttatagtaaatatgataattatatactatttatcttgatgaaattttaaaaaaatattttttaaatgccttaatatcaaaacatctattttcctctctagaaaaacaaataaaataaaataaaaaattctttttttaaagcaattttttgaaatgtgataggaattatcctatcaaaactgatattaaacaattaaaggaaagaacagaggaatagttgaagaaaattgggtttatattcatataataaccaggaattttgagagtctggaccctccttacaagagacaatacaatctgaataatcccagtaaatgaaactcttatttatacttagtccctaggacttaaggtgcaccttagaactatccgaataatactcaaataacataattagagaattgtatcctctacagcaccctccttgagagacttcttgttccttctagcatacacatatgttaagggaggtctatcaataccgccggccagaaatctcaccttgtcctcaaggtgaaattgaggaaattgatcacgaatgactacaaaatcttcccatgttgcttcagattctggtagatgctgccacttgatgagagcttgggggctggtcttgtgggagccggggtggatagctagcagagaattgagttccaggagccattccaagtcatccgtgaggccaggaggaagaggagatgcttgctggtgtggtcccaaagcggtccgcagtaaagaaacatggaaaacaggatggatggaggcatccggtggcagttggagacggtaggatgccttgcccacacaagctagcacgggaaagggactaaagtaccgaggaaataacttctcattaggccgtttggccactgatcgctaacagtaagggcgaagtttcacgtagaccatgtcgcctacttgatattggacatctcgacacttgcgatccgtgcgtgctttcatgctttgttgtgtgcatagcaggttttgtttcagcagctggaggacattgtcgcgggcctggagctcttgctcaactgcagaaactttggcgcttgctggttccaaatggaggaggggcggtaggtctcaattataaacagctcgaaacggagtcattccaatggaagtacgatgggaagtattatacaaatactcagaccaaggcaacaacttaacccactggttgggtttggaactgacaaagcaacgtaaatatgtctcaaggcagcggttcactacctctgtttagctatcagattgcgggtgataggatgtactatgcttcaacgaagtcccttgcaaccgaaacaactccttccagaacaagctgaaaaatattttgtccctgtccgatactattgaacgaggaatgccatgaagtttcacaacctcgcgaacaaacacttcagccactgtcaatgcaaaaaagggatggcgaagaggtatgaagtgaccatatttagtgaggcgatatagagtcgaatcccttagacaacagaagacctgggataaaatccattgagatatcctcccaaattctgttgggaataggcaatagttgtaaaagacccacggaggattgagcgaagtacttattctgttggcacacggagcattcagccacgaatttctcaacatcgcgctgcatgcgtcgttaataaaagtaagctgccaagcattagaatgtattaaacaccccggaatgtccattgtggtactcatgtaagagcaaagaaacaaaagaggacgaggtaggtaacaccaagcagccacggaaacccgtggaccatcgagtaatcgcaacaatcatggcccttggatcgttcatgcagcaccttacatagggtgggatccgcgacaatctaggtctgtaagtctggaatcgagaggaggttcgggactgagatggctgcgagagaagcagcaggctcaactcacgatagagaatcagcggcacgattatcacccccaggtttgtactggatatcaaagtcgtatcccagaatttttgtaagccatttttgatgttccatagcaacaagacactgctccagaaggtactttaaactgcgttgatccgtgtgaaccacaaacttacgacccaacaagtatggcctccatttttgaatcgctaacacaattgccatcaatttctgttcataaactgatttcatgcgagctctaggagataagacgcgactgaaataggctagaggacgtccatattgcatcaagacagcccctagaccaacaccgaacgcatcagcctccaaaacaaatggagtattaaaatcagggagtgccaagacaggcactgagcacattgcttgcttcacccgctcaaaaccaacctaagcttccattgaccaattaaaggcatcttttttgagttggtcagtcagagggcgggcgatgcttgttgggttttatgccctaaataaaactccatttcaatgtaatctattttattcaacatcaataaag

SEQ ID NO: 307194 - DNA, 1386 bp, Cannabis indica
gcccaatttatgattggtaacatccaagggctttatggtggtcattcatgttcatatgagagtgaaaactctataaatagaggccatattgttcacttgcatgagaagtggttgaaaccatttgttgtggttagaaccttgtgaggatatgctcatccttagacactaggctgagcatatgaggcttgataaatccttaagagcatttctagagtttccctaagtgtccatatgagggaggaaatgacttttaggacaaaggtccttgagccttggtcaagctttttgtgtgttatccttcttcttcttctctagctttcttgtaatcttgatgaaatacttttatttgtattttgagtattttgattgtaatcctcctattctctcttgtaatgagaacttttccaacactaaccatgttgttcgtatctgagtatatagtggccttacaaaacgaaactaatcatactggccttataattactataccaaaacttgcatattatccttaatgagacatttttatacattaagtaggattaaaagacagatttttagtttaacaaatttttttcttttctattaactcctgaaataatatcatcagaatactaggttgttctccttaaaccatatgtatcaagagctattagagctccattaagaatattatcatttttaaatagaatttaattaattttgaattaaattatttttattaaataattaaataaaattttaatatcttatttcaattatatcacaaaatcaatttttttgtaatataattaaaaaaatatatctataatattttaatataacctaattagggtcaaatatctatagctagattgagaaaaaaaatctacaataatatgagttggtgttgtacctaattttctacaataaattacctcaaaatgaaaaaagtcatacattttataatttcatatataggcactacctaaaaaaagttgtgcctaacacaacaaaatttatttgttattaaaaattaatatatatttacttttagccacaaattattactaatgttgttttaatcacaaataaatatttcaatttgttacattttctgtggttgtaattatatttttgttatggttgttaattattttgttagtaagtgtttaatgcatttttactttttattagctaatagggtatgagctagagctagagcaacatttggtgagataccatatagtggacactaggggttcttgaagcctaatcaagggatttcaactctttttagaaaacaccctgttaattccatttttggcatatttaattgacaaaaatattttattatttaatgtatatttcggctggcatatattgatttggtttccatatttgtgtaaa

SEQ ID NO: 307195 - DNA, 2116 bp, Cannabis indica
caaaacacattaggatggcatagctagttgggggaactgaagtggagcgatgctgaaataggcaaggactttgacgaagaatggatgaagaggcaaggtggaactggccctcatgatatgctcgctaaaggctactctgcccttgcgaggctgagtggcccactaatccgacttagccaggaacacccgcaatttcccatcaaaaggaatgttgtaggtttctaacacactacaaatcttctcaatggtcatggaactcgcaatgtccccatacgcaaacgaagtctcagtgctaggaaaaggcagaataattctttgaggaagagccatacctacagacacgcaaaagtgatgataagcacaagtctcacatactttttgttttttccaagattcctacatgcctgagctttgatcctaggaagtccaggaagaagtaaaggaaaagtgggtgcaactttgggcctttcatcaaaagtggggtcataaacctcaagagatgaaggaagagtaggttctagaggaaaagtgctctccatgtacaatagctaactctgaatttggtcaagcgatatcctaagccaaaacaagtataggtaagaatcgacaatcatgtcatcttgttatccactcaagactgaatggatctaagtttgaatcctctaccagcactctttgcagttaataatgcgctctaggtaagccctcctcttagacaacaatgtaacgtacttctcacggggattctcttgaggacccctagagtttgaagatgatatgccaataatttcgaccttaaaaggtgctttggcaggctctcccatagaaataaagtagagtagacaatgtcaatgaggcacaacgatacaacaccctcacctaagaggaaaaagagacgtactaagttcactaaataagatgcatggtgaagcatgtcctaaggagaatacagacaactcaccaatgataaggaaaatagaggcgacattcaaggaatcacaccaaaagaatttgtaagcacaatgcaggaacatcgataacaaaggaaaagatggcaaactccttacctcaaagtgatgatgaaatctttcgtaaaacgatgaattctgctaatggcgagtaaggtgcatgtcataagaaacaaataacgcacatgaagaaatagttatggatgtggtcatagccaaacggcaccacaaagtgacccacttggcacccacaagtgagccactagacacccgcgagtgagccactcagcacccacgagtaacccactcagcaaaggccactcgatacgcaccccaaaaacagggaattgacaaaacaaaggagaataaattaaaattgaaagatgactttgccaagaatcgaactcgccatctcttgatggaatcaggtaaagttctccactaagctagaaaggtttatgtgaaatggatggaaagctcatgaggacctccttatatactaggcactttttcaaagtgtgtgccaagggtggggtttacaactcaacaaaatgcaataagaacacttaaaagaattctcatggactaggggcaagtgttaatcccaataattagcaaggctaaccctcgagattagtcaacattaattcaaaagattagagggattagctttcaaagttagtcataagcgacccactcaatctgtgtgccatcaggctactcagtatgcatgctcaaggagccactcatcatgcatgcccaagcagcctctcgatagccaggttgtctgcagcctcttggcagtctggttccgtgcagcctctcgacatgcacactcgcgtccctctcagcatgcgcactcgcatgcctctcgacatgcatgctcgggtacgtctcagcatgcgcctcaagacgtgctcacgagaaactcaacattgtgacacatttggtcattgtaacaagtcgacgcatctcttagtgggacaatcaccacttaatgaattgtaaggaaaggaatcaaaaggacaacgcatgtgggtacaaccatgctacctgcaaagcctggacatggagagacgaccagtagtggaagcgcctcacctgcaaggcctaacatcccgacaaagagtacgttgcagccactactc

SEQ ID NO: 307196 - DNA, 1457 bp, Cannabis indica
gtaaaataacagtaaacttaatagtgtagctcaagtgggaagacttgtatgcatttgttcaaagactgtagtgtggcaaaggagttgaggttttctgaggaattaccgattttgagtgaatccataccatcaacctctttaattcaatttgcagaaaacttactttcctctgttcctagtaattacagaataaaaccattatctccatgggatgtattttctctgaaatatgatctgcgaggaatagagtgaatatatttggggataagattaaatgtgacaattttgatgaaaaaggtgcataattcttttgaggagatggttaatctcttaggttctggtgcaagtagaaatttggaactgtccctggccttgatttgtgcagattaggttcgaaaatggcattgttatttgacgtctcctcgagcgaggagattatgggagctactattataatgatcactttgaagtgcctattgtttaacaaattcatctgttgtttcagccttggaagcggaattaaaagctattcttttcactttgaagtggctcttgcagaacaagtgaatggatgtctttattttgtctgattctcaagtggtagtgcaagctcttcagaaaagtagttgtgttctgatttaatttcttttgaacgtttccttgatgtttttagatttaattaagaactttcgatactattttttttttcaatattgcaagtttaattctgtagtagatggttaatttagcaaaacatgttagattgtctagccagtttattggttcctattaagagcacggaattccctttgtgattcccatatttttatacttctaatgaacgtggcgttattttgaaaagaaaaacaaaagttatttcttttaatcaatttttgcaaaaaacatccataacaaaaaaaaaaaaaaaaaatggagcaatgcacatgcagatgcagcaattgttattacttcaaattgctcaaataatattaaataatgtcttatattgttcttttacggatgggatggggaccaaagcaggactagactacgatccgtccatatatatattgaaaaaataataatggtaagaattatattgactttagctaggggtggcaattcgtgttcgcggtcgtgtgtcgagactcatgtataacaagtataacgggttgacacgacacgacctctaattactattaggggcgacatatcgcccctaaaaagtcgcccctaaaattttgcgcctaaaaatagtattaggggcgacaatactgttgcccctcattaggggcaactttgtcacccctaatacgaatttctgcgtagacttttaggggcgacattgtcgccctaatatccctaaaaaggcgtgtcaaaaatttattattgacttttaggggcgacatgtcgccgctaatggtcgcccctaaaggtttttaaattaaaaaaaaaaa

SEQ ID NO: 307197 - DNA, 1661 bp, Cannabis indica
atatatataacctataaatatcatgcatgtaacacatatttaagaacatataatatatatctcttaaagcatatcaagatcctcaaaacttttctcgtataaacaataatcttcttatcctcattcattgcatactcaaacctagatcttttggggtgtttactacatctcaagatgtgtgtgagcatgtagacaacaatgttatgttctgaatcaaaatatttttttaactcttttgaactatgattatagccaaaaagaatggttcttttgtttcatggagagaaacgtttcaaagattactattcttggaagactagtctacaattcctaatcttgaatgtgagagaggtggctaatgaatcattatgcttttttatactactaggtgagattagcatgtgctatgcacatgcctagttcttcttgttccatcttatttatatttttgtttgcttgatttttatttcataaataattgtgacaaaaatttatataatttagtttttacattttaattgtatagtacaaattacaaatataagttttattatttattagaaatacaagagtaaggacaaacatctaaagtgggctataaattttttgaatactattttgtatattgtaaattattttgaattttttaaaaatttataagatgtcttaaataattgcaacgtacacaactataaaaacagactaattttttttttctggatgtcaaaatagtagagggtgcaccataaaagcttctaattctactataaaaattttaacccataatcatttcaaatatagtaaaatgaaataacttaagagaaaaatatgtagaacaccactaaatgagtgttttggtagacttccttatctatttcaacatccaagaaagtttttagtccaatttattttttcatgatcgtcaatatgttgtagttatttaggactacctataaattttcaaaattttttgtatagtttacaatgcaaaaaagtaaggtttaaacaattgcttaccaataattgcttaccacgtgtataagaaaaaataattacccatgcaatcaaatatttgatttcttttttacatatattcatgttaagaaatagcttcaggttggttttattaaaatagaaaattgacaaaaattgatctcaagctattattttataccattttagaattataaagtctaatttgttattcaacaaaatataaaattaaatttgtcacttttgcagacacaatatagaaaataatatttatcctaaccaaaacaattgaattacaatttttcaaaatatcacacagcaaaatcaccaccataaggacaaaatctatataaatacttatataagttagcacataaactgttaattattttaagaaattaaagatagctcataaaagataaaaatagtaaaaaaaaaaatatatagcatatatttttatataatttaaatatacaaaaagtagtagaaatattattagtaaaaaaatcaaattttcccatataaaaaaattaatcgagttaataattataaatatatgtaaactatgtatataatatggataaattttgtatactataaatatagggtaaatactattttaaaccttgtgttttgcaaaagttattaattggaccctctgttttgtt

SEQ ID NO: 307198 - DNA, 2631 bp, Cannabis indica
tataggtatacaacaagcccaaaatattcatgtggacaaaaaaattcctggatattcggagaagcgtatttaacaatccttactaactcagtctctccaaacgggtccaaaaaaaaattgtgcgcgtgaaaaaaaattatcactaggtaaaaatacaaacacaattgttttatcttatctttggtttataactaagagattaaatcaagataagaattttattttatgctatcttacaatgtcttatgctattttgttttaccacatacaaacttttattgtcaatttaaaaattatgaattgtattaaattaacctcattactttgggatccatagcttagataaattcatagttttggtatatttgtaaataaagtctagaacaattaccaaagctagaatttgttgaaaatagtattaaaatttgaatttttattctgataatttctttttgtttcttttcaaccattattttactaactatattatctatatataatattagtgatattctaacaattttttttttttaaaaaaataattgataatatgtatttaaaaaaataataactaaattcggagcataacaccttaaaagttgatcattcccaaattttcaatatctacaaacaaaactacaaacacaatatcagaacagtttaaacattaatatatgtcactcatctgatcgcattatatttttcacagaacctacttcattataaatgaatatataaaatattcaaactctactaacaagtatttttaattttcagaactaaagtaacatattataaaatcatactaacctttcatatacaacaacaagtgaatatccaccagcacaacaagtaaaatatgtgacaccgaaaacttgtttgtaaaaaaatttattagagtagaaaaataataatactaattatatacatacacatataaaaaaatacatatttatatacatacatatacatatatataatgttacgaaaaaaaatcaaattatatatattatatacatatatatactcacaaccataaaaatataaatatatatatatattatatataccacacatacatatacatatatacatactcatataaatacacaaacctatatatacacacacatacatatacatacatacacatatatagagacatacttatacatacacatatataaacacataatatatacataaccatatacacacgtaccatatatacatacttatatatacacataattacaaatataaatatatataacattaaaataaaattaaaattaccttaaataaaaaatgaggattgtgactccagcaacagtggatgacgacggcgccggcagcggcggcgtgtgatggggatgatgattttattttttcttaaatgaaactttaaaggatgagagagagggagaaagagagaatggtaatgaaggagatggaaaggagtatggagagggattgatggaggtgggcggatttaagagaatttgaagaaaaagtgtaaagaagaagaggagaaaaatggagaaaagggtcgattcgtggttttaatcaggttttattttttctggtaaagctgggcttcccgataaacgtcttaaaaataattaagaaaacaaaatacagtcgtttaaattaggataaaaagttttgtcggcaagcttaattgcaccagtaaaattttctcacctaatttatttaccatgtttttattgcgcgagaaataaaccactttttttgggacttttgctagggagtatatgcaccggtaaaagttcttttcacttgctaaaaactaggcaccttttggcgcttggtttccctacttatgctgacgaattaactttgttttgccggcataactactttttgccaacgaaaccattcacagacatagggtgtcgacctgaaaaaatgggggaaaaaattccctacctttgtcggtaaaaataaagaaattttatttgcaaaagttaacttatgccgtcaaaattaatgaattttgcaacaaaaaataattgtcttgtagtgcattgagttttagataattgttattaaaatgaaattaagagtaataaggtatctacataacatgtaagaacaaattccatgtagattcagatctggatcattaatgatatacaacttaaggctttttcagtagcttgttattcatatatggatgatatttaagattgtgctggtttagtgggagtttgtatttgagatatactatatcaagctaacacatatttatggtttaattctgtggataaagtatgaatttaaattttgagtaccctaaatatattatttcaattgaggtttaataaaaaggatagaaagactaaagaattgatctcaattaaggaggaccacttggagataggcatgctaagatcacgtgtgcatgtaatttccatgttacacattcatgattgatctatgtcatttggttatattagtatatgtgaccattgatggttttagccacgctaaatgtggtgaaagctgctttgatcctatgttagtgtaatcaatatacgagattgttttgaaatacttatgttgctccaaaatttgcccaaaatacgtggaccagtcaagaggggacac

SEQ ID NO: 307199 - DNA, 1107 bp, Cannabis indica
aaactcaaaatagacgtagctccgttattgtcgcgatacaggaagtgaactactataaattattatgtctcattatttatacttaacaaatatattttttctcaccaatctagcaaggagtgtagattagaaatttttgtctaaatttctgagtcaaaaattattttaatttagcaatgactagttacacattaactaattattaacaattatgttaaatataataaattactaattaaatataggattaactataataattttctaattaattgattttactaacaattaatttattattttggaataggttatgtttagaaaagttataaattaacttatttgttataactattagaaatttttattatcttgtaaaacttttaaattaactttaattatcaattcaaattaattaatttttttttttgttattcctaaaattaaaattcattatttttcaatttttttcataataaactaacaatttaccaatttatattaaaaaatttaattcaacttaattttatattataattttttttctactaataaaatttcgacaatataatgactataataggacaaatttaaaatttttaaaacttataaatagcaacgaaataatacaaaacaaatgcatgcattattatttagatcactatctcaccgcagtatatatttagtcaaagaacgtacttcactataaataaatatttaaaatattcaaactcttctatcaaatacataagcatactaatttacctattactatttatttagcctattgatattatttatgaaaaaaaattatatactaacctttaaaatacaaaaacaatacataagtagcatcgggcatcaattccataaatgcaataacggactaatttcacaaaaaaaaagtaaactcaaattaaaaataagaatatacacataaatacacaatcatatatatatatatttgtacatactagcaaaaattaacgtgcgaggcacgtatactaaattttatgctagtttttttttattgttatttgaaaatgatacaattaaaaattaaagaaaaaatattattagttattaggtgagattattattatgtgt

SEQ ID NO: 307200 - DNA, 1228 bp, Cannabis indica
ttttttaaaaaaaaaaaaaaaacctagagtgttttgctaggtgtttgtatctttgttattgttctcttgttgttcatagaattggttatagagaagttttgaacaagtgtgggtgttcgggacttttctaagtctcattttgggaggaagtgagcacaaatttttgagaaaagatttttttttcaagactcactttgggaggagatgagcatgcatcaatagctgaagggagttcactacttggtgtattttagagatcagattagcaaagtggataataaacggttgcggcaaattttttagatggagtcgaaatttgtttacatcaactgcttttgtaatctttgatgctttactaaatgatttcattctctgggcgaaatcccgtggactagtactgtttgaaagaatactggtaccatgtataattctcttgtattaagttttaaattttgcaaaatttatttctatttatgtcttgttactgcaagtttgtattatgtttgtagcaattgtttttaacctattactgcaagtcgttatagttacgtttttattgaagacataaaatattatttttttcgaaacactgactttaagatatgagaaattctaaagatgttacattgttactataatagaattttattaatatatataaatatttatagtgatgttaagcaccattaattaagtgcttaatagcaatattttgtattaatgttgttgttcgacaccaaaggcactaagagtgtcgagcatctagttaaacccatacatattattatagctaggttaattaggtgtgctagtcatttaataatgagaaaataataaacaagatatgatcataccgttttctttaagtattgaattttgatggtgatttgttgatctcttaatatctcaaataccatttcatttattgtattgtgtaaaacaatataaggcatcttcatgtattctggtaattcatttatcatttccacatcccatctgtatatatatatgtcaataaataatattgtacacacaatcattacacagtgatgtgttaaataatattattcatatacatatattattgataagagagaaatatgagtgcaggattgtcttaaacattttggagaccttgttttaattttaaaaattgggcccttacaaaaaaatgcaatttataaataatatttttaaatattattatacggttatatattttacaaaa

SEQ ID NO: 307201 - DNA, 1268 bp, Cannabis indica
aaaagtcacatttaattacaaaacatttatgttgtgaccaaaagattaatcctaaaggtagtgttttgtagtgtataattaattagatattagatctcaaatacatatacaacatgatcagtgctaacaattttccatatatcttttttatgatgagtaaaactacaggaatttatgttggcgaaaatagagttattcatttcacaagaacaaagattgaaacaagcaaaaaattaagtatcattcgaagaatttatccaagaaaaccatgtgaagagtgtaattacaacctaagtactgacaaaggagtagtgaagacttgtcttaattgttttctcaagaaacataggctctttcgcttcaaatacaatgtctccatggcatgttgtctagttaaaaagtcgggttcatgtagcacaagctctccctttacccccgaaaaggtgatccaacgcgcgacggaaatgtttgagagaacaggaaaattagggtttggagattatcacccgatcgagaacaattgcgaatcttttgtattctattgtacaactagctctcgtaagagcatgcaaggaaactcattcaaagccctagttgaggctgtttatcaaacgacgactgatggcgaacatgattctatcaaagcaattggtgtgtcaattgtgaaaaagttctttaagaataaagctcaaatgattaatgatgatcaaagggagaagggtgagataactgatcaagaagaagaagaggaagaagagtaggagtcattatttatatttaatattattatgttgtaaaataaattaacagaattatgtcttagtgtagacttcatatcatagccttataataaagtaaaatagagagttgtttgtctgtgtgagagccatctcaagcttttatggaagaggcaaattttagaaataggcttttgttttaaaaaaatatatatatgttgttagtgttttaaccactttgaaaagcagtaacagaattaactattatttttgacaactcagcatacggttggtgacttgtccaactgtctcaaccatataaacctcctctttccaactcgactaaacaacacacacagagaacaatgccaacactagtctaagttagttgtgctcaagattaagaaagagagagatactgtgcaaggaaagaaaccagaaagcttaaggaaacaccatttctctttgctgaattctcaactggtttttgagtggattgagggttgtaaatggagattgttcactcttgaa

SEQ ID NO: 307202 - DNA, 888 bp, Cannabis indica
ttaaaaagaattagaaaaaaaatacaaattgattcttgacagtgatttagcgttggtcttgaaaatctattttaggccagaaagtgatgattaataaaaaaaaaatggtcccataaaacatgatttttggcaccaaaacaaattgatgcgtaaaaataattttgcgatatttaacgatgatcacatgaaatcttaattttaaactaaatattacgtcaagttttgacggtactttaatgatggtcacatgcaaatgtattttttaagcaaaaagaaaatatttaaagatggttttgcaataatacacagtggtttgcaatcaaattttgataaaatctttgacgaggcataacttttcattcgatagctaattataggattttctttttcgggtttatacgtttaaaatccttataactttaaatttagagtgtgcataacttaaaaagtttgattggtatcaagaggacagatccagaaatttgttgctctacacctcaaattcgatgttctacattttatgtgttcatttagaaaaaaaataccaacacaaaagaattacttcgaaccgacaaccaattaaaaagttatgcctcgcttcgctacaatcttttactgttgagcatcatttctttttcttcttttccctaaaaatatgttctaatagaatcatcatcaagcatcctttttggcctaaaataaaattttcatgcgagcatcataaactattgctaaatattagtagattcacatcatgtttctatgagactatcattaaactattgagcatagattataatttttttaaagaaaaaatgtgcaaatttcagatttttaaggcgaatacgctttctttttttttttttttttttttaaaacaattttatt

SEQ ID NO: 307203 - DNA, 1465 bp, Cannabis indica
ttcttttttggtttttttttttttagagtaaaaaaacactaacaacgatatgatagtttgctgaacctttgaaaagtttaatgaagaaatgtgaaagtacaataatgatccaaactcggatattctacaatgggaaggattgtggagaaagaaagtagaggcaaatagtataaaggagcagattaagttgcatgtgaagtatttaaaaaataaatccaaaaagcatgcacaaaagaaaaaatgagcagggagaacaacctaaaagtagcataatcagataaaatagaatacagtacaagatcatcatatgtaagaagttattacctggattttatgaaaaagaaacttattattctgatgaaaagagaacaaaaaagggctggtaaggagccattatcctcatctttcaatgtagcccagtatgatatatcatcaattgatttcaaatttgtcatggtaatgcttctctttgagggttttgagaaatcaaagtcagcctcacttgatagagatggtaaacaggaagacctgttctgcagaatcaaaggaagaaaatgggaacaatcaagctatgtaacaaagtaaatgatctataaggccgagtaggtatcaaaggtttactctttctagaagcaggataagattatctcgagcatcaggaaatggttctttaactgctagacttcttatacaatgatacagagccaggaattcatcaccaacatatgttgccaatacagctaactgcaaatgaacataactggttacaatgtgataaccaatttaaacaattttatatcacaaaataaaatttcaaatgagactagttataggaaaaaagaaaaatttccacaacctgattgtgagggttcccactgtctggccaaatcattgttgcttccatgtaatgaatggctgccctcgaccaattatgtttttgaacgtcaggtttttcgtactgttctctgtatctaacaagatccccaagacaaaccaaaaagcggtgacataagaactggcatttctgcattttctttggttcagaaaacccagtttcccctccctttctacaagatgaagactcttgtggaagcctggaaacatttctggttttcactatcaaattttgatagaactcaattgcttctgatagaaatattttgaatccttctatatgattggttttatatagttctacatttgaactcttctttatccttttacgaaactcatcaatatgcttgtagtgaagcttccacaaagaatactctacatcttgaagttctgcttgttcacaatcatttaagatgagtttctcatagctagatcggactttgcgatacagttcctgaacatcattatgcaatagatctttggtatggatcaacctccatagctgtttttctttgttagaaacctttaagaagggaacatttcaagagtcatgaaaatatatatatatata

SEQ ID NO: 307204 - DNA, 1364 bp, Cannabis indica
aaaatttgcaataaaaggcacaaatataggtgcttttttttcccttcttcaaagtttggatttattaaccatttggtgagatttgattggcataagcataatatagatgttgaggttattattatgatatgttagtttgtggttaggtataagaattgttagccaaaatagcaataaggggtaatccatgttttggtgaaaaatgatttgtaataataaagcttgtaaaagcaggcatttatatttggtttttggtccctacatacaaaatggtgtttggcaatgagtctattctattcttttttggtagtattatattaattcaaccgagtttttgacccatttggctttggtggtggaattgtatctcactgcacattcacatgcacatgcccaatcccaatgcttattattcaatgtcaatgccatctcattctcatattagcttttaagtcaaggctaaacctacaacacataacacaaaacaaaaatcaatgtatttatttatatataaaatgaaagaatataaaataaaaggacattattggttgttactggtcacgggttatgttccaaagttagttttgtaatatgttaaaactagagattaagggtgagaattcgcgggtatatgctcgactcaaatatgatatgtttaatactcgtgtcagaaaataaaatttgaacacgacctatttatatacaagttaatacgataagatccgtgtaacttgtttataagaatatttttttaaatcatgtaatatgtttatgacttgttaaaatattaaaattactgtaaataaattattaacgggttaatatcacattaacattgtcaatccgtatacaatccaaatctatttaagacaaaatcccaaacccaccgattcttatacaagtttgaaattgtattatcgtatttgactcgttttaccacttggctaacaagaagtggttaaaacaattttcatttttatgttttgtttgttgcattctgagtgaattgaatgaatgaaaggaatagtagtactagtagtagtaattggtggcagtgttgcagtggcagtattccgaaaacccaacttgaaaaatcaaaccaatgatgtgataataaatgtaggaggaaatgttattatgtttttagaaagacaaaaaagaacaaaagacaaaatctgacagaaaaaccgcatttttatatattaatacatccaaaactgtcagaattcagaaccacccaaccagcacggtgctcaacacaaaaactaaactaaactatattcattgagaagaagaagctgaacaaggaaagaaagagtaataaattatttctcttttattttttttttgtactatttttatga

SEQ ID NO: 307205 - DNA, 1239 bp, Cannabis indica
caaacaatattcaatgcccaagctgataaagacagtactaattaaattttgttaggaaagttgggtgttccacaaggatgtatactgttttgtagaccatttataaaagaattgctaggaaacaagatctattatttccctcaatgttttttttgaaaaatatattacttttatacccaataattatgtaacaagttcatgatgtggtgtgtattaaaataaaaggcaacatacataaaatataaatatatattcccatgtgttatgttcattatttatatataaaattaaaaatacacggatgtgggtagtagtgtgaaacgaagggagaaacaaggataggataatatagcatgatacatagagcactattaatattggaagatgctcaggtgtgcaggctctaaaaacgactgcacctaaaggctaaagcctctcattttcattataggttgtcaactgtatatttggtttacggaatgttattgttagggatgtaaatcatttaatctaatttgttcgacacatgtaatgtaaagccttatttcctcaatagtgataatgtttaagtttgatgtagacaagacaaccactacagagtctcttaattagaaaaaaaaatgtagtttaataatttttttattatttatttaattataggttttttcatgagtaaaaatcataaaatttattaattaataaattcgttcaaaacaatagaatgcacctcaaaggaacaatcctctaactgaagcacacaacctgtagagaaacaagagtctcttgtcaaacaatgaaccaacttgtttgcagatcgttttacaaaacacaaattaacaaaagataaagccaaaagcaaatttctaacatcttaaaccagaagaccaaactgtgaggacataaaaatattgctttgaacagcttgtacacacatcaagcaatccgtttccaacacgatattgtccaaggaatgagtgttgggttttatgccctaaataaaattcaatttcaaagtaatccagattattccatatcaataaagaaacagaagtatttttcattcatttgtgtatgttttggttcaccttatcaattatttatttatttgatttataaattcatccaaacccttttcacatacttaaacatgtttattgtgttgtcaacacagtggaaagtaaacatgactatgtgattaaagattcttagatttatcagaacactggggttttactgata

SEQ ID NO: 307206 - DNA, 2052 bp, Cannabis indica
atatgatctggatttaattgattactgtgtgtaaaagtaataaacatataaaccattagcatgtaaaattcatgcaaacaatcaatcacttcaaatttcttatattgataactaatcagattgtaaagagttttatttaggacataaaacccaacaaccatgagtatgtacaagttatctaagagccttgttaatagcttacatagaatggcagcaaggttctcgtggggatcatctgataaagatcaaaagatacactggtataaatgagcatacctatggaaatcaaaggagaaggtggtatggggtttagaaatatggttttttttaatcaagcacttcttgcaaacaaatatggaggtgtattcgaaatccttcatctttttccagttgggttcttaaagctagctacttctcatataaaagtattttggaagcaaagtgtggtgctaatgggtcttttgtgtggcgtagtttggtgtgggggaagaagcttattcacaaaggatatcgatggcgagttgggaatggaaattctattcgagttcttgaagatccatggctgccaagaccaattagtttccaattctatgataaaccaagtcttccgaaccagttgtatgttattgatttaaagttagcaaattggcgatgggatgcggcttttatcaagaaagtttttaaccaagaggatgcgactttaattttgcaaattccaagtggtgattgggatatggaggatacaatcacgtggtactacagtaaaaatggagaatattttgtccaaagtggataccaaattgctgttgatttgcagagaaatagtctcagtccaacatgcagcctatggaaagttggtagaaatttatgtggaaactcaaaataccaccaaaggtaaaacactttgtttggaaaatatgtcatgcttggcttcctactaattatgttttatctaaacggggtatgaatgtggatccaaattgtgagaattgttcaggcagtcaagcagaaaatgtccaacatgctttatggaattgtccaaaacataaagaagtttggaagaagtgtgagctttgggctaatattcaggctcatttacaaagagatattcaagcctttctccaacagatagcaagaagatgtaaatagggagactttgagttgtttccgatcattacatggcatttttggtcgattagaaactacacaaaacatggaggaaaaaggccacgggttgatgatttacttggatggtgtgggaaattttcggtagactttcaaacagagaatggaaaaagaaaacaatctaatgagccgcgacatgaagcacattggcagccaccgagacaacatgaatgtaaaatcaatgtcgatgtcagggttgttaaaggcaggggacaatctggcataggaatggcggtgagagatgagcatggttttttatagtatgcaacaaccactatcgaaaagcaagagttgcgaccgcttattgcagaattatatgccattcgtgttgtcttagagattgggctttagagaggcatccaaagttcactatgtaattaaattgtcagcaagccattaatcttatcaagcacactgaggaagcttgccatgaggaagatggattgattctccatattagaaggttgttagctcatagtcaagtggttgggttgtactttgtatatagagaggctaatattgtagatcacaatttacccaattatacattatttttcaaagttagtgccatatggattgggataataccctcatatgttaatccagccatgagacttgattattcaaatcctgtgtaatttgttttattaatgcagattctatttttttttttttcaaaaaaaaaactatttatccaacaatttccccattaaatatttggatgccaaaatattaaatagcttttattttcgaaatttttacatgaaaaatccattttacacaatttattacaaaattactcacacacgcctatgattacatttttacttacaaagttgtttttattacacaaataccacttagtca

SEQ ID NO: 307207 - DNA, 2366 bp, Cannabis indica
ttctgcggtccttgtcagaacgtcagaagttgtgccaatattaattaggttccaatcgtaagtcctaatgtggcgatgcggctgagttatataccaagaacaaaccttcgatccttcaatactggcttcctaaggcaagagacatatgggatccattagaactaccgcggggtaagacaaggtaatttgatggacaaatcccaaggtttgattttccttgtctgtcacctcgaaagctggtataggaacttcaggggttgaattattatttttctccaaaataatgcttggagtaggggagcactcttcttagtattatttttcttcttacttagagcctttcgctacttctcgacggtgtcaacctcagacgcacctcccgttttagcctatttaataagcactacaaggctgttagggaggttttcaaagttaaagtccatatatgtaaaataagagaaaatgattggtaaaagagaagaaaaaagtataatatgttgggagagaatacataaatactctatgcaaaagacgtgaaaaaaaataattcaacctaagctatagttagaaaaattagaagatgcacgaggaggcataaaatcagtgtgaggagacttgataataggtgggtcgctaaatcccctaaactcagtgatatcataaagattaaatacatttagaggaggtaactcccaatcatcggctcgcaagttatttgtcccattttgataagcaataccataaaaagaactattgcacgaggtttggacatgagacttagggtaccaactatcaaacctatgggttattaagttgacgcagatccaaatatgaacattatactgagtatctctaaactttactgagctcgctggcttggtcttatggacggtaggagaccatccataaaaacaagaagttttacctcgaggtgccccttctgcatctcggtagcttcctgagtggttgaattattttcataatgggttttagtgacatagtcacgatctttcttctcctcgagcattgggatttgtttccatgtgggtacatgggatccttaaaatccattatgcactggtcttttccaagacgatcatagaacattaaattttggtcatgaagaagaaaatctacctttcataggccataaggcaagttcaccaggatatcatgtcgcctttgaattacagctattgggactggtctctttgaaagagctaaaaaaaagaacaagagtttagtaaaaaaaacaatcataaaatcctagctcaaaactaaaaatttcagagacaatggatactataaaattctgaactggataatgttgattggatgaagccttatcgtccaacagaagtcatgcttgaactctattttatttggaagtttaatgataattttattatcgaagtttaatgataaaatcctagctcaaaactaaaaatttctgagacaatggatactataaaattctaaactggatagtgatgattggatgaagccttatcgtccaacagaagtcatgcttgaactccattttatttgaaagtttaatgataattttattatcgctgtaatgagtacccaaataaaataagccaccctaaataaatcttcctcacagggcatgccttgagagcataaaagcacgtcatctcgaagggagagttggacactaccaccgtacgctatgatagagtgacttcaagcatgctaaagatcctataagtatttaggatgagtagaaaaggagcaaccccgaaataattacaataattcttaaagtattaccaaaggggaagattaacccctgccttaacatgctcgatgctctaagcaccaatccttgaagattcactagtgctgtaactttcatcatggacagctgagttaggaaaaacaattgaacttgcatggtgtgattgagcaaatatagaatttttcctcattcttgatactgtaggaccatagaaatggacccacatacgaagtaatttgatgagaacactaaggctaatgatacaagtaaagttccagttggcccagtgacgagggcgcgagtcaagagattcaaagaagaactcagcaacttagtcaacagagttttaaaacaagtggagactgcagtcaacactgaagtagaacaaagatttgtgcttctcatcgaagtagactcaatttagaccgaaattgagcttataacgtttttgaaggcatttggcagctttccctttcaattttgtttcctttattttgtctttattttatttggaaattatctttttttagttttcttttttttttggttgtaagttggctatataaagccttgtaaacacattgaaaaataagaatattttgga

SEQ ID NO: 307208 - DNA, 952 bp, Cannabis indica
tatatatatatacatttatttatataattgaagcagtttttcatgaacttatcttaatcgtaaaacaaagctagtgaacttttatgatggtttggtaaaccggtttaattttttagtcataaaaaatgtcatgtggaatatttatactagtggttcacccatttccggcgggatattttgtcatcgatttttatttttttttatataattattattgttagtttttattagatttcagaaaaagtaaaactatattatttatattatttcaatgttaaaaacgctacctcatttatgaccaaatatccccgagatgtatttttactatataataactaaattactttattatttttatacattgaaccatttttctgtgacaaactttgaaacaatattattccacagaatttgtggtagtaaattagtagataagagatatagctaataaatgagggctcatctagaagataagatcttccatcattaatacttagtgtctttgtagttcagatcaaagagagatcaaaaaatcattcacatcaagatagaatagttaatatgatcagcatatatgtatataatagaatgttaatacatagaaatgatatacaaactgcatagagtgagatcaatcaagctagaaatcaaatagtaacccaatattatatgaatatggagaagaatggtgtgatgatgatgatttgtatgaaacactacaagaaatatcacttttgccagtatatttttgtactggcaaaagttaatattgcgctggtaaaatagaatttacttgtgatgcattggcaaaagggggttggcgaatcaatgttggtattagaacttttgccagcataaaatgaaaagcgctagcaaagatgacttttcccagcacgtaaatgcgctggtaaaagttagattttagccactacaaatgtatgctggtaaaact

SEQ ID NO: 307209 - DNA, 1432 bp, Cannabis indica
acaggagagagagagagagagagtagttttggaaaacaaaaaggaaaaggcatcgagctcaaatctcttctttgaattcttttactaatatgctttgttatatatatattttaatttattgaccctataaattacatatgttaattaataattaataactataattaactaagtaatttatattgtgttgtaattagattaataataattgggtgtttgtttgttgtgatggtaatataatgaggtttaaataatggtcggtcaccatctttagaggacaagagatctctttgtactatattacgtggaaagataattcacgagcaggatataattctatcttaacttttgcttgcttttgactaaagttacttcctcatttaatttggtaataattatatcacacacatattattatattgtagtaatgtgatttttacgtatatatattaattaatattgcatgtgtttagtaattaactacgtgcaatataattatatacttgtcactttcggtttctatctttaagatcatactaccaaatgtagtgaaattataacattttattcgagtaatatatattgtgaaattaaaaaggcacgttgtatacttagctagatatgtacgtatatgtaattaattactaattttcttaagattcgaattcatcatgagtcatatgatctcagacttcatgaagttattaataaaaagaaatgattgtgcatattgttaatgatatcaacgtataccattatcagttattacagttgacaaattagttaaaatcatcaaaaggataaaacgacagaatatgagaagacaaataacttaatagaataaaataaactaaaacgtatatgttaaacaaaagaatcattttgttttcagtttgaaacgattgggagatgtgatttatgcccactcgaaatggtctcaaaagtcaaccaccaagaccaagatgttatcttatatagctagatacccaaatgatatctatacaaatatacatatatatacatacatatatatatattctatatacattattcatgaatcataatgcaacatttgaatccaagaacgtggtgtaccatagatacctaccacttgatcgatggcaattaggtttcaacttacaaatctttcaactaaatattttttccactgaaaaataaatgataataaaatgttgattatatataggtgactttttaataaattaaaacataactataattgttatatttttttttataacctattgttaagaatttcatattgcaaagataatatcacatataagatgtgtgtactactcctctcataaccagggccgtcttaaacattttggaagccctgttccaatcttaaattttaggccctaataaaaaaaaattattttatgataataattgttatttatttcat

SEQ ID NO: 307210 - DNA, 1385 bp, Cannabis indica
atggccaagatgcatgcgatgcatgcaaccgagatgcatgcaaggcatgatggccaagatgcatgcgatgcacgctaccgagatgcatgcaaggcatgatggccaagatgcatgcgatgcacgctaccgagatgcatgcaaggcatgatggccaagatgcatgcgatgcacgctaccgagatgcatgcaaggcatgctggccgagatgcttgagcatgggtctaccaagaccatgcatggcatgcgggccaagtggatacttaagcatgcgtgttgagtggctactcgagcatgcatgtcgagtagtttaagggtgcgcatgccaagtggttcattcatgactaactctgaaagttggttccactaatctcttggattaacgttgactaatctcaaaggttagcttcaataatttttgaggtaaatagctaatacaatgaatcatacatcatataaattattttgttaactaaaatttaaaattatatacattaattggttgtggtcgagtggccgagagcccttgtggccaagtgtctattgttgcatgctagccgataatcatgttgtatcctagttgagatgctcattttccattctatttgatactcttgttgcatgatagccgagatgttgaagttgcgtgctagccaagatgctaaagttgcatgctagatatgatgctcatgttgcatgctagccgagatgcatgtgatacatactagccgagatgcatgcgatgcattaaactgagatgcttcaacatggaattgctgagacgtttcagcatatggggttgtcgagacacatgcaaggcatgatatatagtcgagatgtatgtgacgcatactgccgagatgcatgcaaggcatgttggtcaggattcttaagcatggacctgtcgagacgcatgcaaggcatgcgggccgagtggctacttgagcatgcatgctgagtggcttctcgggcatgcatgtcgagtggctacttgagcatgtcgacatgtatgccgactggttgttcgggcatgcatgttgagtggctacttgagcatgtatgccgagtggctgttcgggcatgcacatcgagtggctacttgaacatgcatgccgaatgacctgatggtttgcttgtcaagcgagtcattctccggaagctagttccactaatctcttagggcccgtttggtacgcaggactggattggattagacaggctaatttgtccaatctagtgtttgggtatgttagaagtctggataactaatccagttaacctcatctgtctgggattatttatcccattcagcatggtgggataaataatctcatgcaggtgagatttttttttatcgtttttttaattttattttattaatatatttt

SEQ ID NO: 307211 - DNA, 2846 bp, Cannabis indica
tctaagtaaaaaaaaaaaaaaaaactttgccaaggattattgcaatatattcacgatcactattctcatgttcagttactagtctcaccaatctccactttctcaccacccaaacatatttccagaaggttaagaatggcccaggctgcacaaaacacaggtaacaaaaactctccatttcctgcaacaaccattatgaataaactggcttttgagttatctccgcctgattcaggtcttcttttacgcgaatctgatattgggttttccgaataacactcaaaatgcttaattttagtttcaattcagatacataaacggtgttgactttataatagtcctgagcctcatatgtgtgcaattatttttaatcgagtgttttgttactctgtgttagcttatccaaaataatggttttaaatttgttactgctttgtgaattgttctatgtagtggttcaacaacacaaagtgatagtaccaaacaagtatggggaaaaactggtgggcttattgcatgaaactggatctttggagattgtaatcatttgccatggttttcgatgcactaaggttagtttttttttttttaattattattattcttgctttataatgcttgtcctcttttcctgtttttccaaagctatttagttcttgaaaagtttattatattggagacattcatctattgaaaatttaccaattaccactcatgataaaactaattgactgtttgattgttaagcttaaaagaatctgtttatcctacaggaaggtagaatacaggtgaacttggctgctgcattggaaaatgaaggaatcagtgcttttcgttttgacttttctggaaatgggtaaagattttgtaatgcaattgcaatttgacgagtgccatatatttcttgttttgaatgaacaatatcgttccagcaaaaaaaaataattattcattggatgtatatgtattttcttcgggtctatactctatataaccaatcagttgttttataatttgtaaatagaactattacagatttaaaaggacttcactgaatgagattatttaacaacattctttttgttctttcacgaaaataaaactatagatgaaactccaaacttgaaagattcacaatcacaggtttgatatattttcctagtcaaagcagggtggtgagctatagtacatatcaaaaactaagttgggccttatcaaactaccttttcattagattgggtttgtgttgtagcccgattgtggatgttggaaaagggttccatatatttgtatttgactatggattgcgtaattgcttatgctgtgtatgccttgcagggaaagtgaaggtacatttgagtttgcatactatgggagagaagctgatgatttgcattctgtaattgagcacttttctgcagctaatcgcgtaatagctggaattgttggacatagtaaaggtgcacgttttagtcctgtgaaacctttcggtattgtggaaagaggaagtaatttgcaacatcttagtcttacactagcttctaaatgaagaacttttaagtggtggatgaatagcagctgtagattactagattacaatctagatgatgtaaaactgtgtactttcttatttttcatttctgtttcaatgtgtttgctcagattggataaacatgaaggcaatcactaatacatataattcaatgtgttatgtaacttgtccacccccatgatacagtatgtttaccaaagtctgtcattgcaggaggtgatgcggttctcatgtatgcatcaaaatatcatgatatccgcacggttgtcaatctttctgggcgttatgatctaaagagtggcattgcggagcgctttggagaagatatcatgcaaaaacttggggagaatggatatattgacgtcaaagatgagaaaagtaatttgctcactttttcaacagtgtactaagaattgtattagaaagaaatgggaaatctgtggtgggtacttgttttcctggacattctgattagagcttcttttcttttctcttttctttttttttgtgtaggtggtggcagttatcgtgtgaccaaggaaagtgtgatggatcgtctgaatactgatatgcatgcagcctgtcttcagatcgacaaagattgcaggttattaaagtagtcttgaatttcctgaatcatcaagctcattatcataatctagtttgacacaatttggcaaccttgaatagctatcatcatattatgttactatatatctgtttttctcatcaaatgtggcttgaattttaagcttctagcctacgaacaattccaactatttggctatgaagttgaaactggctaaacaccactttacatcttggtatatgtattttcagggtcttgacagtccacggaacaggggacgagatcattccagttcaagatgcatatgagttcgccaagataataccaaaccacaaattacgcattgtggaaggagctgatcatggttactcgaaccaccaagctgaattagcttcaatagttttagagttcataaaggcatccttggagcaggacaaggctgcttctagctaggttcttctttctatcaaacattgtcagatagaacggtgaacattaaaattttaccaatatattctatgctaaagagcatgtttgcttttcatggtatgatatcattgtatcaaatggacatgaatagtaacttaataatgtaaagctctctttagaagtgtttatgaactatgagattttggtcccgtttggcttagtttctataaactcttttttagcttttagaattaaaataattcttggagtgtttgg

SEQ ID NO: 307212 - DNA, 1473 bp, Cannabis indica
taaataaaattatataatttataattaaaacaaataatatatttataatagtattcttgaatagtgttatatcattgaagtatttttagaaataaaagtgtaccaaaataatgtgaataaatataaaataaaattttatatttttagatgatatagaagattttagtaccttaaagaatactactattaaagatactctaacaaaattaatcttaatacgggtaaggcgtatgaccgtatcgagtgatctttcttgtgtaatagtggtggaccatatcttttagtgtatctccactatcagctacactgtgactcatggtgggcatgatttgggttctattcttccaggtagaggtattcgtcaaggcaaggcgatcctttatccccttatttgttcttgatctgtgttgaaggtttttcttctctcattaagtattttgaagctcatggggatctggatggttgtcgtgtttgcaatggtactcaaattatttcccacattttatttgcatatgataattatctttactataaaactaataaaaggaaagctttgaatgttatttcactattacaattgtttgagcaagcttttaggtaaatttttctaagtctaccattttctttagctcaaatactacttagcctattaaagatagaacatgtggtatgcttggcatgatggaagctcatgtgaacaacttgtatctaggtctcccttgcaatatgaggcagaataagaatactattttggcctttcttaatgataagatgcaaaagtgaattcagagttgggaagagcgactattatttaaggctagcaaggaagttttattgaaaatagtagcacaagtcctccctacttatgctatgtcagtttttcttctccctgctgatatgtgtaacaagcttgaaggcttgatgagaaaattctggtggagttcagactcttctaagacgcatggggtgagttggatgagttggtagcgattatgtcatcataagcaacatggtggccttagttttcatcatttatgagattttaatctctctatgttggggaaacaatcttggcatttgatggtgaacgactctgctcttgtgagtcaggtttacaaggctcaatactatcctcagggtacttttctcacagcttcccttggtgataaccaaagttttatttggaaaagtatctttgaacctcaaagctgaataaaggcaggggctagatgcaatattggccttgatacttcagtcagcatggtgctggatccttggcttccttatgttgatcacccatttgttatgtaaagaccgcatttataatatggattagtaaaggcaattaacactaattattggtatttttataattatttatgaatttatttaattatggttcttattattagaaatgggcattagagttataatttctcaattctgaagattttactaaactctaagtgtatt

SEQ ID NO: 307213 - DNA, 1965 bp, Cannabis indica
ttgggcttgggcagtacaaaagtaatgaaattgggctggggcagtaaaaatgttatttttgccgtgtcccagtataattgtaaagttttggtccaaaagcagtatttttgtaaaattccctatgtaaataaccctataaatattctaacatgttggagctatcttcgggattcatatctctgctaatctctcaattggcttagtagcttgtaagtccggccctattttggctgttattggttttttgaggcaaaaaataagtggaaaagggggtcatgctgccattccttaatacacaatagatcctattttagcttcttcaaatgtaattgttagtttgcaacatcttgtttctcgtgaagctaatccttcatactctcaggttctctctcgttaagagtttgtaattgtattttatttttccaattacaacaaatgatgagctttgatgtggatcaatatcttgataataaaactttcacacatattcaaatggctttttttttaagctacaaagttgctccactaatacatttgatatgttacctgtaatttcagcttaaggaaaaacatcacacacatgatttgatcaatttattctcctgtttgcatgatatccaaataatcaaatgaaaaagaaagttttctaactttgatcgactcaaaatgacactagtcaaaattatcttgggcaaattctctttataaaacagtaataatatttttacatttaacaacgctagctgaaaattcaggaccaaataaagataaaagctgaaaacaaagtctcaatgaatgattgcaaaacataatcataaacataaatgtttctagtttcgtggatcaagaactgctccagtgaaaacaacaaggttaggaaactcttcaacaatcataaacatgaatggatggtcagcaacaaaggaatcaagtggagtaggcatataatctggagcaattccaggtatcataccaaaaacggcagctagtggaggaggttcagaattcagacaagagccgtatgacataccaacaaaggttgtcgcaacagcccttgtcccatcttcattcacttcgataaaagacttgtgaagcatattctctacgaaaacattggtatcaggagactgagagcacaccatgtttgggaaatttgcactagccttactgaaaggcagacttaatcctctttccttgaataaattcttagcatgaagttcaacatcatatgacaatttcatcttgggaattgacacacgagaaagttccatgctccttagatggttattaaaactcttgggtgacaacaattttggattcaccttgaactttttcactgtattttgaaatctgtatgtgtcatgaggaagaaataagtacatagagaattgtgtttggtttccattattacctaatgctattctttcatatggaagtttgagaaccttgaaatcatcaagaaaagcataggagtaagaaacattatgactattcatgaaaggtacttggattgtttccccattaagaaggcaaaacttttcatcttgagtcttcgaagccataaaaggtacttcccatgatccctcgaaagataatacacttaaaagacaaagtgggggtgtcaactttacactctttgacaaatatcgtttaatgagatgtctaactttatcagcctacatacaaaaattaacagtggtcaatatgaaaaataataaaagaatcaacaaagacaaacaagtacagaattatagattgtacctctggctctaacttaaggtcgacatttttcacttttgccttatagattgtttgagtgatttctttaaaagatggaactaactgagagttattatcaagccataaggagtttccaaccaaaaaaggaggtttttgttcaatcttctgacgttttggttggtgaattgtgggaagaggggaaggggtggaggccttagagacaga

SEQ ID NO: 307214 - DNA, 816 bp, Cannabis indica
tcctcttgtcacccaaacacaattgcttttattataattattgttcttctattattgttggaattattttacttcatttttcaaaaaaaaaaaagcaaagaaagatagtaacatcatatagtacttaattaaattatgtgtgcctgaagactgagaagcaaaagagatattcttaatttgaggtgctttgtacctttatataattcaaacacacacatgaactggagtcatatgcatgtaaattgtactatatttataaatatgtaaatgtaaatgtaaatgtataatatataggtaatgaaaatttataatgttatggggggcaccacacacacatatagcctcatatatagatacatagccttgtttgttccaattattgttagggtttgctcttgcataatatatatataattgtacacacatctctctctgtcttcttagcaatacaatatgtattattattgatgggaccataatatataaatatatatatatagctagccctctcaagtggggaatatatgaatttttattatatatatatatatatattcatatatatcaagtggttcgagcttcataggacagggaccgcttgcagagaggccagttaggctgaagatgagaaggccacagccacagtggaacagggcacagtcacaggttgatgatcagttatatattcaaatagaatattattgtatgaaaaatgtacagtacaccctagggatgtttggggtaacctcttaacttatatgggatatgattttgtcccgtgatatactttcacggaatgtattccgtggtacatta

SEQ ID NO: 307215 - DNA, 1380 bp, Cannabis indica
ttttttttacgttatatgagacttcatattttaattagatcaataacagtatgacatggagaaggatactagacaccaataatctcttttaacaattctcattatatttttcaaaaactattttttttgtgactcctcgaaaattgattatttattataataacataattattttgtaatgtatattcattcatcaattggattagaaagattaataatatttttttaaaaaaaaaagtttaataatatattttttaaaaaaacaatagtataacgtctaataacatcaccgactaaaaaaatgccctatatacatattacaaaagcaaagctactaaagactccaaaacttatatataatcaaataattaactattctaattattttttaataacaataacagaaacaacagtaaaatattttgtgaaaaacacacatatttactgttttctgtacatatatatatatatatttatatatatatctggacctgaagattgttgtagcggttaaatgttttgaagcaaacatggcaagaaaagtgagtgaagccaacaagtatttgttgtgaagttggaatccagtattcctgcacaactgtaacgacgtcggatgatggcgccagtgctgcagtttcattattattattgtctgattctgatgagtggtattccggaagaccaatgttcaaatccacagtaacatcgtcatcattttgatcgtctgatccacttcgtatattaatagggttttgattagaataatcattattatacgaaggttcaagtgaacgaagcaatagaggctcgttcggaaaaaggtcgaggggtttggtggacatgtcttggtgatcatcatacaactccataaagcatgttatgttattaaactatatatgattacatttatatgtgggactatatatattgtgaagctactttctattaatgtttttggctacatagctacatcttaccgcagctattaacgttaatctgaaatcaatatgatattgaaatgtgtagtgttgtacgtacgtaagaggagagagatttaatatattacagttgaatgaaaagacctctgtaaagggtctcataattcttccctgtctccactgaatagctgattttggaaatgaaaggtaactaaattaatatcggtggcccatgccaactaaattaagtaagacttcactgcagtggatcgaattaaaacgtatttacattgattaatcttgttaagcaattaaatatatatatatatatatatataattctctacctacagccaaaaccaccattaactatacatattggttgaccaaacgattaaattcctagtttggacgtgcaatatactttttcgttatatttgtt

SEQ ID NO: 307216 - DNA, 1336 bp, Cannabis indica
acctaattaggtgagcctgtgccaaaaaacctgcacccatatatcatataattgcatcacctaatcaggtgagcccatgccataatctgacacctatatcgcatcgtctaatcagacgagcccgtacctacgctcggtacttatcatatatcactaacacccgtacttacgctcagaacgtcgtcaaaaaaatcgcatcacctaatcaggtgagcccatatatcatatgcataatatcatcacattatcgatactcaaccaatcaatcttttcattacataacaatattaactatatctcaatattaatcaattcataacaatattaattgtattacataccacatactatacaattcaatatacttttcttatctgcatatagaaatgagtgtgctagcggacccgagccacatataatttggcgtataataatcctaagtcatattaatagtcagacaataaatgtctatccaaaacagccatttagaacttaaactgtaaacttttctattaataactaactataaaaatcacaccttacaacttaaaatttcactctcaactcactcaaattatataaactgaactcaacttatattctccaaaaaagctttcataaaactacaaaaatcattaaatttcttaccaaaagttcactattgaagtttagctccaatatatgagtatatatatatcaaaacctataaaattttaattgagaaataaagtgatccttacccaataaatatttaagtaagattagatgataaaccccctttgaaccttcactaaattaagcttcaccttgagcctttatggagaaaaagtttatggaagaagatgaagatatgataatggtgggttggctttgtgggtcttcgaccaagacaaggcagggaaggagaggttacttctaacttttatttttttttccttttttttttttattatatgattgaaaaaaaataatgttgataaatataatataagtgtgtgtgcgtgtatataggttggccaaccaaaaaaaaggagatagacttgatctatttaatttttatcatttttagtttatttaccagtaatgagaaagttaatatgagaataatgatgatgatggtgtgatataggtgtcacaataggatttaatctaataataaaaaaataaaagataaagcttgaaataatataacactaagtaatcccaattttactataacattctaataatcgcaattaaaatagtaccccaaataataagtaaacccaaatctatttattaactaatccaccaaaatatatatatatatatatatatatatatagtaggacaagta

SEQ ID NO: 307217 - DNA, 576 bp, Cannabis indica
catccctatggagatatagagtgaaatggctgatgagagtgaagcttccagtgagccattttccaggtggaacaaagagaagagagcctccactcgatgagaaacgactcaaactattcatggctgcctgaaacgactttgtatttgatgtcgttccatctcccactccaccaaaatcagtcaacgacgcactatgggatctacagctaattgccatgtactcaaagctccctatctttttacccttttgcccctctacaccatttgtactggtcaacaaagctagcactgctacaaccaccattattatcgacattttggacaaactggaaaaaaaaaatacgttagtacttcaaggagtgtagaagtaaaaagtggtgaaaggacgaacaaagaaggattttggttattacctgatgagttgttgaggcaattttcttcccaaaccacataatgaagaagagagcgttactcaattttttgttttttaatttgatttttgtgaatgagttcaactcttttcgccatatatataggctcttcacttatgtttatctctattattattattattat

SEQ ID NO: 307218 - DNA, 2224 bp, Cannabis indica
tttttgttgaatttttttattatttctaggtaaaaatattttgcatgttacattttttttacttgtaaaattattttagaaacatgttagggttgaaaaattgcatgaaaaaattgggtagaaaattttttaggtcatttttggtgcaaagtaccctacacgttttttatatttgtttttttgaatggaaaatcaaactttattaaccatcaaattctattaccaatgcatataacaaatcattcgagacatccttcatattaaaaacacgatcaagatataaaatggatgctctaacaagatacgagcaagacataagttttttacattcttaatttaacaaaaaaaaaaacaaaaaagctaatattaaacatttcattataaaatagtcctaataagaaaagaaacactattttgcaaaaagaaattcaaaacatacttttgtttgttacataaaaagactacttccaaaagtgtaaagtgataataaattagaattagctattacatgtgaaagcattgaaaaacaaagatagcaaggaagataatgatgtgtgaaacataatgataagaagagaaggcattgttggtgaaaagaagatcatgatcaccatgttgattattgtgaggaggttctagtgattgatcttcagaaaaatccttgacaagaacagccactttcattcccttaaagcagaaacctctaccactaagaaagtagaaaaccttggcatcggtgaggttgaacacatcgcgaccgcctcttgttacatttgttaagaaatctttgtcctcacatttctcatagtttgttttgttcacctccaaaacattataaattagcttgtcgaatccaaaatctgtttaaaaaataaaaattcaaatttggaaaaaattgcccaaatgatatagtgtcatcatatgttataagaattaatattagaaaactacaagaacttacaaagccaatcaccaacgtagaattgctcatggattgaccaatttgtaaagttgatgtttgggttccaagaaaatcgtcctcctccgaccctgtggagaattggatttctgcattctgtggataaaaggttaacaagtagtattaccaatactttcacaactccatttctcaaactcctcataatatttttgttctaaatataaaaaataaactaaaatatgttgaggctagttcaatggggtttatattttgttctacatatataaatctttgaaggctacgtggttagcatttagtaagtaatattataaattcacacaattagcatgggtgagtgtacttttaaatttttagtttgaacattattttcctgctattaagtacaactaatttgaaggaataactgcataataaactttggcagtaacagtggagtagatgttaattgtaaatgcttttggtactaaattttgtttttagtgaaatttatttcttattaattataaagagttatgtaatgtactaaaagatttggccacatttaaacatgtagaggccgttatgccttacgtgaacagagtagttgatcttgccgttgtctggtcaacatttcaatttcagtttttatttgttttcatttagctcgtaagacactcataactcatgagtcatgacattgagtcattgaggttcatgtgaaaaccatctcataggatttatatgtactaaataatttgtaaaatgcaatagaggtgtatatgctaaatattatcactaaatttggctccttcacaattgataaatataactaaaagagaaacatccgttcatctttatataaatagaactatttcaaaatgaattcaaattttttaaaaattatggtttatttttccgatagttaagtaattgtataattactaagtagtgtaattattattaaggacaaagccaagaaataaatggtagggggataatatcaagtcaggttcaaccctaagttaaggtgtgatgaaattgtgcctaaagtccaaccaaaaacaaattgtatctaatatacttatatgtagtggagaaaaatcataattttgtaaatgtttcaaaaaataggtccaataatatttaaacttagttttaagtacaacacacacaaaaatcttagacccatttattttaagatcggccttgtatcaagtaatacatacgacaataatatttagtaaaaattacatgaaatatgggattttgtaaaaaagttacaaa

SEQ ID NO: 307219 - DNA, 1704 bp, Cannabis indica
aaggtataacactagatctaatagttggtaagtgtgatttaatacacttggatgatatcataatatatagtgtgcatgatttgatcaaactcttactcttaagtatttggcattgacatatgaattatgttgcattccagcgtatgatggagaaagctataagaaacgatgttgtcaaagttgtcgtaactgcaattgatgtgatttgcagagttttaaggctagtactttgtttataagattatcttctggtcagttatattatggtattttgtgatataactaagttaattttcactttttatagagagtttggtgataaagttgtgcctccaaatagaatcctgaagatactgcgtgaactatttgaccatgaagatcaaagtgttcttgcatcttctaagaaactcacaattgagctttgtcgatggattggagaaggttctgtaaaattaatagtaatgtctttttcttgaaactaatgacaatttttttgggttgtagaaaaacgagttggaggctgaattggtcaacataactaacactaaacctactccatcaagaaaaataaggttacagttaatttgttaattagcttctataaataatttctttttctggttaattattttctagtgtattatatattataggtttgagcaaggcaaggagaaaagtcaaaaaactagccttttccgtatgagcgaaggtgaattagatatagtattgcaagaatcaatgttgctttatgaaaatctggttataagagaaaatgaagaacaggttaatgaagaggaatttacttttgaagaggttgaaagggaagcagaagcacaaaatattgagttatatccttgccctatttgtcaagggaggtttacttcattagagattgtgagtaaacaccgcacagtgcataagcattttaagcgcagacgcatgtgaagattgtttcacttgagatatgcactttaacacaatgcgatcgaggaatattatagtattttctatctttttattactcttgaaactaagttttccgttttgtaatttgtttggatagattcctgtgctgttcttgaaaaaacaaaaaccttcaaacattgttgagcttgtcagtcaatcactcaatttatactgtgtattcatctccagcaagaaaatatttgcaggtggacaactacttttttttgtcatttagttacaaatgtatacaagttttttcattttttctttttgtttagatttttttttataggatacaaatttcactctttttttcctggattccaatccctaaaatatgaatagatccgatccaatctaaaaaataatatgtctaaaatattgaataatcataaattaaattaataaatctatatgaaataggatagaatcgaggttagatcaattggactgaaattaattagattagatgataaacatttaatacataaataaattgaatttagataggcctaaaaatattgaatgtggtccagaccactctagttattactctctatttgtaattgtctaggtcccttttgtgtctattctatataaagtgtgtctatataactgaaattcttggtttatgacaaattcatggtgactttttatttttatttaataaaataataaaatattatttatatataataaaataataataaaacaaatcctattaatatttgaactgat

SEQ ID NO: 307220 - DNA, 3198 bp, Cannabis indica
agagagagagagagccatttctttaagtcttttagagtgggtatttaagtatcaaaatatttttaggaagagcgtcaatatttatagttggcaaattttgggagtcttgaaatttacacttagtaaattttagtgtccatactttccccttgggtgaggaaagccccccttatacaatgagagaccccctttgatgaggggaggctctcttgggtgaggagtgatagtccttcttataaagggggcagagagcataccccgttgtaaagagagaaggggggagggggagagcacttgctacaagatttgtttgtattttgatcatgacttgttcaatgttactctaattttgaagattctagatattttggaaagctaagaaataaatctactgttttttatgttaccgagttctgatttaaagatacctaagaccaccaacaagttatgccttataacttgagtcatcaatcatttcatgttcctatcaataagtgtcaaagattctcaaaataacttaaattgcaccattagccttcaaatatcattgtcaagtggcgtcttcataattagagattacttcgcttaaaataatttcgatattgcacctttgtgaaatttcagagttaacaattataaatgtaaaaaaaaaagaaaggttactttcttttgaaaaaatattagagtaattatggagtataaattgttttgaatcaaaccaaatcaatttatttgtcaagttgattgacttagtttagtttgagcattaaattagttttgtttagcttgattgacaatgtgtttttataatgagtattgttataaggcatcatgtagtgcttagtaaataattaatatattttataataattattaaattaaattatgtggaattagatgtttaattaatccaataaggatatgatactataagtagtgttagatatcaatgatatcttttaacatttttcttttataataggagattattcctctatcatttgtactcatcttcgaataagtattaaaaaaaactagtttggttagaaaaaaaaaaatacaatttcgaacaaaactagttggtgaacaatgttagcaaatgtgttactgataataatattttaattgagttgtcatattcactagttgctcttgctagtcaagtcttcaaagaagccatttcttctcatgtcaagtggaaaaaaagaaatagaaaaactcatatttaaactcttaattgtaatcattgtctctaaaacgtggaaaagtagattaaagaatctcattactttaatactattactattactaatattatttttagaatcggattacataaaccaagactgaagaagtttcttagcttgcagggtctactttcactctctttacgtgatggtctttataggtgtgctatatatatagtcacaaactaccctttctttcttcaaatctttacatataaaaaaaactacacatacaaacactctatagtctataccaaccaagaaaatattttctgggcattcttaaaaaatggctacttctttcaccttcttcttcttcttcttcttcttatcctccactacaatctttatagaagctcacaacaacaacccttcgaagtattgttccaaatggggtcctgaaattcaatctcctttccacatagaaggccaaacccaacaaaacgacaccctctttgaagtcgtatgcagaaacaaatccaccataatcaacttccaatcccatggttatggtgatttagtggtgaaatcaatctcgtacgacaccaaaagactcgatcttcttgaccccaaaagctgtgtccacagagtctttctcaaccttaacctttccaaaaccacattcgattattactatcttttaaaaaactacacttatctcaactgtacggacagactctcccctgttttggcagaggtcccctgtttgagtggctcacatcattttgtttatactgttgagccttctgccatggcagccatcccaagcttctgcaaacccatcaaaaccgtagctattccttttgcatacagtccttatttggctgataatagttttggcttgagtttgacttggggttttcttagtgcccaagattttgatcaaaaagatggcttcagagttagacatgttcaaggtatgtgatttttttggctctttatctttagtgctttattttttttttggttagtttgttaagggaagtaatctgtggtatgagattcttttcttgttgtagtagttgatatcttaatgtggaaagactatgaaaaagatagttcaaatctcaatcaaaacataaaagcaaattaatttaatgaacattttaagtacttttatagagtaactaattaaacctaagcttaacactaactacattttttagagaggtgttgtaggcacgtagtttaaactttaaaaactctcaaaagtctcaatctaagtacaagagtgtattttagtttaagtctcttttttagataaagagaaaattaggcataaagatttagaaagaacaacttgttttcttaaattatgaagctctttctctttcaaattgtatgattgccaataattcaataattcatttgtaaattcttctctttattttttctctaatgtaattagtcatcagaaatgaaagattcaaggtttttttttgtttttttggtgacattgtcaataagcatatataatattaggaaaaccaacgaagacttgacctactccaacttgctataattctaagtctcattcacatcctacaatttaatttcttgaatatttcacaaattaaaaaagaaccactaaaatctaaaatcctttagccacatctagctaatactacttatgagctattttttttttttctcatttagactgtgttcaaaatttctaatgacttgcaaattgactcaaaagtcaatggacctactaggtgttaacaaggatgccccatactcctatgtaaggctggctataggcctaggtgggctaaatctttatctagggccttcaattatcttcaatattcccccaaaaaacaaaattgactttcaaaaataacactattttagttttatttaaaaaatagaggaaattacactctataccctttttatattgtcctattttatttttaccttctttttaaaatctatcatttttacc

SEQ ID NO: 307221 - DNA, 3218 bp, Cannabis indica
agagtccaaaatagtatttattttgtattttttaatgttgaaaataagagagaagggtaaattgggtatttggtaagccaaagacttttgcttagtgtactttgctcttcgctggttttgaggactagggcttaagcggtagctggacgaagaagaagaagaagaagctctgtcaatgggtgcaagcagcgatccgactcaagatgggtccgacgagcagcaaaaacgttcagagatctacacatacgaagctccatggcacatctacgccatgaactggagtgtccgccgcgacaaaaagtaccgactcgcaatcgcaagccttctcgaacaacacccaaacaaagtcgaaatcgttcagcttgacgactccaatggcgagatccgctccgatccatctctctccttcgaacacccataccctccaacaaaaacaatcttcattccagacaaggagtgccaaaaacccgacctcctagccacatcaagcgatttcctccgagtatggcgaatctccgatcaagattccggtgtcgagctcaaatctcttctcaacggaaacaagaacagcgaattctgcggtccgcttacttccttcgattggaacgaagccgaacccaaacgaatcggaacttcaagcatagatacgacttgtacgatttgggatatcgaacgtgaagctgtggatactcagttaatcgctcacgataaagaggtttacgatatagcttggggtggagttggtgttttcgcctcagtctccgccgatggatcggtaagagtttttgatcttcgcgataaagaacattccacgattatatacgagagttctgagccagatactcctctggttcgactcggttggaataagcaagaccctaggtatatggctactataataatggatagtgctaaggttgttgttcttgatattcgtttccctactcttcccgtggttgagttacagagacaccaagctagtgtgaacgccattgcttgggctccacatagctcttgtcatatatgtactgcaggggatgattctcaggctttgatttgggatctttcttcaatgggtcagcctgttgaaggtggattggatccaattcttgcttatactgctggtgctgagattgaacagttacagtggtcttcttcacagcctgattgggttgccattgctttctctagtaagcttcaaatattgagggtatgaatgatgaaagtaaagaaaaaaaaaacaaatctttctttctttctctttctctttgagtttgattattgatatgatgaaaaatagcaaagaagggtcgatgatgatcactgaaagctaaagagaaagcttcttctcagctatggtgctgatgatgatgatgatgatgatgatgatggagaagaagaagatgatgaagaagaagaaggttactactattactaactatttctttatcttcttgtttcttgtttagttgttttttttttactaattacctcataattcattccttattttgtctcatacattgtgttccttagtttgataattcatgttcattgtaaccattgaaactatatgtaaaatagatacattttaactttaggggaattcaattagctcgaatggtcagatatgtgttagttatgaagaatgcaattagaatgatagtagtactaatactagaccgatagctcggatggtcagacatgtggttatttgaatttcgagcctccgaatgttgtagggttcgggtacaaagttctgaaagaaatgtgttagagatcgagttcagtttaggggttagtttttagtaatcattaggtgagttaagagtggttgatttttggatttggaggagaaattgaagagtgcttgtgttggttcaagtgaaaactatgttttgtgatgtacaagtactaatgaatgaattaatatctttttactgtctaatttactttctactaaaccaagtattaaaacaaaagacttacatattatatcatgacaaatgtggatatagattaaggcctgccaagaggataaaataatctcaagtcttaaaaaaatcatcatttacaacaagttttgagtcataatttgagacttgccatttgataattgatatcatcatcctcaacaaaacaattgcaagaactttttggcattacataattgtttaccggtttttcatactatttattattatgtcaatatattggaatgccctagtaatagtatatgttacaccaattctcttttgtaagattttgtataaattacaaactattattgtttgaatgttaactgaaagaaccaattccaaaacagcagcagatgcacacaatgggaagtatccctatccaagaatgactaacgatttgtgagaatattagggtttgtttttctttcagaagtttggtatgatattgcctacctttcaacaccgaatgttatcaaagaatactgaggatatggaaaaatgaatcggtagagttgcttattttggaaagaaaagtaatgttggaggtgtagatgatggttgtaaaaagtgatgataataatttgtaaaactagaaaatctttacgtcttctaattaaattattgaatgttgagaaattctctcctatttatacataatgctaattacagcttacactttttttaacaaaaaatttgagtgctataatatagctggtagcaaggagttctttgtagggttacattctttattattattattattattattattattattattattattattattgtaaacagtggcataagtacccaatatttataaaactgtaattttattccagtttcatcagtacaaattctgttattgtcttaaacagaacacatgtaagactcaaattttggattatttggtctggacgaaaatatgtagtattagttacttctaaatctttttttaataaatttaaaacggagtcacgaaaatagagaaaaattacagttttacaaacattaggtacttatgccactaaaaatattatagggtttatgtgcttacaaactcaaaactttgggtatttatgacgctatttacttttattattattttaaggcaaaataaatatttatatgttttgtaactagctaccaatgtttaaaaaggcgtttttgaggcgcaccttgaggcgcgcctcaagctgaggcgtttgaacagtgcctcaaggcgtgcgccttgct

SEQ ID NO: 307222 - DNA, 740 bp, Cannabis indica
tccaactcctttacgtccaagaccaagcccgaaaggtacactatagctctcgccttttctctcgttaatttctcgagtaatatcgtattatgactctgtttggttgggtaaccaataaattttaacttttagctctaaaaaattcttttcataaaagtcaattttagtagctaaaagcaaaaattcagccaaatagaacttatatctctattctagagtaatatattataaatcatttattcatacaatataactaacgtaaaaaaaattatgtgtagattacctttgaagtgttgatgaaagtgttaatgagccttgatcctggtgaagatttaaactccttaaaagaagattttgaagaatttataaaagggttaatttgcttacctatcaagctccctacaacaagattatacaaatctctcaaggtaaatatatatatatatatatatatatatacatattactatatggtagctagactcctatatctttaggtctaaaatttggcctatctcttaattattttagaactacatataaattttaaaagattacagtgtcaaatataagagtgacacaattaattaccacgcgtaatttatcatgcgtataaaaaacacaattgcacgtgtaaatatttaaattttattttcattattataaattatttaaatttttaaaaatttacggataatcataaataattataatatccataattataatttttttttttt

SEQ ID NO: 307223 - DNA, 1780 bp, Cannabis indica
attgtttgtatgttatgctattaggcaacttaaaaagtattcatatcaatgggagtaattaatagttttttatattatttagagtaaatgttatttttgatttattgttttgtaaaaattaccaattagacttcctgttttgttaaaatgaaaaagtagactctgtaatttctaaaatagtaaaaataagatcttgaactcaattttcaataatttatttttttttaatataatcaattttaaaataatttctaacacaaacaaatacaaaaaatgtaactagttttattatatcatttttagattagattttattaagttttattttgacaaaaaatcagttcagagttctatttgtacaattttaaaaagtatagaatctattttgtcatttataaaatagagagttcaattaataatttctactaaacataaaattttcttcaaaagaaaaaaagtatttactttattatttattaagaaaaacaaaaacaatttaagatattgtttactaggctctctaatttatatatacgatttacactaatagctatataaaaccgaaacgagtactaggcactagtagtattttttaatatttctcttttaactaatatcactaactaagcacaatatattacctctaaatagtactaaataccactaatacataatatcagtgatgtctaagtgagcatctacactactaactccaataataatgatagtaattaataaaaaaaaaaacttacagtagtaactttcttataaatttgggcaggattagagcactcgctataagggtactcagaggtgagcatttcaagaacacacataccaaatgagtaaatatctactaactcatcataatcctcctcgtacagttctggtgccataaattctggtgtacctataatataatttaatatttttcataattaataccaaaaaaacaacaaagtttatcattttacaaaaatgacataaattttgtataattattacctattacactgtgggcatgttgggaacctcgaagaatggcagccaaacccaaatcaccaattttgacctgtccaagatgcccattcacaaagatgttgtcacactttagatctctatggatcacaggtggatcaagcccatgtaaatattcaagcccacgtaagatttgtccggcccaattctttacagcttctatatttactctctggtacttttgtctgtacctattaaatattaaatattaatgtaagaatttaatgttgttaatttccacaaattataataacttcattcatagcaattctgaaaaaaattagctaagcaattaagtaatttttttttcttccttttttaataaataacattagcattttagacacacttactcaatatttgtgtgaaatatcattttgtaaagatgtaacataacaataataattaaaaaaaatatatatgtatggtgacatagaaagatgtatgcaaaaatatgtagttgaaagaataaccttttctttttgattattacttggctatttgcacaataataattttgttttgataaatattatatagaataattttgtgtagatttcatgcaaagactatttttgtaaaacaaattatcgagaaagcaacattattttcctaagtcacaattagtaatttttccccccgaactttgacatgtattaaatcgtgctccctgaacttttttggccgttaaaaattcccacgaactattgaaattgtaaatttaaggacttctgtctaattt

SEQ ID NO: 307224 - DNA, 2340 bp, Cannabis indica
gccgattatcatgtcattctagatcatgaattgacaaatcatgagaattaaacttttgaacatataatcatgattatattccactgtgctgacgacactataattatgaacaaatatatatgttctggacttaatagaatttatacattaagtatactcatgaaataaatcatgtgaaccatgcaacataaaagaaatttctgttcttatattaattagtaaatcttattatattgaaatgagttttatttagggcagacaacccaacagaatattgaaaacactcttcaatcaaagctatgaagaacttttcaaaccattgtctataagattgtttaaggccatgtagggatttttttaacttgcatacaatatttggtggtagctcccccttaagactataaccttgagggagagtcataaacacatcctcatgcaaatccctatgaaggaaagcattgttaacatttaattgatgtaaaaaccaaccttgtatagcagttaaggcaagaatgagctttacataaacaaattttgtaataggggcaaaggtttcagtatagtcaatgccttcttgttggttgtatcttttagccacaagtttggctttaaaccttacaactgaaccatcaacatttaacttgattttgtagacccatttgtagcctatgatatgttgatcattaggtaagctaacaaaaatccaagtttcataagtttcaagagcttcaatttcaatatccttggcattgtcccgaactgatatacctcgagcttgatggtaaaaatctggttcatagtgacttgaaatagctagcaaagttgctcgaaattgtggtgataacctgctgtaattaataatctcagatagaagataagaagtagacaacttagacaccagagattgaacattgttagtagacaaaaaatagtgataatctttaagataggatggtttttgaacatgcctagtaggtccactattaacacacattaattgtaggcatatcaataatatcagaattaggaatacattgtgtaggttcagtagatgaatatggggattctgcaggcttattaggaaaacatgtagattctacagaagagtagttagaagcattaactggaaagaagttgacaaaatcagaagggttagaaccaaccaaaataaaaggaaagatttgttgatcaaaaacatccctggaacaaaaaacattattggtatttagatcaagtaacttataggctttcatacctataggatatcccaagaaaacacaagcaatagccctagtggaaaacttggatctagagctcctagtgtagaagcataggctaggcacccaaaaggttttatatggtcatagctaggggctttggacttgaggatttcaaagggagatttgtattttaggttgggtgtgggtgtcctattgacaagataggctaatgtactgaagcattccccccagtaaggcaaagatatgtgagattggaataagatggctctagcagcatttaacaaatgttgacgctttcttttcacaacagaattctgttgtggcctttgcacacaagaatcgtaatgatcaattcctaaggaggaaaacaactctagaaattttagttctttagcattgtctgatttaaacctcataattagaatgttgtattgggttttgactaactgtatgaaggcatggatagctgtttgagcatcatattttctatttatgagatgaatccaggtatacttggaacaaccatcttcaatgttgataaagtatctgtagccttcaatagtttgagtattgtatggtcccccaatgtcaacatgaacaacaataagcaatgttttgaaatatagcaattagaaattttctttgttctgcaaagtgagaaatggaacaatggaaatcagtacagtgggagaattgaaattcaaaatttttattgagaggatgttctttacacaagaagcatgaccaagtctataatgccacaaggcatcattattaatttttgaatcagaaaaggagtatacagtacgaaaaacattcttagtcaaatagaaaagatttctaatcctctcacccatcccaatcacttaattcttggtgatatcctgaataacacatttgttaagagtaattagctaaattagataaagcacaagtagaaatcagattatgtttatgttggaatttaatgccctaaataaaatccatttcagtctaatcagatttgttatgaatgaaaggttagaagtcgtgatgtttacatgtagttttcaagtttatggtttaatatataaaaaatctggtaagtcctgaacatata

SEQ ID NO: 307225 - DNA, 1301 bp, Cannabis indica
gagtaagacggtgggaaccaaatatgaaggagattagaaagagatcaaggttcagatcttgataatgctttacgacataaacgaatcaagctggtaagattttccgctgcaatcaagctggtaagatccaggttaagggctagatatatgaacgaaagaagtcattatattccgctgcaatcaatgtaagattttcttaaactcttatgtgtttaattttattattttagagaattcatatttaggatgtgaattcaacatacttgttagtaaattaagagcctggtaaaatattctcagcatatatctgagtgttagataaaataggttgaaaatacattcaagataaatgtgaatgcatcactttttgaaagagagggtaagtatggctttgacattgtggctagagacaatattggcaagtttattgaagcacgagctggttgcaataatgactattatgctactgaggtggttgcagctatgcgaattaaggaggttcttagttagatcaagagcaagcattggcagtaaagtggaggttgaaacagacagcatgttcttgatgcaggccattcgaagcaatcaaccaatgtgatttacatttgatttgctcattgactgtcaaattttattatcttctttttatttatattttataagacaatcaataaatcgagtagctaatacactgtgttgcaagacacttttggtatcaattgttttggcttatttccaaagcctgttatatttagagtgctaaattttaataaagttaatatttcatttaaaaaaaacttataaatgtaaggctgagtttaggtgtgagataaaccatgcaataatattgagatcccatatttattggaaattgagtacgtaggtacgtatatatacctggttggtttttggtcactgcttacgtttaattatcttcatatttggctgccctattccctctccgaacacattattaggttttaaatttaaagcctctacaaaaaatcatgtgcagaagatcaatataacgtgctccatatataagtagtatttaatattagatatatatttttcttcctaaataacaataatattatattcataactttcacaaaaaaaaaagagtaataaaatattatcagtgatactgcatatatggcaaaccaggaatgacatggtgtgtagcagaattttgagtctgtggccaaaaaagtttattagaatgaaattaaaaaagatattatataggatgtaataaattgatttagtaaactgcttgtttaaaaaaaaaaaaaaactct

SEQ ID NO: 307226 - DNA, 2532 bp, Cannabis indica
gatttttaaattgtaaaattatttcaaatttctcaaaattttataggatgtcttaaataactataatgtacacgactataaaaaaatttagactaaaaaattcttatagataccgaaatagttagaggttgcatcagtacacctattttgatggagtatattatagaagtacccaaaaatatttaatttgtttaagttaaattttttttcagtgggggttacaacccccatatcccataagtgtgtttgtcactgcatttggcaccaccattcacttattaaaaataaatgtcaaggtgtaccttaaggtgttaaacactactagatgtggtaaatcgctattaatacaatttaatattgagtcccatatttttttaatttaataaataataaggtttttctttttatttcatgagtacgttctttttatattttatttacaaatttaattttttaaaaatatgattttaaaatttcaaaaatacatttttagcgacaaaaaaataaaaggtgtaagaaaacaataagaaatcaacatcataacaactataaataaattataaaacaacaaaaaataaataagaaaatcaatctcataacaactataaattaaactataaaacaaccaaaaaaaaaaacagtctaatgacaactataattcaactatgataaaacaattaaaaaagtattttattatttttactaaaaatatatttttgtaaataaaaaaaaaaataaagcgtaaaaataaaaaacaaatcataaacgtatttttgtaattttggtttataaattttctaaacatttattcatttgcaatgatggtgaaatattaatgaatggctaaactatgtcaccatgaccccaaccaagttatacagaagtcctcaaaataaaatatcacaatttatatataagattagtcccaatgcaaacaaagtaactaaattactaagaacttgatgcttatactaaagaatataattattatttcacaatagtacgttttattctttttttttaacaaaaaatactgttcatgatctcacggtattatatataaaaacattgaactatttcttaaatattatataaaatctcatcatgtatttttaatttaaaataatttaaattggatatttgtgctttaattaacatatgtaaagcaaactattaaaagattaaaaattaggcaaaatattgaagtaaaataaaaagattttattttactttcttttggttttgctgagaagtgaaaagtacaaaaaggattaagttgaagagttttgggcttataaatatgagtcacacgatttgcatgaattccccttcccttttcaagaaagaaaaaaaaaagaagctcacaactttggtctgtcacacttctcagccgttgattagtacactttggatttgttctatgctaaaacgccacacatcatgctgttttgatgtctttaaaaaagcacttacatgagttttttatttttcctattatttttttttaaataattttttgtttactatatattattttaaattattgtttttataaaaattatcgattaaattttttattttgttaaataataatttaaactctgtattttttaaaataacacattaaataatctaacatagaaatgttataattagtctggttatatttttttatatttgtttgtactagaattgagcttgataatgctaaaaaaattggtaaaaattgtgttcaaagtactattttgtatcatttcgaaaaatataaggtctgatttatcatttaactaaatagaaggtcatatgtcttattagtaatttttgcaaaacacgtgatataaaataatatgtaatctatttttaaattctgttgtatgtcatatttttgcataatattatgttaaattttaatttatatcaaaatattatatatttatatgcacatacaagtcaatacatatacagtattatataaaaatatgacatataataatatacaatttaatataatactacacaatataatacgatataatacatcgtaccttttaagatgtttaatatcatatcgacgtgacatctcataattaattagtaacttttcatattatttaataagggctcgtttgataggctaataagagtcgtattgtattaaataataaataacactgtgctcgaataaagcaatgtattttattaattattacgactaaattttttgatataatgtaacttgtattatttaatatataataatggtccgtattagcttgtattataatatttacaaaggattcggggtcaatctaattctcagacccggacccaaacccgaactcgggacccgaacccagacctaaacctgggactagacttggacccggacacagaactcggacccggacctaaacctggacccgataaatagacccgatacccgacccgtagtcggtatttgggtcgagtttattaacatgtcataactttatataatacaagtcaataccaaacatgatattgtattaaata

SEQ ID NO: 307227 - DNA, 2549 bp, Cannabis indica
ttcgtttatttttttaaacacatttttcaataaccaataagcataagtattacatttttaataaacaaaaaagattatttattcaaataaataaataaatttaagtgttttattttaaaattgttataattttttaacaaacaaattatattattagcataataagcatactagattaataatattattataaatattaataatactaattaaatatttaataaacatatatatacattatttataaaatataaacaaaaattgtaaatatatttgtatattatttttttaatttcaatgtattatttaagttatatatcaaaatataaatattaacttttatatttacatatttaactttatgtgtttattttttcttacaaaattaattgaaagtaatcaacaagttaaaattgttaacatatatgtttgtttataaatattcataaaatcgtataaaattatgtaattatatatattttttttttgcacattttttgtaatattgtgtatttacttgtatataaataaaaattacccttaattcttttagtgttcaagcttagaaaattttagaggttggtggtgacttcaacactacccctcaacaccaactcctcatattgagttgttatcttagtttcttaaatcttgaagtgttgagtcttttagtaagttattttgctacttggtctccactttttacttggtgcatctctagctcttattttttctttaagaaagtagtaatgcacctccacgtgttttgttcgagcatgaaaaactaaattttctgccaatcaaatagtagactgattattacaataaagtggtactgcataatctaaagactggtatagatcctttatcagctgcattaaccacatgctctcttgagctgccattgtcgctgctctgtattctgcttttatggttgatagggtattgttggttgccttttgctacacctagatattactctagatccaagcttgaatacatacacagtagttgattgacgagtatcgtgatctccagcataattaacatcgcagtagtcaacgatcttaaccccatcgcctttcttataaaagagcatataatcaatagtatttgtgacgtacctcaacattcgttgcactacttccaaacacaacttctttggttgctgcatgtatcgacttactactccaactccataggagatatttggccttgttaatgtaaggtagattagactacctacaagttgtcgatatattgctccgtcttgcaagtccttcctagcatgagcacttagcttggcatgagcttccatggtgatgagataggtttgtactctagcattccaaaactttgcagcaagtcttttgcatacttttactaacaaagaaataaaccttcctcagttcatcgacttctaatccaaggaaatattttaattctccaagctccttcatttgaaagcgaattgacaaatttgtttgacaaatctttgcttcatcatcccagtaatgatgaggtcatcgacatatactagaacaactgcatctttgcttcctttactttgacaaataagcttgaatctgcatgtgccattgcataaccgctttcctttaagaactcaacaatcttactataccatgctcttgaagcctgcttaaattcatagagtaaatttttcaatttgcaaacataatcaggatgaactctatccttaaaccatctttgttggactatgtatatttctcggtctagttctctatgtaaaaaggtgtttcttcacatccatctaccatagcctccagtttttattggccgcaagtgctagcaatacccacattgttgtaatcttagcaattgagctaaatgtctcatcataatctatcccataatattgagagaatcctagagctactaagggcgagttttcaccttgttgacccatttgtacgagatgggttttacttcctttggttttggaaccagctcccaagtttgattattctcttgcgcgcttatctcttccttcatagctcctagccacttggagttttgatgtgtttcttcatatgactcaggctctctgaacttctctttttcagttacaacaacattggcgtgtttgggatttggcttttgtgctcttgttgatctctaaagttctgggcttattgctcgtggttgtctttcttaatgtacacctgtttaccatggattctatgtttcctcattcccagaagtttcttcttcactttgatccccatcatcattctctggacgtgggtgtgcttcgaaaattttctccctcatcttcttctgtaaattgtcttctattttcttggaattggcaactcttccttttgaggtgaccaccataatgacgcctcatggaataccacattccttaatgtataacacttttcagttgttggttttcgtatcccacaaagatatactgtattgccttcttttcaaattttctatgtatgtggcttggcacgaatatgtagcacacataatcaaatactcgaaagtgacttactaca

SEQ ID NO: 307228 - DNA, 835 bp, Cannabis indica
attttcttttgattatcgaggcctgacagaggggatcagccgctagagttttcgggattcttgtcaaagaagtgccatgtatgttggcctttcgaacatcatatgtcctcagacgtctcttcaatttccattctcgaaagacttctgaaggtatccatctttgtttcttcgagtgcctatcggctaagtgtaagattacttcttgagagcttgtgtccgacttcatcattgggaagtagttgtgaaatccagacagtacatccgacttagcccattggctgggtgattggctcatctagacctagggacccaatgaatgggcacgatagctttattcggcttgctctaaggcccatgtgtcacctatctgaaaacacggataacatttaccccaaaccttcgcagctcgggagtcacggaggcttgtagccctcatccatatttagcatcatatatggggccatgaacgacttggcctcttaatgttccattatgaaacgttatggaggcacttgaacatttttgtgttccatctgtttaatacatgtgtcgatcccctattggttcatgtatgtcacgcgatctggtggggtgcgtgttgtctcgggttgaggactgataactgattatgtcagtgagttattcaattcaatttctcttaggttttgtggattgcattaaatgcaaaccttggcatttctaaaccatttcatttatgggattttcgctttctcatattcaatttgggaggcacgttgatcgccaccgatcttattgtttacggggatttttgacaactaattacagtagaacctctatccaagaatacacttgg

SEQ ID NO: 307229 - DNA, 1033 bp, Cannabis indica
attttgattatatatatttttaaagatagaaaaatagcaattaggagtgctcttagtatcaacttactataaaaaatactggccatgtgagcttatatatagcctttcctttgtttcgagagatgagttataattctagaatctttatttatttattcattttgaaatcgatcactttatttttaaattgaacataataaaagtatattacaacatcctaaatgttgaatataacatatataattaatgaacaataaattaaaggtaataacaagaaaccaaccctagagagagtatagatcagaaagattttagttatttttattgtgtttgtgtgtagccacgtgatgtcttctatgtaccaaacaaatctaccaaaggggctttttatgaaaagagtattcttatgaagtattaatggtgtttagcgccacaataaagtatcgctttataattggttagcaagtttttataatatttattagaataaaataagtgggacttaatattaaaatgaaccaataataatattacactttataagaatatttagcactataaataccctttagcatttctcttatgaaaatggtaatgttacctattttttttttttgacttaaatgtaactttcattgaaaaggacaattaaatacaagttacacaatattaaaagctagaacagaaccattccaaactaacttcttatcaaaccctaaagtgttttagttaaattatgggaattatatgtctaatagttagagactttaggacagttaaataaagagttacaaatatcaattacaatgcccgacaatatagaaatctttttttcagcttttaattttatccactaacatcttcaagtcaatttctacaataacaatcaggcatcttgatgttaagacaccattggagtgcaaatttaagagctagagcctcaactaaagtggaatggacaacacttgcaacaggaccggccatgagcataggcgggctaggcctgtgcctagagcccacctagctcaggggc

SEQ ID NO: 307230 - DNA, 1879 bp, Cannabis indica
cagtatttttgaaaaaatttccgtgttatagtatttttgtaaaagttaacccaaattccattatttttgtaagtttcccaacagaatttatctaactcaaaaaaaaaaaacgtgaatttatcatttttgtggcctttaaataaagagtttgtaaaaatataaacatttggcatcatcacttttaggttattttgatatagtaagtagttaccaatactataatataggcatgtttgaactaaaaaataatgtataagtaactgttgcttataaccatttttttaaaaaaagtaaataaataatgatttgaagaataaaaattaaataaaaatttttaaacattatttgataaaagtatatgtaaaaatgtaaagttataaaattaaatttgaaagaaaatgtcacttaaaaataggttaaacaaaaaagtaaatctgatctatcacgaaaaagaaatctgaaacaaatggtcatcctgatattaaaaatacctctacctagtgcaacttgttactcatcattgaaaatgcatataaaacaaagtaacacgaccataatttaaccaattactcatcattggctcgggtaaatgagttaatgagtattgagggataacaccatagatgacttactctgattatttccttgtacctcttgagattgatatctctaattcttattatcaataaagattggtagcaatgctttcaaactggagtatgaccaagttcacattgaacttaggatcagaacccgtatagttctcgtgtgttgttgtgtctggaagctatctagattcatttgtattatgtttctggagttcatatgtgtttcttggtttttagttcttgatttgtttattttgatttaacttttatttgtttaagtgtgatcttgaacctagaatttcagaggttaattcctatgtattagagcaaattttcctacactttctattgcaactatgttcaaattttaatatggaaaaattttattaattattttttaaatattttaataaatttaacataatatttatgaattcataatatgaatttcttactgtttaccaaaacaaaaaatatgtatgttttccaaaatctaaacaaatgaacaacaaaaaaccaattgataggagctttctctcagctccctgagctggcggtgctatggcaaggacaagggcaacgaagtagaccaaacctagatcatcacctaagaaaaagaaaaattatggcctaactcgagtactattgtaaggaagactaagtccatggatgaagtgctagggattgaacctatccacttctcaaatgaggaatctgacattgattttgtcaagaggcatttgtaatatgtgaaaagcacggaggagttttcacttggggtagcgatgaatgaacatattcagagggaagaaattcgtttagaatttgctcagtttgtggaggcaaagcaattcagggaagctcaaatacatacaaaatctgtgatagctcaaggtaagaatgtaattcctcctatattgcgttctagaaacataattcaaaatttggacaacaacttttctggctcttcttcaaaatagggaattaagatagcgaatgagtattcaagaggaagtggattattggacaccctccattgtctgctatgtactgggtggaaaccccctttgtcgatcttagagggctttgtgcatcgtgtttggaaggacaagactgataacgtatgaatgttgtcttatggagtgtttctggtgtgatttggatctgttgaggatagggaccaaattctatcaggagggtgtatcttctttaataagaagctgttgggttttatgccctaaataaaactcattacaatctgattagttatc

SEQ ID NO: 307231 - DNA, 2622 bp, Cannabis indica
catccaaatgaagtacaccagccctgctatagcagctgaaaaaacctgtttcctgaattttcttcttttaaatatgctaatccatcttatgagtgaattcaaatcaaccaatccttaacctgctgtaagaaccttcctgtgatactgtagctaaaaaagtgatgagaagtgttttctgtctggttgttacaatattcatcttttttttcagtctggctcttgttttgagtttgtctaggactgccattgatagtatgaaacagtgtttgggattgttgagtatagcccaaacctgattactccgatgtactctctccaggggttgttgcaacttcttatagccttctgcaatcttgtaattccctgttgcaatctacctggtatcccaagttctcattatttcatcttttatctccacaagcttcctccaataccaactgctatgtatggaagctttgtggctccaacaatctcaattcttcaaatacacactatgacccataaattgtctttttttgtagctagtgtctatatttttttcatcaaggttgccttattccaagtactaatactttgaaacccaatttcaccttcagctttgggatgacacaccttctcccaagccactgcccctgctcctatcatgtttttgcatcctttttagagaaaacttctgcatattctttcaattttagcaacaactttctttggcaagactaatatctgacctcaatatgtgtgaatagttagcaacactgaattaatgagtactgctctccctgcaaatgagatatgtctggtgctccaacttttaattcgagacgccatcttgtcaacaagagtgttacattcattctgtgagattctcttcgagcagataggtaccccaaggtacttaaaagggatggtgcttctgctgaatccaaacaattgcattaacttttgtatctctaattatgtcatccctgcacaataaatagcagacttgctattattagaacagaggtatgaagttctagagaatagcttcagcccttgtagtaccaacttgatactttgaatgtctcatttatagaaaagaagcacgtcatcagcaaaacatagatgattgagctttagctccttacatatttcatggaatccaaactctgctttatttcccacttttttaataattctattcaaatattccataacaagaacgaaaagaagaggagacatggggtctccctgcctcactcctcttttggcaccaaaatatccatgtagagctccattgaagtataaggaaaatctacctgtagagacacattgcatgattagattaatgaatttagttgggaatttaaaggctacaatgatctcctctaaaaattcccaatctaaagtatcataagctttctataaatgaagcttaatcatgcaattaggcttttacagatttccttccatagtgtctgatgagatcctgacagatcataatgctgtgtgctataaatcttcctttaacaaaccctccttgattttgagaaaccagatctggtaaaatgatcttcaacctattgcgtaatagcttggtaatgatatgatagacaacattacagcaggctataggtctaaaatcacttacaatattcgggaacttggttttagggatcaaggtaagcattgtggagttcaaatctttgacaatatgacttgtttgcaaagtttctttggcagcttgagaaacatcctcctccatcacctcccaattatcctgtaggaatgagctgctatatccatcgggtccaggtgctttgatccctggaatgctaaaactacttgtttgacttattgtctagtgcatgctgaattgagtatgtcctcatgagtttgattgaccactgctccttgctccattacttttttgttgactgatagtcttccttgcatctttgttcctagcaatcctttataaaactacaagaatgcctcagtaatagcttcgggttgctctacttgatttcctttcccataatctattgataaaatcttattatgtctccttctttctttgagacaactgtgaaataaagctaagttatgatcaccttcctttgtccatgatatcttcaccttctggtgcattaacaaattatatgctttgtgaacttcagaataatgatcccttgcctcagattctttctgttggagcatactcttcaaaggatcttgatgaaattcctcttgtctgatttttagatcttctcgagcctatgcaactgaagcttgaatttcagaaaagcctgacttattcagctctttgaatacctgcttcagctacttttacatcttgatacatcttggagcctttaacttctttgttgccatactttctacacttcttgattgtacttcggatgcatagaccacattttgaaatatttgaatggttttttttccactaggcgcttcaggataaaccttaataattgctggcgtatgatcaaagagtccttcattcctgaataaggcctcagcttgtggaaacaaatctacgcaattctgattagcaatgactctgtccaattttgcaaaaattctatcatgaccttgtttcttgttactccatgtatacag

SEQ ID NO: 307232 - DNA, 2123 bp, Cannabis indica
tttctttctttctttcctttttcttttttattttttgttaagaaaatggcatttcttgataaccggaccaaaaaagtataagtttttcaaaactatatgttacttattacgtgacaatttgattgtcgggcattgactatattttttcttttctgtagtacttgttaattattattagctaattagataaatttttactccatcaactttaatatatatcatattaattattttttttttgtattgtttaaattattaaaaattcctactaaattatatattaaaattattaaatttaacaattttatttaattatttcatttattttattattgtagcaattatttatatattaaattatttttttaaacttcatatttattaaattatattttttgaactttaatatgtattaaattgtgttctcaaaatttttattcatgtttgactttctttaataaaatttaacaatctcaataataaaatttttttttaataatttgaaaaactttaaaaatataatttaaaatatgtcaaaatttaaattaaccattattattggaaaggatatgtagctagttggttattgaacttttaagatttataataaagaatttatttggggatgtaattgtagaatattattgttggatacacatatacatatatagttattttaaaagtggtggtccaacgcgcgtgggatagcttttggtaaacaggtagtaattaaaatacgcatctagaggatgtgaccaggtcagatatgtcatgcttttgggatcattgcaataattgaagtcatgcaggctttaatgataggttggagagatatatatatatattgaatgaattattgggtgggcccgcttctttcataaccttgggacatatcatgtatcatcatccctaatcaccattttgacaatcataaggtttacaattttcttttctttctttgctgaattagccaccctaaataattgggtatttgacacgtggcttcatcattacttttttaatgtgttcgtaccctttgcattattacaaatcaggtcatttttgtataaattataataataataaaaagatattaaaattaattataactaacagcgtaattatcttgtcttatgcttaattcttttatactttgcggaatggacattgtatttgctgtgcaaatacctttatgatgagaacccaatttagcttttgattcaagtatgccagtatgggcaatcagagaaatttaaagaagagaattatatatatttatatgaatagtgatctatttgtttggacatttaaagttttcatataaatacaacagtagagcatatatatataatatgaatggaaagaataaacaaagaaagataactgccacagtagactgtttcatataatttttattcttatgatattgtcatattggtgtatatatgatacatacacatatccattctcaattggtaagaaatatcttgctccattatacatatcaatctattataaatctgaaatggagttttttcattgcttctttttctttttcaattattattctatttataatagcatttatatgaaaaactacatttaataaatgagttgctcggttgctcccacttacgcttaatgtaaactaaaataatattataataaaaaaaagttgaagcttgtgagccaattggtttcgttaatatagtggaattaatcgtgtttgttttctttttcatttcaccattgcatatatagtatataccacgcacgcaccacattttataaataattaataatattaattttataataattatttaataaattaacatatatcaaattttaataaacacgatattttataagtaggcttttgaattaataatgctttaatataggtattaaaaacaaaatcattttttttaatatatgtttcatttcatgtccatgtttaatgatatattcttatttatttattatttgataatatttattaggctaattagtaatttttccctccgaactttgacatgtactaaatcgtgccccctaaacttttttggccgttaaaaattctcctcgaactattgaaattgttaaatttaaggacttttgtc

SEQ ID NO: 307233 - DNA, 3360 bp, Cannabis indica
cattgattcacattcccttcatcctgacacgtgtccttcattgaggtgacatctaaatttcgggtataacaataccctatatcttaaggatattaagagttttgggaagagcctcctctaaaatttcttggagaggtccgctccggaaccatcacctagaagcatctcccttgcaaaacattgcctctaaatattgggttgggaacccaaaaaaaactactaattagggagaaactaagcaatattcccattacaagccctaatgacttctaatgggtaaacaaagagcaacttgaactcacaaaagtaatccctacaaggttcaagcttttgaacaaacctaccttgagaatgtgagaatacttatggaaagacaatctcaatcctagtcagtttcataactaataacctcttaaactctcatcctaacagtgacatgcacaattaatccagaacacagcttgaacactaatttctaccctagcatgaaattgaaaagttcaatagagtttggatacttacttgtattgtgatctaaagagggacggttattgtggtaattggcccaagaatcacgtacccagttgatcacttggtcaaaacctgtctaaacgtctaagactttgccttgctaggggtagatcgtattgaggtccaaggatgaggtatctagaaaattgctcgctcgaatgtccagaagatgatttatgacagaattaaggcactgttacatccattggctaaagagagattcgagatcaaagtttctctaatttctaaaaatatgggttctagtttgagtttgaaaatagaggaatttggaaagctaaaaaatggtaaagaagaagaacaagggggatttcacaactatttatagtgaggaagccatgtcatgaaatttaaaattaaaggcttaacaagttagcccaaaagcacaaaatgatgcaacgattggagagtttaaagcactacatttaatgcttcttggcagaatcaagacatttaatcatcattatttgcctcgagccttatgcacattaaagatttgtcacgtcataactctacttccagttgagtttccctacaacaaatacattttctacaggcacgtatgacccaggggttcacaggatacgcgacacacgtgcactattaattgttttacagaaagggttttacacctctctactgccaggtaccaaagagatgcttccacattctcagagtttgcccatgtgtcgcaaagtatgccttaacaatccagagggagactgtaagcttccaccactcaagagtctcagaagcttggggggtaaatgttgtccgtatttttagatgaaggacacgtgccaaaaaatagaaggcaacaatccaaataattactaattaagtctccttaatcacggaaggtcatcgaaagactatgatggcccgggaagggtctaatccaggagaagcacaaagatttgccacaaggcaaataaccatccatgacccagaagccttaccactagagaagactgacaagcttaagcatgtagaccatggtagtgtgcacatcccctatgaatactcttctttgtccgatagctcatcttggtgtctcgtccatcaagtgcagaacctttgcccgacacatgccctgcaccaacaatggtccccactgtacggatcattcatcccacgagaaagaataatattaggggcccaatagtcaaataattatgcattctaccctaatattttgtgggctttttgctgaaaccctagacggtcatgggtatacccctgtattttcacataaaggggtgaaaaaaaaaagagatagttgaagctctgccaaaatctcattaagatttttttcttcctcaagagaaactaagagagtagaattaagttttactgtaaacaccacttgtaatacattttctagccttcaaggtcaatacactgattcgtggattaaggataattaatgtccgaactacataaaaattcttgtctacttatttattgcttttattattttttaagttcttatatgattaattttcgaaaatcttagtaaacactgagctttgtcaggccaatctccctcattctttgtagcgtatgtttatttgaataaaattcttctctttcaaaataaataaataaaatgcacctaccattattagtcttagttttatgtttatcttcccttagctttattatttcttttgggattattaatttttttagtttcgaattgtaagtattgacaaataattaagtgtttggggttttttttcatcaaatacaaaatatatttatacatttatacattgtttcttcttttcctaatttcggcacattttggacagaaagtattctcgtctctcacgcagctagatttggtagacttcactcgagatgtcaattttgcgtatttattggattttttgaaaagaatttttaataaacaattttttgaaagcttagactagacgtatagttcgctcaataataattaaatctaattttttaattaacaaagaaagtaatgatgtacggtttaggtagctaagctctaatattataatgtgttatgaggagtgttaattataacatcttattacaatattgtagtcaactttcaagcccgaaatcacgccggaatatttttttcaatttttttttttcataacggtattcgttaaagtacaatatcatttttgtaaatttttaaaaattttcgaatagtttacgctactgaaaatattttttgtacggtaaattattcaaatttttttaaaaatttacagaaatagtattgtaagcataataaacactgcaataaaaaggttttttgtaatgtattagacttacataagtaattttactttttgttaagtaaagctctaattgaattattacgaaaaatgggtgatataccatacacgtactaatttgtttgtttctacgtaagggagtcgtctatggaatgaatgagtttgccattttagttgtattttttatttgttccaaaatcatctcaatctattatgtagacgttatattataatgataaatttagttatgtgtgtaatcttattaatacacctaggtttacttggacacaatgatcaattaattcataatttatacatgccagttatggctttgaacataataattggacaccttagttattatttttattttttccttatataatattaattaagaaaatatacatgtattggtggggtatcttttgcgtgagaaactctttttaaagaaaaggtccaatgatatttacataccattcaacttaaaattgatagacacatgcttacaaaaaaagaaaaaaagaaagaa

SEQ ID NO: 307234 - DNA, 1786 bp, Cannabis indica
aaaccaagaatcgttaaaccaagaattgccgttaaataggcacttttaatatataaagatatatatatatatatattagttacacatgaaaatataagtaaaaattagattattgattttgttatttattgggaaggggttaacataagggatataaatatgcatcaaacatagtttttttgttcagggaaatttgtcaaggatatcaatcagactttcttagagctcattttgaaaaaagcttaggttaggtgcttcaacgattatcgcccgaattgctttgtaagagtagctataaggttatttctaaacttatagttgatggaattagacctctttaggcgaagttgatctcttcttactagttgtctttgtcaaagggtgttggattgctgaaaattcaattgctgcttaagagattgtttatgagcttcaacataaacaaggaaagttttgtagggattaagtgtgatatgtctaaagcatatgattattttgagtgaggttcattgataaggtgttctgggtctttggtttgatgatcagtttcgagagttgattcatttttgtatctcccagtcaatttcaggtgctacttaagagtggttttttataaaatcatatttccctacgagaggccttcgtcaaggtcaagttgactcgttatcactttacttgtttatactttgctcaaaggttctttctaggtttgttaacttgtaaaaaaagtgattaatgaaatataaggagtcaaggtgtaggaatgacccttccatctcccacattatatatatcaatgacacttttatttttgttaaagtaaattcaagcaatattgaggtgttggatgccttatcttgctattgtctttggtcgaggtggtagttcaacaatagctcctagtttctgagaactgtgatccaaatatgaagatgatgattttgaatagtatgggatgttcattgatggcaaatgatgaagtttttcttggtaatcttctttttgctcaaagtaagagtttacaagaattttcattttgttgtggataatgtcatttgaaaaataagggatggaaggctaagcttttatcacaacctggtagaacaacactcattaagagtgttgtccaagctaccccgatttatctttatttgtgtttatgctccccaccaaaattttaaagtgagttagattaatgtgttaagacacttttggtggactagatccatggagtgaggtcggtttttatcacttatggtctgaaattttgtttgcaaacctatatcttctgggggacatagtattaggaggttcgcaggtataaacttgtgtctgcttgcaaagcttggttgttgatggcctcagaatataaggctttgtcagaaggaatgaatttatatttgctattcctcaaaggtaatggtacacaattcataggtatttttatttgttgggaatattttactaggatctagatttattaataagtatattgattagcatcctaaatatgaatatctctaaaacaatgaaattaaacacataaggaattagaaaaccttacattagttgcagcggaatataatgactcattccgttctaatctctagcccttgattcctttctgtcgcagagcattatcaagaattgaacctggatctctttctctccttcgggttggttaccaccgtcttagtcactatgattgagtacttgacttgatatgtgtgggcatgacattctatcactcaaggttcgaattggatgaacaatgaaggaggtttga

SEQ ID NO: 307235 - DNA, 2417 bp, Cannabis indica
catagtgtgtaagactgtgaagaatccaatcaactgaaggagaatcgggctcagaacttggtgatactctgctacagaaaggatacaagggttagagatctgagcggaatgagtcatttaatttcgctgcaagcaatttaaggtttcttgaactttatatgtgtttaaattccattgttttagaaattcatatttaggatgttaaaccatatacatggtagtaaatctagatcctggtaaaataatccccaacaaagctatgtctgagggatttgatggtgatgagtctttttctaattcagattcagttgttgtagaaaaaaaataaagcctatgaagagatagttgctcaccagatctacatggctaagggagttaaagagctacaagatgtgaacaatgctcttaatgacagtaagattgaacttaaggagaagctgaagcaaatgacaataatgatctaaagatagtgaaatatacaagttgattgccaaacttgtgagagccaatcagtctctgtctttcataccttcagggactatttccttgaatcaaacccttccgagtcagaagccctatggtgatatgaattcaattgggtataagatgctttataaacaaggtcaagacttgtagattgatggaactaacacatcctcttcagatggaaaggtgaagtttgtgtctgctgcagtgaataaggaagatgagtctgacagtatcttagttgatttgagaagaaagctaaaaaggaaatatattcaaaagtggaacatactgccagacaactagatcgttttgttcttatttgtcactttgtaacaaagaagtcatatcagacctagttgctataaacttagaacatatctgatcaacatcataaatgatcaaacaacttctagtaagttccctcttgcttttcaacaagattcatataagacatggaaacccaaggttgccaatcttcccttggtagctcatacttcattatcttttatgaaggagaatcactggtactttgatagtggttactcacgacatatgactgggtccagataatccctacataattttcaaaattcaaaagaagggtttgtgacatttggtgatggtaataaatggcagatcatgggacaaggagatttgaatctctcaagtgcatttccattgattgaagttctatatgttaaaggactaaaagcaaatttgattagtgtcaatcggttgtgtgatgctaattatgatgttcaattcaccaagtctcagtgtctagtttcatcgaatgggaacttagttcttataggtaacagaacgttagatcattgttatgttggtttagttctttgtgtatgaactctttttttttattattatttccttttggccttctgttacttttgtctctctgctttggttcgttgatcataacaagggggagattgtaagtgtcatgttttctctggaaaattatgcttattgttggtttatctgttgattgttatgttgcattgttctgactttattagttgtgcatctaagactctgttagttgcatcagttaaatctgttctcatcttgtttttgccaggttagtttttaggttgttgtttttgttgtttagcttcttgccagtgtggcggagctagttttggttgctagtttggtcgttattcagggttgttaggtataaaaagctgagctagctttttctaaccaactcctcgtctttgttagaatcgtctagagattcttgatctgcttgggcgaaattcgtctttgtatattacatggtttctttgcaggttgtaattcattagatcttcaaggttgaagaaggaatgtcaatctgggatgtctgaagaaagttcaatctgatttgtagaagggagtttagcttgttggaagaaagaggatcttatctcctcagatctacgggacttagatctttgttcttgattgcaatcaagtttatgagtaacttctgtatggaatcattaaagtttacactattcaatttgtaaatcgaaattggaaaagatatgtttgaatgatttcttagtgaatgttatcttatccgattcttaggacccaagcactacccggttagaatgagtttttaatacaaggaaaacttgtaaatacgttgttcatttgatttaatgtttttatacttgtaaaaagaaaacctaattgtgatttaatagctttcgaaatatgttgaactttcatattcaaacatgtgtgaacccatcttattaggggtgagcataaaattcagaaaaccgaaaaaatcgttcaaaccgacctaccgaacactgttagaaccgaaaccgatgaaaccgaaaaccgaaaaaaccgctgacggttaaaaccgccgttgaacggtcgatttttttttggtaataaactgaccgaaa

SEQ ID NO: 307236 - DNA, 1258 bp, Cannabis indica
ttcgagtcctaagttatgcattgtaatgtataaacgcttaaaataaaaaaaaatcatagtcacaacattctatttagtaagaagcctttattacacagtaaattaaaagaagattaatagttaattttgtattgtaagtataattaataattttaatatataataattagaaaattatatgaaaagtttggaaattgtatttagatcgaatatgggggtaggtagcatcactcccaatcatacatcaaacacgctttggatatataaaattgcaccatactcccaccttattacccattaaagcgggtagtcctcaccccatttagtatggataactgtgagtattcctcggcgggtcaaatttccatcattaatttttatccatttcaaagtaaaaaaaaattctatttatgtcattaaaagtcaaaagttactcaaataaaacaacttataatatactaaactcattgcatattgagaaatatttgtatatattttcattttgaggaattttcataatatactaaatttaatgcatggagtttggttgggcctccatagtcacttagtttattgacctttatatatgttgggctaaatttaaatgggcttgggttaatttatttgaaacgaacaagaaaagcccacacagaaaaaatattaagattatgacttttgatgaaaaaacagacacaaatttgtaataactgtctgaaactcgtgttactcgtctgacccatcattttgaaatataccattttttcctacccatttaaaaatacaaaactcataaagtttttgtaaatttgtaatccttaatttttttttttctaatttttcttttagttttatttagtttttattgttttggtttgttaaccacttttgtttatgttgcctaaattgtaaactgtttagcaaattttattgcaaaatgaactcttttactaagaaagagttcccaaatctggtaaccaaaatttttgttcataacgagtaatgagtgatgtaaattctcattggaaaaataaaatgtaaaattattgcaagtttagataattaaagctaattacaatgaggtatgtgtatagaaaaagaagcaaaaatatatatatatatatagggtaaatagtggcataagtatccaaagttttaggttggtaagctgtataagcttaatgatttttttagaggtataagtacctaatgtctataaaattgtaattttcttccagtttcatcagtacagattttgtta

SEQ ID NO: 307237 - DNA, 1502 bp, Cannabis indica
agtgtatctcagtgatcttactaacatccatatgtactctttcatttttgatgattataatcaaaatatatagttgtgctcctttcataatttataaaatttgctaacattagatttgtgatgctgaaaattagtttagcaacaaatttgtactatgaatttgaattctttaaacaatgattgatcttaattgaaatggattatgctgatttacataatttccactaattattgtcaactttatctctaagtctcacgtgctccaaactgaaaatagtttgaggatggattccaacagaggtctggtgtgatcaagaattagtgctttttttgaacaatgagtcttctatttataggcaggaatgaccgctgcatctttccctttctcacattcggattggtccacgtgaacttgctctcttcatatccttgtgcgcactttctcctctgcctccccttttcaaacttcgcagactctatttcctaattccccgagctctactctgcctcctaagctttctaggctctgctccgcttctcatgtattcctttttaacaaaatggtgtgtttcatattgttcatgccatgtcgtcccaattctccggtgattgccactggtgcaaacattgaaaatgctattatcattgctggtgatgaggagcataattttgatgattcagtttctaataagatagatgttttgaatatttctgaggatgatgataagtctcctgataataatactattgtgactagtcctattgctttcccaaactataatggaatagattttgctagtataagtaaaataataagacatcaattgaattatagagtgcctccagtaaaattcaaataaattattttgccaaagaaaaggacacaagaaaaaagtgtcattggtttctctaaatgaaatataaataatatatataggacaatcctagataatcatgttttaggtatgagatgcatgattatcaaaaagtaaattgtgtggaaatatatgtatggcaattaatatgcattatatgtatggcaattaatatgcattatatgtatggcaattaatatgcatgtactaattcactcttagcaaacaattaatcaaatattaaaaatatgaatccaataaatattaagtatttctaaaattacaacttttgaaataaaagaaataaactacacttgaccaatctctctcgataagaaatcttctttgttgttcatggatgtagctttgggaatttcacaccatcatccataatccaccaccatgtaattagaagcaccttttctaattacaaattaattttaacaaattaattcaaaccctttatcttgtctttgtaattaaataattaaataattgaaatttacttaattatttaaatagaaatattttaaaatatttccaaaacaattaattgctaattaatttctgaaattaattattatatacaatatataatatatataacatatagttaggttttaaaaa

SEQ ID NO: 307238 - DNA, 2642 bp, Cannabis indica
actcctctctccgatgatgatctaattttgtgacattcttggaggattaggtgctaaatatgaggttgtcattgtcaatctcacttcaagatgtctccaagaagtacaattcatactccaaagccaagaaatgagaatcaaccagcaaactacagatttgcttaccaatgtccaagctaatcttgccaacatatctttagacaacaacactcgtggttctcacagttatggtggctgtggttatcgtggatcaaatcgaggtggaagaacaggcaacaccaactatggtggcagaggtagaggaacaaatcgacctatatgtcaactttgtggtagaacaggccacactattgtgaaatgttgtcactggtttgatatcaatttcacaagaccaccaactgagaatggagcttcaacttccaccaccccgtctgagaacccccaagctcacatctctcgaaccaccaccagtccagatctatcaactacctagtacattgatagtggtgccacgcatcacatggcaaacaattcaaacaatctcaccacctctgcaaactacaagggcaaagccaaagtgattgttggtaatggttctagtctccctatacttaaaattggctcacaatctattcttactcaatattttaatcatttaattcttcaagatgtcctaaatgttcccaatgtcactaaaaatctaagtatttctcaatttaccaaagataacaatgttacccttgaatttgatgatgtgtgttgcttatcaaggacaagaacaccaagcaagttcttcttcggggtaaagttcatgaaggcctttatcaacttcatgtcatcaatccaaagtcacctattctaccttctcccacaccagaaacaatttctttaagaccagctgcttacaacttcaccacatccagcaatctcgtttatgacaagaataaaatctatgatgtttggcattatagactaggccacccctctttaaatattttagctaaagttctttctaatgttgctcctcaagcaaaatgtaccaagaattatttatatgatgcatgtcaaagtggcaagcaacaccatttcagttttaaaagcacaagaaataaaactactatgccattcgaattaatcttgtctgatgtacggggaccttcttttcaaacttctaatgtggctataaatactatctcagttttgttaatgatttcacaaagtatgtttggttattccctatgcaaaccaagtctgaagttaacaaattgtttttacagtttaattcttatgtggagaggttctttcaaacaaagattaaaagtgtacaaacagacttaggtaaagaatttgaacccctgtacaaactgttccaaactttaggcattgtcaaaagaaattcttgtccacacacacaccaacaacaaggtagggttgaaagaaaacatagacatgttgtagatataggcctcacacttcttgtccaagcccaaatgcctttacatttctggtgggaagcctataccttagctgcctacatcattaacagacttccaaaccagaccattgattttctttcaccctatgaaaatttttttaaacaaaaactagactacaacatgtttaaagtatttgggtgctcttgttttcctatgttaagctctatgagactcacaaagtatccttcagatcagcaaaatgtcttttttattgggtactgtctaaactctaaaggagcaaaatgtcttttttattgggtactgtctaaactctaaagggtataggtgtttacaccctagtggtcgaatttatattgctagaagtgtcaccttcaatgaacttgaatttccatatcaaaatatgttcaatagatccacttctaccgctaatgagtcccccaccaatattgacaataacacctacagggttcctcaaactcgagctcctcaaccaccacctcctcccccacaccatcctccaagtgagttatcctacatcagtcactaatagcaattccactgtccctagctcccaacaaacctcctcttcaacatctgctacaggttgcccaaactctagtacctcccctactcaaccaactcaaaatgtccaccctatgcttacccgagccaaaatggaaatattcaagccaaaactatatttaacaccattgatcctgacatagaaccaacaacagtcaaagatgcccttgctaatcctaagtggaaacatgccatggatattgaaaataatgctttaataaggaacaatacatggattcttgttcacaaaccaaatgatgctcaaattatcagcaacaaatggatattcataattaaatataatgcagacagttcaatttccacctacaaaaccagacctgtggcaaaagggtttcaacagacacctgcgatagatttttttgtgacatacagccctgttgtgaaaccttgcacaatcagagtcatatttactcttgctgccatctacaactgggaaatacagcaaatcgatatcaataatgctttcttaaatggtgagcttcaagaaaatgtctacatgtctcagccacaagggtttattgatccacagtttccaaaccatgtttgcaaattaaacaaggcaatttatggccttaaacaagc

SEQ ID NO: 307239 - DNA, 1920 bp, Cannabis indica
aaccgtaaaaaccgtacccctgcatcattttttgcggtgcaatttctgctgttttttagtttttgcggtacgggtgcagtttggaaaattggaaaaattgcatgtgcggattggtttaaaaaaatagtcaaaaatcgcaccacccacaccgcgaacacccctaaatattaacattaaaacaaattgtatttaaagtttttgaaccgttttcctttttcttcttttgttaagattttgtatttttttaagacaaaagctaaagctatctactctagtactgtgaaattattaattaatgtaatttaatattaagttttatttattttattttaataaatattataaaaaattgttaaccaattataaaacgatattttatgttagtactagacactataagtaccttaaagtatatcattatgaagaatctacactaattttctttttttttttgaaaaggattctagtattctacactaattttatagagtaattgctcaaaatgagtcgttcttctgaagatataaaacacaccaaatttactgttagtaccaaccagattaagttaaaaattaaaaaggagagatatcacataagatatgtgatttggcaaatattatttggattttgtggtaatgacaaaaatataacattaaagcccgcccaaaataccaaattcaaatacattcaaaacaccctttcttcactcccacactcgtaaactacaagccaatcaagaataataaacataaataaaaaaaacatcccataaaaccaaaagatttaaacacttactatatcatacttctaccatgcaacctgtcaagaattacaactcaaaactatctcatatgagtaaagtaattcatcattcaatacttttatatttaaagtgtctactgatatgttttgatatttaagaaaaaaatttggtttaattttttttataattatttatattgtaattatttaacgcattttataaaattttaaaaaattttaaaaaaattaatatgccaaaaaagaaaattcaaaccatttgttctaaatttttttaaatttaatttcttaaatatctacatcgtaaatgatgattaaaaaattacaataaaatattttactaaagaactttgctattaggcaccaaaggtgtctagcactttctcgacatatcgcattgcgattggctagcaatactctctaaaagctattatattaaattatatgagagccgatacttagttacttagttaaacaatagcgatattgacacataaaaaaaaaaactagacaggactggtaccctttaacatttctctttactaaatgctaaaacattttgcattggtgggtccattgtaaatttttttttattgaaaagtgaggtgagagaggggagcattcattttctctcccaaacccactcttttaacaactctatatatgaacaagtaactactcaaattttcaaaaacaaaaacaagtaaccagaaactaaccgactctgtattaattaattaattaattaattaatttaattttaaaaacggcaaaatagctttcctatatctttttctggtctctctcatcatcatcacactcaccttcttcatcttcttcctcaacctcgttcccaccggaaaaaaaccctcgctcctcttcactcgcctgccacgtggcggcattgtggaaaccggaatgactgcgactatggaaagcttgattgaacttgttaatcgtattcagaaggcttgtactatgctcggtgatcatggcggtgattctactttgcctactctttgggaagctcttccttctgttgccgtcgttggcggccaggtttgaagaaaacttttattacttttttctttttggctttttattgagtttgaggtttttgagtgtttttttttttttttt

SEQ ID NO: 307240 - DNA, 2272 bp, Cannabis indica
tatattgataaataatataattataataatcataaaaaaattattacttttacaaaaaaaacaaaatgatttaagttgtattaatttttatattgcataatttcttaaaaggaaaaaattacaatttttatctaaatattaattattattttgttttattttaaaatatatgtatatgtttttttttctatttttattcttaaagtggttaattcttttatagttagtagaataattatattagaagtagtaatgacacaattgtaataacattagaatatcataactaattattatgtaaaaataactcttactgaaaatatgacatttgtcatcacattaaagagagagtaatgtatttgtaattatttttacaggtatatatatgtaaagttctttttttttcttaaagataaataaaaatagaataaaaaataaattataagtttgacacatttaaattgtatataaattccacgtcaaaaaaaaaaattgcatataaattgttatagtatgaatttctcgcttagaaatacgaaagcaacctcatataaaattgacatgtggatcctgttcccgatgaaaaagatgacttattaattgatgactctcatagggctagccttgcttgatcagaactcgtgagatgatgcaactgtaacagggtctagtcgcatattatgtattgcatagtcaacagtaagcaagaccaagaagatttgatattgatcgcgtatatactgattatatgcaacgaccaagtaaaactctcctgcgacctataaagattgcttctttacatagtattggtatgaatgactaaattgttcgacgacttgtcaagaactcgcaagttccacattgtcaatgcataggatgtttgtgtatgcaaccaaaggcaaacgtagatatccaaacaaaagtcttgaaggccactgtgtgaatacaaacaccctagaacctgggagctcgtgtgttggaatatgaatgggtaactcgcaacttatcaagtcgcatacgttgctacacttaatacaagaatgaagtaagacggtcttcatttattctttgagcatttactttaattaatatttattatttaatgtaaaaatggttctgaagctaatcagttatgtaaatctaaaggacactttctttctatataaaggagtaatccaaatcagataagaccaacctaaaatttttgcaacagtggattaagcagatcaatctctgacagaatcactataattctcttgtgttctctttcctttatgcttgtatttcttctatttagtagccaatagtttgagtcctcacttttctaagtgagtactcgcacatttttaattgagtgttcttatttatattgaatactcacatgagtttggtgttgtcaaaattctcccagtaacaattggcaccgtctatgggaaacacatatacttgacgaattctagaggagaattaacatggatacgaataaaacaattgtgaagaataattttggatctctcaatgttgggactcttaatgttcctattcatggcgggggaacgatcctcggtggaggaacaacgccttaaagaggaacaacccccatttaagtcatcataggaggagtggggcaaacccatgttacccccctcaatctatttcctgaaaccgctagacatgcaggagaaacttcgagacctaagccatagtggggtattttccaccaatcacacctgtcgttttatctgaaggcatcattcatctcacaacctcacagtatacaacaaccaagcaggaacaaatgcgagcattgtaggtagagattgtaggaagagacaagatccaaacctaatgtccgccacgagtcttgaatcggcatcgagatgaaactcaggaaactgataatactagtcatggtaatgaacatcctgacaatactcataatcacatggaacgtgttgatgagaatggcaaggaagtcttaatttaaatcaacctctccgcgactctacacgtagtagaggccccaccactcttaatacaagtcggcaacctgatcaaagggaagagagaccgcaagaggaggaacccaaacaacataacccgcagagtcgtgtgcaactgcaaactgaggtaaacgaaggtgactatcactcttcctctactaataatcattcatctagtgtttatactgttggtattttatgccttaaataaaagccatttcaatataatcttattttctatcaatagaagattagaagtcatttaagtt

SEQ ID NO: 307241 - DNA, 2039 bp, Cannabis indica
ctccatcattgattgatagtggtttccctcctgtaatcggtgtagcacatggcttagtgttctccagttgagttttctgcaataattcactgatatatttgccttgtgatagatagaaaccagtgctgtccctaaagacctctattcccaaaagtagtgtaagggaccaagatcctttagggagaagtaacattcagttttgcaataaagcatttacctcctttgaattattccctgtcacgattatgtcatctacgtaaacaagaaccatgatcacataaccggtttctttgagcatgaagaaagaggaatcggctttagaattttcaaacttccattgcaaaagagtagctttcaacttatcgtaccacgcccttggtgcttgcttcaaaccgtaaatcgacttcttgagtttgcagacaaaatgaggttgttgttcatcttcgaaaccaggaggctgacacatatacacatcctcatcaagcactccgttaaggaatgcattatttatgtcgatttgcctcacttcccagtcatgagctacagcaaaggtgagtacaacacgaacagttgctgccttgactacgggactgaatgtctctccaaaatccactcctggtcttggtgaaatccttggcaaccaagcgtgccttcaaacgttcaacgcttccgtctgcattatatttaatcttaaatacccatttacatccaacaatgttgtatgcctcagaaggaggtacaagtatccaagtacccttgcgtttaagagcaacgaactcaatcaacattgcagcattccaccccttatgttgaagggcagctgcaagagaagttggttcaacagtggaatgatcaaattgtgcacttgccgagaacacacggggtttaaatatgccagcctttccccgtgtgaccatgggatgtgtaggagcaagaggtgcttgaacagattgtaattcggatgttgttggtacaggctgagtagtgtcaggttgggaaggaaatataggtgatgcagtagctgaagtgtgttcctgtgctatatgatcaaaatcatcataagtgggataagaaattggtgagccaggtgaaggaaaatgaggacttacagtgggattaacagactgggaaggtgatgctgcagcaggaacagtcgaggctgtactggttgtacctgtagaatgagtgtttgatggcaaaacaaaccatgaatgaggagtggacattgtcacaaattgctcaggctggtgtgtattaagaaatcctaaacgacatggaaattcagactcattaaaaataacatgtcttgagatataaatgcgtccatgaggacttaaacatttataccccttgtggacttcactgtacccgaggtttacacatttaagagtgtgaaactgaaatttgtgactctgataaggacgtatacatgggaaacatgacacaccaaaaacctataaaaatttgtagtctggtacacaggaaaacagcatctcaaagggagattttccaagcaatacgggtgtgggcagacggtttatcaagtagacagcagtttggaacgtgtctgaccagtatttcagtggcatgcttgcctgagcaagcaacgtaagaccagtttcgactatatgtcgatgcttacgttcggctctcccattctgttcagaagtatggggacaactatgatgaaaatgtatgccactgtcactaagtaactgagagaaagcctgtaactcacctccccaatcagtcttaagttgcttgatttttctctcaaattgattttcaactaagttcttgaagtgtgtaaaggcttgtagagcatccgatttctgtttcaagggaaaaagccaactgtatctactatgatcatctaaaaagtgtatataatacttatagtttgtgtgagatgcaacaggtgaagcaccccacaagtcagtatggattagatcaaggacatgagtagcacgactattggaatttttaaatggctgttgcgatatttagcacacgcaagtgtacgtatcgtttcaagtagt

SEQ ID NO: 307242 - DNA, 1685 bp, Cannabis indica
atattgctttgaggcttagttgaaaaggattgatcactcaataaaaaagttcaatacataaagattaattaattagtgttacattgaaaaatatactttgtacactatgaaagatcaaatcattagatttcttttgtatgattttctactattttcaataattttcaacacttagagctatttgtaataagttgtttgatatattaaattatattatagcatgcttaattaaagttctttatttcgtaacgtggcatgcattcatttgtgcaatttattattgttttcagcatgttatacaataataattttttacgtaaattataggctaattaagatttttacctcccgaactttaacatatatcaaattatgcccattgaacttttaaggtcattaaaaatgcacatgaattattgagactgttggatttaatgatttttgtctaattttaataaaaaaagtctaacatagatgaaagttcaaagaacatgatttagtttatgtaaaagttcgaggtgcataatttggtagatatcaaagtctggaaggcataatttagtacatgaacaatcagtgaaatagtaaaattgaatgaaattagaaaaaagtctttaaatctaacaatctcaatagttcagggggaatttttaacggtaaaaaaagttcaggagacatgatttagtacatgttaaaatttaggagaaaaaatcctaattagcctaaattatatgatgttagatcatctaaaatataaagtataaatattgtgctaaatttgacacgaaaaattaataaatgttatatttgtcacaatatttattattgagttttaatgtataataatattgtatgatgcaaattataacgaaaagtaaaataacaatattgacgattattaataatttaaatatttaaaaaataactaataataatattgtaattaaaaattatgtattctaatctatcattaattaataataaaattataattatgtatatttattggtgccaaatttaacataatattatatattgtgttaaatttaacacaactttaaaaataagtcaaatttgtcttaatctttaatatagtattgaagaattaattttcttagaagtggtagaatataccgctattttagcacaccattaaagatctcttaggcaccttgctaaagggtttttctggtttgtacatttctcaatgaacttgggattggcagactttgccccttttttttcaccattcacaaaattattgatttgaaaagtttgagattttatggaactaaaacattaaaggttttcaattggggtttgatcaataaaagtactgaaaaccaaaagttgtatacgatgaacaaattaaacaatggtctagtgatcagagcttcactgagccccacatttggaaaaagactgcacccaaattatttatgcattgctggccctttcttgtcactcccttttctcacttttcttcatatagtacttttaacaaaaaaaataaaataaaataaagggtcttttttatttttatatttttaaatatatatttttttatatatatttttacgaaattatatatagaaactcttattgtaattagagttgtacaaaaaaattcgtaaactgcccaaaccgaataatccgcccaaactaaaccgaaaaaatcgataaaa

SEQ ID NO: 307243 - DNA, 1619 bp, Cannabis indica
tgcctcctcaattggacacacaacaccaaattcaggggttagagttggaaagctgtgtcacaaatgaaattgctgagctacattcacctattaaatccgaaaccaaagaccttcattaccaccattattcaactactgaacaacaacaagctggtgtgagctcagaatgcaaccaacaagaacgacaacccaataaaaaacttgcagaagaagaagaacaacaagaaaagacattattcaaacagacccaaaactccaaattccctccagtaacccgggaaaggagaaagcggaagagaacaagaccagccaagaacaaagaagaagttgaaagtcagaggatgacccatattgcagttgagcgtaaccgtagacgccaaatgaatgaccacctcaatgtcctcaggtcactcatgcccacctcctacattcaaagggtatgtatatatatatatatataattaaacattaaccatttctcttttgttgtttatatatttatataatatatttaataattgttgaagggtgaccaagcgtccatagtaggaggagcaatagactttgtgaaagagctagaacaacttttccaatcacttgaagcccaaaaaaggattaggaaagaaggtagtaatactaatactaatactagtagtaatactactaccactagtaacggcgttgaaaactctgttagttcatcctcatcttcttctactacttcaaataatgccgtaacaatgccgtcatcacatgggctgtacatgtcgctttcccagttcagaattgggcctcatgatcatcaagagaataataatagttgtaatattatgagtagtgtgggagacgaagtcagggctgagaataagtccgaagctgcggacatagttgtcactgtcatccaaacccatgtcaacttaaaaatccagtgcccgagaaggcctggccagctcttgaaggccattcttgcacttgaggaacttaggctagcaattttgcatctcaacattacctcttcacaagcaactgttctttactccttcaatctaaaggtattacttttatatttctataatatgtacgtatacatatatttataaaatattgatatattgttattgcatggtgatataaatataaattatatacagatagaagacgaatgtaagttaggatcagcagatgagattgctggagcagttcatcagattttcagattcattgatgccagttaagatccacagctagttagtttagaagaatggttagtgaaaagaaaatgtaatgaatttgattattattattattatttttggggtgttaatcaattatgacttatgagagaaattgggaaaattaaatgtggtcctgccattaatcccccttaattagtcttaggctgtgacttatggtttcataagatggaaaaaaaaaagaagggaaaataataatcaaaaatggtttctctagcttctattatttatataatgcattttcttaatttttatatatatattgatattggtgtgatttagggcccagaaacgtgggtgcctgagttgaagttgggttgaatatatgagattctttctcatcattacgtattgtgtaggatattg

SEQ ID NO: 307244 - DNA, 5120 bp, Cannabis indica
atatatatatatatattgaaatcgaaagaaaaattgaaagatggtttaaaggatgatctgactcaagataaagggaaagacacaggaaaatagagagaaacaaacagagaaagagagagagagagagccttactgaagagagggaaatcgaattgagcttaaactaatgtgaagagagaggcttgctgcagcgaaatataggcagagacttaagatcttttcaatggaggtctcgtcgatgatgaacaaagagtcgtgggttcaaggtttagaatatctaaaaaatcaaactgaaacaaattaagaagtttaaaattaacaaagcttaccaacaatagagagaacgaagagaaagaagggagctgctacttgatagacacgaagaaggggaaagttgcaaatgtgagaaacatagagatagaggcggctgagtgttagtgatgatgttaaaaaaccctaggtattttttgtatcctttattttatcaatataatatattaagtaaaattttccatgtatgtagggtttacatattgacatttggataaattttgacacatacgcatacacatcatcatttaatttttaataaaattataaaatgaaataaaagtgggaaacgagactttctccataaaatatatgtttgtaaaactctacacctacacaatttatttgtagcaattatattcggaaagtttaatgagatttgacttatatatgccaaccaataattagtaccaataaatactagtagctaaatataccttttatatacaaatatttaattgtaggtaaaatatttgtaggtaaagatcagatttcttgtagtgccacctgacacccgataatggtacaagacgaaagaccacctcctgcacctgccactcgcaatcacataaggcaaacttgtcccttgaggatcataagtgtatctcaggccattagaacctaaaaatatcctattctcaaatgagaggggtttagaaaattattgtaacacttgacttagagaaatatacacttctatcatactccatagctattttatatttcttctttaagttttcatatttacggatcttcatcttagtcctaggtcttacatttaagtttaaatttttcaactataatttggttgattagttttcaccgttaatatttaataacaacaacaacaacaataataagatatgaatttatcaattataaataagttaaaataataacaaaatttaaacatataatactaaatattataattatataattaaaattattaaaatatgaaaaattaagattatatattaatttatttatagggtgtgatataaaaatttgagtatttataagtatatttaagttctattaatgctaataattttcttatatgcttatccgtaaaatattggtgaaatgttatataaatataactaaagctataaaacatacatatactttagtaattgtaaaaaaaaaacgtatgaaaaaataaaggatgaaattaagcccgaatataaaaattggctgacctgtttaaaaaatacaggctggtacgagcaaaataagacacaagtctaagcacagtacgaaaatatcaggcctacaaaaagaaaacaatagaaagaaaacacaatataatttagttatttcattatatataatactattaagctaacttgcactcttctcaggtcatatcgttattagtataattaagtatcaaacacaaaatctaaaaggtacaagtggtacctaacatctttctacgcgttaatattattgttggtccaactaagtatcaagttacatatagtttaatgtaataatttttaaagagtatctttaattaaacacacaatgacacatctagaaaatactaatcactattggtacctaataataatgctcacactacaagaaatgtcacttttgccagcacatttttgtgctagcaaaagttggtattgcgctggtaaaataaaatttacttgtgatgtgttggcaaaaggtggttgacaaatcaatgtttgtattagaacttttgccagcataaaatgaaaaacgctggcaaaaatgacttttctcagcgcgtaaatgcgctggtaaaagttagattttagccactgcaaatgtacactggttaaactttgacctctttgatagtgcagtttgcaaaatgtgctagtaaaagttacttttaccagtgcaatagtgaattatacttgtaaaagtgacatttcttgtagtgttataacattatgtatatgtgtaaccttaaaaaatataggtaggtataaatataactatatagagtaccacgcaagtctcttaatatatagacctaatggaatctcttaataataataataataataataataataataataataataataataataataataataataataaaaaaataaaaataataataataataaggtttaaatggccaattgtatgaagttgcgcaaaccatggaaattaacacttattaaatttaaatccaaatctcttatttctcttaagtcttaaatattcgttgacttagtatatataattaatttattaatattataaatttatactcctataatcataaaattaaattaaaaaatattttttttatattttatttataattttacgacttaaaatttttaattataaaaatacattttattcaacaaaaagtaaaaataaaaaaactaaaaaataatgataaattaaactcattacaactataaatcaactataaaacaacttgaaaaacaatctcatgaaaactataaatacaactgtaaataaattataaaacaaccaaaaacaatttattatttttattgaagaggtacttttataaataaaaaaatttaaagagtaaaaaataaaaataaaaaattgtattgatgtattttgtaatttttttttctaaattttcagtctattatatacacttttcattaaactagcttacctcctcatgccatatattttaggcttctttgaagtctaaatggtgtttttaatttctcttgttaaacgactagttatctcgctttttaaattctaattctagtcgaattcacggtaaggagattgtttctgatgatttacaagttatcttttgatagttgattccatttaataattgttagctatgttttcggatgggcgacgcgtgatattttcaaagtataattggtccacataaatctaggctcaagccttcccgcatacaaaaatccagtccaaatcggagatgggcccgtgtccatctaaactctagaaacctcgccaccgaagacaaagcccctctacttctgaaagcccgtccagccttctaggagacaaaacaaacgaagcctttcggacaattgctaacacgtccgaagaggaagtccaaaaggtacctccagaagcctcttgcagggtgatgtggctgccctctgatgcctaatcccaccaaataagattttgtccctatgtcagaacatgatagtgcgcacaccaccaaagggagtatatactatttgtctaacgacgcttatctgacattattgtctattgtagcggcgcctgcttgtgatacctgtgcagaccgcacgagccctatttgtactgacacattcgtccaaggagccaaaatcttgcagtgggtctcaaagccatgaattccatgtatttaccctaataatgagcctattttgcacaaaatcctaaacagattacgggtatgcccgaatttggatctaagcctataaaaattcatttaccccttcttgcaaggggagcaaaaaaagacttttaggatctctctaagctttctttttcaaagagaaacctagagggaaaaacatgatttcaacaattaggattcttcaaattgtaagacccatttgtaatatattaagccttcttaagccaatatattgactcgtagattaaagtttattaatacttgaaccacataaaaaaaaattcaatctcttttattttaacagtcatttaatttcttaattaaattcttatttaatttaatttctataaatctccataaacaataataaaataaaataagctccgtttatgtatatcgaaattgtgttagaaaaaaacttcatccatttctttttttcattacacatttatttcaattattgtctttagggtttagattgcatatttagtcaagaatccatagaaaagaaaataatttagtcttaaaatcttcattcattggtttataatttttcatcctaatataaaatattgtcaattaaccacaaaagaatacttcacaattttttccaataaagaattttactaaaattaataaaataatataatcatttcaaaaaaaaaaataaataatataataattaattataccaaaagaaaagaagaaaatataattgcatcccaacaaccgatcacttaaaaattgaaaaaataaaatataaataaaccattttttattattaatttatattccctttttcccctttaagatgatttgattgagtcactacaaaaatccaataattctaattaaattcatgtttttttttattaaaattaattaatttatttatttgttataaagattgggggccaagctagtgccaccacattcttttttcttctttaattaaattaaaataaagcaaaccgacaaagacacataatgattttaatacaacaagacatatcttattattaattaattaaaataattttttttaaaaaaatatatatatatttatttacgcgtaaataaaaaaaataatatatggctataattttgaacacgtcatagccttacacgtggcaccaaaacgtcttacgtaacctatttggcaccacgtggcttcgttgtcaaaagtttttgtctttgttcaacttatatattattattaatttaatttttaataacattttcatgttatgtgtttatgatttattttttttaattattgtcgtatgctattattagtaatgagtcattgttaaatttaatttatttaataattaaaatattataatcatacccataatatatgtacaaggcttcttttctttatttgttttttagggtgcgttttcaaaaa

SEQ ID NO: 307245 - DNA, 3473 bp, Cannabis indica
caaaataacaaaaaattaataacaaaattaacaagagtacaacataaaaatataatcaaattaaataccgtatttttactactataaataaaattataaaaattataaaaatatttaaaaatctgtaccgtattttttgtaatttttgttgttgttgttgtttttatatatttgtgaaataatcactttaaactaactaattacttgttgtaggtctaactaattaacgacccttaagcccatttattgcctataaatagggttaggccaacatttgcaaagagatctaaactatgtccaaacactgttataaaatctggaacttgagcattgtaattctttctacctaaataccactcttctattaattaaaaattcacatattggttcttctataattcttcaaacactattttcatttttttttattgaatttagttgatgaaaaatccagttaaaatgggtaaaattgaaataatataagaaaaacttatggatcatggaagccaaccaaatgaagcaacacatgaaattaaacttactttttcatactataattcataaaaaaaaaaaaaacatgtctttataaattatagctagctagttgaatatattgacataattaaaaagttgttgtatgactttttgaattatgaaaaggccagaataaaattgaaaaaaatatagaactaaaaaagccagggatagaggattaaccataaagctaattgataaagtcataatgttgatcagtttgctctataagtcaactttccaataaagataaaatagaaaaagaaccatatatatatatatatatatatatatttatacttactcagaattaaaagtctaaaacctacaaaataaagaagacaattaatgtatttattataaccctgacgacatgttatgtaatacttacctcataatatatactctacaaataaatagatatgactaagaaaatcaaattaattaaaaaatcttaaattactcttaaatcctatataatcaagttaatgagttaagagtttataacttacatgtgttattgtctaaatttttgagagcatctctttcgtatatattagtcacaattttaatattacggttcatgtatgaattaatttagcatactctttgattagacaataattttttttggaaaaaattataagtgtttaccaaattaaagtctctctgattttttttacatcttagaaataatgtgtacaattattaataattttgtgaattatgattataattctcaatttgagtacacatattttatagggaaagaggagtatgagagttgttttgagaggatcaaccaacaacatcacccaaaaggaccaacaatattctatctaaaaaagtaaaaagagtaatgctatatatatttatatacaattaattgtgaccttaaattttgagtcaaagctttgaatattatttcatgttattacaactactaagccattagtgtagtagttggtgagagcttttgctttgtagaattaaagatattcaaacatggaaattaacaatattatactattaatttaattatatggaaaagaaaataactttcgtacttaacactaatgatatgtttacttatagaatttgagaattaatggggataaaaaaaattgagatttattattttgtttacttcattaattttataagaaatgagaatgaaatgtgagtctcacattaatttgggttgagaaatgagatcgaggttggtggaattgccattcccatttcttttaaaattattaaatgtaatttttaccattgtggtatgattctttaaactcccaactaagatttagttagttagttagtctttaactaacttaattatcaaaaaagacaactgatatattgaatcccttagctcatataaagagaactatcatttcacaagaagagaatacaagtcaaacacaagagacacaatacattagagagagaggttagaatgagatgaagagagatatcgaagagagagggagttgggattgggaaattggagcaatattgttgattatgtttggctcgggttattagtgatttagtgttgagggattattcattatggatgacttgctgtgattattttcttgtagcccctgagattgatacctcttattctcattatcaataaagattggtggcaatactttcaaactagagtatgaccaagtttacattgaatttaggattggaacttataaatctctgtgttattgtgtttgacaaccatttagattcatctgtgttatatttttctagtttattgtgtttgctggttttgttcttgatttgtttgtttaagtgtgatcttgaagatggaattacagaggttaattcctacagtgacttttatttttattttttgaaaaaattaaagcttcatttagcgataatcattcaagattacattaagaaacttatccttacttattatcaacaaaataggatgctttagctttttagttttattaaatattaaaaaaaaaacaaataaaactttaacaaagagtatttttgtaacttaaaataatctatttcaatttcaaaataatgttaacacattaatgagaatatttccaatgcctacaattcaagtaatacaacttataattttgattgtgattcctcaatctgattgagggtaaattcgatttttaattaatctgatatttaatcattctaattacgtataggtatacacactacaaaaatttaagaaattaatcacattaaaagtagtcctttttatctaatattataataaaaatatggagtactatttactgattaaattggaaaaaaaaattaaaattttattaatgaataatttgcggtataaatacttaagtttaattttcagttgcaaataaatacttaagtttaattttttgcggtaataatacctaagttataattctaaaacttttataggtacctgactgtaaagtgttaagtaaattgccatgtggtaatctcttattggtcaagtgattaaatttttattttttttttaaaaaatagtttaaatattctaataaaaaataacacgtagataataattttttttttttgactaaaaatcaaaagctttatcaattaataatttcattcaaaacaatagaacgtactttagcggaacaatcatccaactgaaacacacaacctgtaaagaaacaagagtcttttgctaagcaatgagctaatttgtttgcagatcgtttaacaaaacaatactcaatatatgaaaaaactaaaagcaaattacggacatcttgaacaagtaaactaaattgagaaatcatataaaaatataatttaagtattattcccacaaaaattaaacttaaatatttatttataactgaaaattaaatttaaatatttatgccgtaaattattttttattaatattaattaattag

SEQ ID NO: 307246 - DNA, 2041 bp, Cannabis indica
agcatccactctctcggttcatattagcaagatggctgtccaaaacttgtaccgtccaccttgaggggggggtaacacgatttatgcctctctcatatcttgctgtgtattggtcagtatgaccgttatttctgttagtggtttaggtgctttaatctgttcagttaggatatttctgttagttaatttttctgttttatttcttttttttggttgttatcctctgtcgaggcctgggtatatatataccccattccttgtaattcatttaattcattcaattcaataaactcagaccttggttttctctcacaaaggttctttcgtaataaatatgtgtagccttatatatggagcctaatagtaataatagtgcttatatttttaatttccttgtagtcaagctaaaaacaaaattgagagatctttgatcttggtggtttcacggttcagcaatggcggctgccaaactagggtattttattattttttagtgtgagaggtgacacccaccatcacccatcaccatcatcaaccaaccatatactgacacatcatgcatgtaagtgctccaactggactgtataatctccttcttcaataactcttttttcttctctattgatccttttcgcctttataaaagattccgtaaagctaacccattatccaaaactctatcattataaaacattctgtaaaggtaaccatccataagtctctctctccattttttttgtttctgttgttgttgtttttttaaattatttctactgataatttttggactcctcaattaattagctttcattcaattcatacatattacagatatttgatttatagatttaaacaaatcaataatgatatataaataaattataatcattgttctattatcacacttattttcttctttaatttacacattgtgttttttcttttttaattttattaagtattagattacatattaatagtaaactaaattgaacaaatgttctttacttaactctttcacatttgattttttttattgaatattacataaataataaagaatattatttcaacctaacatataataattgtaattggtagatgacgaggtggaaaagtaagagaaaacccaagtggtatattattgaatttcttcagttgactagagaagtcaaccttcagttcagagattctggctccagaaccagttagttaccactcccttcttcatcgtggaaccatggttcatggcctgcctcaaaaaaatttgggcatcattagctcaggtaagactttacatccttttactcttcatgatacacaaccgatttacatttatatttatttgaacaaacaagtagattttggtaccaagttataatataacacgaatgtcgttagcataaatttggtatgaaagtgtcttcagtagaaaaagaaaatacttattctgagttggaaagatgagatgtggtgaaaagtaagttagcttctgaatttctgatctgctaagattcactgagtattatttatatacttagaataaaatacagatatatggttacaactgaaagttgttacaagagacagagtagctgatgtgatgtcagcaattaactaacttataactaacccaatacagctaaacatattcactaacattctgcataaaaagtaaaatagcaaaagagtacactaaaaataattaggatggttgttatgattctgtggtagaattttcagtactcatcaatggagactctaggttagaaacagagtctgaagaagcagagtcatgaaacatacgaagtaccttcttggtgagattccatgtgtattttgcagctgcatcaactgggcacgaaacaattcctataaagagacagacaccccattgagccaaattcaatctctcatccccagctagtttatgggccacctcaatgaaactcgcctgtagtcccactacgaacaccatagcctgttaaaattagacctcactgtaacctttattattacagttttacagatgaagtgaaaa

SEQ ID NO: 307247 - DNA, 1229 bp, Cannabis indica
aaataaattttttaaaaacaaaaattttacttttattttgtgattaaaaaattattttacaagaacaaaatcctctaacaatgtgcttgtcttgtcttttgacatggttagtctgctaaggtctttctcagatctgtaagtataaggttgttattgtctagtctgtgttttggtcatatggcgtctaccagtaacgatagggaggatttggagactgttgtgtttgatgctcgttggtgcttggtcggacgttttctcactaatggggtagtcgatttcccatctatgcaacaaactttggctgcactttggaaactaggcaagggggtgtatatcatggaactcgatggtggggttcattacttatttcagttttaccatgaaatagatattagtcgcgtattggaaggcagaccatggacgttgaatcgtaaagcatgttgattatgaagaggctgaaggaaggggaaaatccacgaacggtctcgttagatactatagacttgtgggttcaggtccataatttacagacgagttatatgacggaacggaatttgaagaatgtggggaatcacattgggaaacttgctgaaacggacccgaagaattttatgggattatggcgggattacaggcgtgttcgtgtgacaatggatcttaataaacctctgaagcataaaatgaaattttgggaaaccaaaactgagttcatttggatcacgtttaagtacgagaatgttcccacgttttgttttatctctggtctattgggtcactcggaccggttttgtatgagattgttcaatactttgactgataaaatcgtcaagccttatggtatgtttatgaaagcccccctcagaggacaaacaaagcttatcggtgctaaatggctgcgtaatggaatcgacgattcagagtttgtgaaccggtgtgaagctgtttagagagcccgatacaggtccggcaagtgtgaacaacaaccaggcagcttaagtgtagttaatggtcagaacgaaaataatggggttgaagatcatgctagatcaaagatgattgctgctaatcccactaatcaaggagaggtagcaataattgctgctaatcccaatgccagtcgtaatcaaaatctgccatatcattcaacagatttattacgtcatagcctctcattaatacaggcgctccagttgcctctgctccataatcaacccagcttcttgtttcat

SEQ ID NO: 307248 - DNA, 858 bp, Cannabis indica
caaggagacatataaatcagtgtatatattttatatgacctcccaccatgtaattgacagtttagtatgttatagcttcatttggtcctattccaaaaacgactactaatttgtcttcaattgccttgatcaataagagaaaaagacatatgtgtagtattaaaattatgagaggaaaagaatgcaactaataaattaaataaattaaaataatatattttagtgttttcttcttagatgaacactgaaataaagaatgatgataaagaaaaagggacaatgaatatactgacctgagtaataaaatatactatggatgcagagcgtggctaagataaaaaagtaagtactttctagctcaaaaaagaatggtaaagatagactaaagatgaaaaaaaaaaagcattatatatttggggttaatggggcatattacaaaacgaaaagggtttgccctgtatggctatgggcctacacatcattactaggttgtgttggatcaatggagcctatgggtatttatgaaagagcagccgatgcaaccaatcgcatatgatttttttaggaataattttataaagaaatttgttaaaaggtactctagcttccgtattatattgatgttggtgtaattaagtgtcatactattattagtgtaaataagcatgagatctcatataacttaaaaaaataatttttagaaaatatcgttaactaattgtgagatgccacctatagaagtgttgggtatcattggtgtccaataataatgttcttatataaaatactattttttgaaaaaaaaaattatagttttacactgaaagacttttttttacatttttacggtattctata

SEQ ID NO: 307249 - DNA, 1945 bp, Cannabis indica
ttcctctctagattcttgcaatgtgagtacctcatcatccaagtcaggagcctgcccatctctaaggtaggcctcatctacagctggtgcccctataactccaagaacaagagatataagccatatttccaaaagttggccacacaagtcaacctaaatgtgtttctagtctcttccgatagagataagttgctgttttcctatcgcttatttgcaaagttggtatacagcgcttgaagaacgacaccctccaaaagcaccaatgcagacacccttaacatcccaagcaatgaagtattttttagtgtactcatcaaccttcaccataggtgaactgtgggtatcacctaaccactggtgcccaacttggccaaagtataaatatccaaaccaatttttctgcaaaacatactccaaatcaaagtaatatccaatctcataatgagtaggttgaggccaccctagctccctatacaaaacaaacatcattgataggtacttgattcaccaagtttagtaaagagcataacgaccctattgtttcgatggaaagaagaacctatgattagcttttaagaaatttccaaacgaataatttcaacgaaatctttcaatttcctattttactatgttcaactttatgtattcctctatacgtagagtacattgaatgtatagaaatggctatatgggtggagaggtaaaacaattccctatttgatgtggtactcataccacgccatccagttgagggccagtttatgcactagatgatcccacaagggaatcttgtaatgaatgtcacctactagcccattggcccataacctttcaaagctgtcaatagagatagaagatacaggggagatccacttgcctcccttagattttgcatatagtatcttaggctcaaaagattgctccaagacataataaaatgcaagctctgaaggcttacctagcctctttagcgggttaccattggcatcatagtgacccaagggacaatttgggaggactaatcaagtcatctacctactcctcctcacttttgcagcctcctctagatcagatacggtattcggactctcaaccccatggtcaatctctagctcaacatcaacacgggctgagaagtctcctccatcatcctaacttgacctcttgtggccaccctagccacatgagggtaatatttaggcacgctacggaaggtgtatttcgttttgtaaatacgaagtaaatgagggacctacatagctatcatttctcttattcaacacccggtgctgccaacatggaagaaataaggggaggtgagcagcctgacaaagctacaaacacattcaagtcaactgtacccaaaggtaccttcaaggtaaaacacaaggtacgtggtgaatcatcgaacaagtacagtcttaagtaaacttacgaagacatataaaatcactacaaagccttatacagagtttctaagataaactaagcataaggtcacaattttatatgcctcaaaggcaatcagaagagcctcactgacgtcaaaagagggagaaaacctagctcccactttgagctttagccttggcagaccagggttctaggccttagtggccggccagacccctacacttaccctagtagctggctaggaaccgtagttccaggcataggattgccagcctatgggccacaaccccttggccggccagaccccttgataggctcccttggccagccaagtcttcaataagacctccttagccggccaggatgtgcatggattagaactcgtgttttctcaagaactgaaacatgttcgtcgtgactcaatgagttgagaatcacaacaaaggtcagattcaaatcttttttgtctagaaatcacacattatgtatcctaagtctatcatgcggatcaaaatacttaaaggacaacaat

SEQ ID NO: 307250 - DNA, 2932 bp, Cannabis indica
atatagagagcacttttatttcatttattacttataaggaaatatatatatattataacataaattcactcacatggcttgttagatatacatatttatttgtatatacgaagttagtggctttgagtttttgacatatgttgggatacatatgctttattttgcttcatcataaatacttttgatttgtgtctaattagaatttttgttctaaaatttggcatatattaaattatattttttaaactcattaattttcgtaattaaaaaaattattaaaattattaaatttaaaattttttgtacaattttattaacagaaatctgacataaataaaaatttgaaagaattaatttcttatatatcaaaatttgaagagtatttaataaatattaaaattcaaaatagcacagtttagtacatgaacatttattacgttagtgaaattgaaaaaaattaaataaaaattcataaatacaacaatctcaataatttaaataaatttttaacgatttaaaaagttagaagaatcttaattaaccttgatttattatttcttttgtaattaagcaatatgtaatagtttatttaatatttcacatggtaaagtattacgtaatatataaaaacatgtgttaccttacttattatcaagatccttatgagtagcctcaatcaccaaattttgggtttaattgatctaccactaaagccaatttatagtaagagaatgaactaaaacatttattgttgcttgcttgtctattttattctaattatagtatagttgcatgtatctattgacatataatatttaatagaaagagaatagaaatataattaaataataattttaaacatgcgttctttcactatataatgatagttaatttattattttatttttttgtaattaggctaagtaacctcattaatatatacctacgtacaaaaaacaaaaagaaaaagggaaaaacgttacaaagaaatacgttacaacaaattaaatattatatattatgcaaaaatatcttatatatatagatttaaataattacattaaatactatgataatactactataattatatttatttttagttgtggattattattagataaaatgattaatttaaaattttaaaataattaataaatttactaacctaatttgatttattattttaaaataaaagaattataaatattaattattgaaatttttttattaaaaaattaatttattgaagtatataattaatttaaatttaaaaataaaaattttagtaggtaataccaaatgtaatacaacacagacgggttgcttttcgttttttcttttctttcgatatagattagttatatattatttgttttattgataaacagccaaataatggatctgtctaccaatataactaatagattacaatatattaaaatttaatatttaatcatcaatataattaatattagtgttgttttctttgatatataacttataagtttcatcatattcatatcattgacacatattatatattaaaattttaggataattttataatacatctacttaaaaaaatgttttggtagatgttttatttattttaatattcaaaaaaatatttaatctattttttttcataattgtataaatcttatttaagagtttttagatttaatatttatgagtaaaatagccatataattaagagttaggtcatcaagataattaatattaattgttttttatatatataacgcacaagtttcatattcatatatatcattgacacatattatatttgaaaaagatactttatttcgatttttataacaattaatggtctatttaatctttgttcgtatttattaatttcattttaatatttaagacatgtactatcatatttcttaaaacaacaccaaaatttgcatattttaaaaccaacttttgagtttttatattatcagctttacaccgaaagtgttgtgaaaaaataggtcaacgtcactaaaccaatagtcaacgtatactcttgatatcaaaccttattaaccaccacgtgtcggtcccagacctacttgaaaatgatctggaccgtgtaattagcacaatttatgcataatgatgacacgtgggaggcacgtgcaacatgcatgaacagaatatactcgtgaagaataggctagagatcctatatatgaaggctcttgcgcccattctcgctaagcagaagttaccaagcctcggtctgtgataaagatctacctacctagatatttatttaattttttatttttaaaatatattttttcactaattttaattatatttatttaatgtgtaataaaaatggatagttttcaacttatccgaaaaaaatgatagttttgtaaaatgttttgaagtgggcccaataatatacaagcccattaattacctaagttcttttatacttcaaataaataaataaaattaagggaaatttacataagagcatctccaaggagctcatcaaatttggtgttgcactatcattaaatttggtgttaaaaattatttctactccaaccacaacaccaaaaattacactaaaaaatattactcattattatattaattttgtaataaagtaaaaataattatagtattcacatttaaatttacacacaataatttaaaaggtatttttacaatacaccccttcaaataaaataaaagagtcactcgtgcaacagacaatttaaattttattttggcttgttacatttttgtttttgaatttttttcgaaatttttgcaggatatcttaaataactagaatgtacagagttgaaacagtctatttcatgcatctataaaataaaagagttttgcgtgcaacagactgtttgaaccttattatcggcgtgttaaatttttt

SEQ ID NO: 307251 - DNA, 1802 bp, Cannabis indica
ctagtaaaatctacgatatattgaggattggaagcattatttttttctcccttgaaatcaatagggtatcactagaaagttaaagaagtactcttgtgattattgaatatcattatggaaaaacaatgtgatgatatatacatattatataaattatatatatccatattatgattgttatgttgggaccttcaaaagggcccatcaaaattaagtagatggacaattagtgtagagagtctacaatccaggaggcaaaaactcatgggatctttaaactagttgaatgagtcatttcaagatctacatgtagttctctgattcaggtaactatgatgtgtaaatattttaccttatcgatggtcaaatcaaccacaggatgccaactagttgaattttgtaactccaattctatgtgcactaaaaaatttgtgtcatatttttaattactatctatagatattttttatattttcctatggctaaataataattctaatttttgttcacatgacggtttataatttaattaagttactgatttttcataattttttagaaaattctgaatgtttggtgtgattttatcgaaagaaagaaaaaaaaaaacttggtgtgtattcatacctcattattcatgtgtgagtaattttttgtgtttatattatacttgtgtgtctcaaatgctatgtttggtgtaattgttttgaccaataatattcaaaatatttgtaagtcagcaaaattaatctactcaattcaaatccttcgaaggaaatgcaatcataataaggaccaaaaatgtaataagtgaagccaccatcattgagttaacaaaaactaaacaatgatggtgggattgggcggcatcatttatatatgaataaagatcataaagattttcattcattgtgaagacataatggaactttaaaacccaccggtgcaccacatgaagtgcgatcatcacagtcacctggtataatcatacctcagaatggagagtggacctcaaactacttatgtgccacaataaatctccaatcttgctttttcaagaagactagactacaagtttatttattaatttagttggaacccaagtctcaaagtttgggaggtcagtttatccatgttgtaagtgcttaggcaagtggaatatatggcagagttggagtccaatttccacgcatccaatttttttttcttttttacttcctactgtagcgaagagtgtataagaatcatcaattcattcttagactacaaggcaggattgtcattcccctcatctacataattaacttaagattttggaaattgaagtaccaaaatgatatcataactttcccttaaacacccccaccacccccatcattattacatctttttaaggctcatcaacagccaatggtgacaaaatagattcaagtttcagcaacttcatgatagaaacgcacgtggagtaacatgaaatactctacagtaccagctagttggtatatcattcattaacagagcacagcagcacatactaaaacttccacacaaaatttgggcagcagaagaaactaacctgtgaacaggaaactgagggaagagtttggagacactctgggcgaaatcacggaattgaaagataccattggtgcataggtatctaccagaagcctcaggagtctcgaagagcagaacttgtgccttagccacatctcgaacatgaacagccccaagccagtgatactcttgagtatcttttgagccctgcagcaactgaagcaacactgcacagcttgcgttca

SEQ ID NO: 307252 - DNA, 3099 bp, Cannabis indica
gtggtcctcggtactggcctcaagtaatagagttggttcctgaaggtagcagatgcctctgttctttgttttaaatgttactaaagttgtgatgttaaacttttttgacattttttaccctctctcatactgtgtagtctgtgttcctttctctttgttgttattgaacagataaaagctggtggacttttggggataagagtaacccattcaattctggcgttctgtatatcaagagaaaggttggagcttgttcatatgtggatgatcccattgggtgccagtcgctgctgtcacgagcaatgcataaggtcaaacttctctaccacttgaaagcttccttttcctcttgcagatgatataacatttgtcaaatatttatgatccaggtctttggtttaactggtttaaaagcatctaaacctagcatagatgggagcaatggacctggttctgttacagttgatcagctagtcagtactttctcttctgatccaagcttgattgcctttgcgcaactctgctgtgacccttcttggaatagcaggtaagtctgtacatctcttccatatatacttatatattctcgtatttataactcaatttcctataagatgaatccttttatcatatggtcagttgtgttatctcattttatcagttaggaacaagcatgctgttattataaaagtagatttgagtgttgtaaaatgaaactgtagatactttttctaaagtcattgctagtcaaagtctctgaatagtccttgatcctaaagagttgtttagcatgtgcatatggagatttttgggtaagctcaaattgtgaaccttgatgtgctaacagtgcactggtttaagagtagcttatttgctttgggattggagtgtgcaagtatatgtatggataggggagaggttcaaaatttaagatgtgtgcatgtgtattcacattgtatatgtccttttttatataaaaaaataaacgaagcatcttagcaggctggacatcaaatttaattgtaaatcaattgcataactttaacagggatttgtatgtgcagaaccgatgttgatttccaggaattttgcctacaagtattatttgagtgtgtgagcaaggacaggcctgctctgttacaggtatattgtactgttgcaacggtgcactaatattttgatgatttctatatcaacagtaccgtaatgaaacaagtattcttgttaatgaatgcatacaaaccaaaaaatttgtactaaaggtttgctgtgtattgctacctgtgtttattctttaagacttgcttcacttttgtattgctattggaatttcagcataattccgttgtctatttgatccttataatcgagtattaatttttgagtccttggcaggtgtatttgtcattatacacaacaattgggtcaatggcagatcagttcgcctgcggtacagttgttttgggtgactcgctttttatctctaatttaaaggtagttttctgtctgatgacaagcttttattttatttattgactgccaagattgatttcattcagcacaccatatgtttagaaaaacggttgcttgtttcagaatctactgtttttggatgttaaacaatgataattacattttgaataaaaaacacatgtattagcaaggtgtttcggtttagttcactcctgtgctatgtttgttaatttctcaagagctggtaaatggaaacaaataaagtggttctctgtcccattcattcacttttttgcttgtacaatcaacaattacaagtgggatctgtataatcggtgaaattgaaaagagaaacgcaatccttaatccttatctttttccttttatatacttccaaaatatttcccattatgataattttcgttgtggattggtaaacatgcgttggtagttgatgaatttgagcttacattttacatgatgcttcgagttaggctctaagtttttccatggtgaatatttaatgagttaaaatatataggatggtttttactacgtttctcttgttagttcatctgatgcctatcacaacctttttttttgctctgactcgcagcttgcagtagcctacaatgaagctttattgagtggaaggttgaccacttcaagaggtggcattgttcaatctaattttctaggatcccttagaaaacgagtagaagatctcctgaaatgtttcgagggattacaggataatttccgtaactatttaagatcggggacatggccaaacggggaagaaaaaggtccaattctcctttcttggtaccttcagtggtttggtgtaccagctccatctgtaatcaaaacagctggggagaaaatgaagcccaaagtcaaatcatctcttgttccagtattgcgtttgttatttccaaacacagacatcaacgttattggtgagatagacaagttcttgtcttccaacatcagtaactgagacctctgacctggacgacccgcccataataagataatctccataattgttgttaaatatttatctaatcatgggctaccaaagaaaaaagaagagataaatacgttatgcatttcatcttcatagcagcatatggttgagattttagaaaatcaaccccgtccttggccctatcgtcatatatacgtaatatttattgtattactacattttcttttttgtagaattttatattatcttttaacctgtgtcaaaagctttgtatttttatttagggtagttgtgtagataggttatcacttttttcttcttcataattattgttatttattcatacgtggtgcttattgtagttatagtaggtttattgcaaaatttgctttagttttatttacaatctaaaaaaaattataaataatgtaatttgttttaataatttttattttatataaaatatagggtgattctacaatgcacctctttaaaatagatatactgatgcacccttgcatttaaaagaaatttttagtctatgtacgttatatttatttaagatattctacaaaattttaaatattttttgaataatttacaatatagaaaacaatgttcaaacagtctatttt

SEQ ID NO: 307253 - DNA, 1255 bp, Cannabis indica
aatcacaaccatttaatagtaatccaatggcttacaaaaattgtaaccattgaaacctcttcctaaactattaaaatatcaatgtttcttttatttggaaataaattgtagagtttgagtacccatgtaagcaagacaaataccagacaacgtttgtttattatatacggaaacccataaaaattcataatcaaaattatgattacacactcagttatataatctccattagaattacacagaccgttgcctaggtctaatatgttctaatatgatcactgcataataaaatacggagtagactgacaatttaggtcacaacacgaaacataaacacaatgtatgtattgggttacgattgagatttctcgacactaaccatacatgaattaggtttgcgttgactaattaaacttatcaacctacattatataaacacggatataacacgaatatgagatgatggataacacaaattgtcactctgaggtgtccaagcccaatactaaaattctaaacctaacacatataatcataaaacatgctgaaattcacatacaactatctcataattcataaacctatcacaattagattaaggttactaatcacttaaataagtcttagcacaaattttacatgtctcaccactaaaatttaggaacaacgttattggtaaataattgactttttcaaaattagagtttccctcttatatagtggacgacattagtctaagctttggtgtcaatgcatagctgacgctattagtatcataagcatcggtctaaaatcaacgctattgtaaagatagacattactataacaacgtgctaggaaatgtgagagttgcctatgatggcaaaaagactatctacactgatggttcttagtccatttaggaaagccattaagaatttagaattttcactgtgaaattataaactaccttatgattatgctcgaaccatcccatgatagaaaatgtcctacttttgttagatgattcaactttaataaaacaaggtaaatcaatattttgtgtgctaattgtcgtatattcaataaatcctagttcttgtaagtaatttacttaatcatgagatttgagttcgaagtattattatccaatcaataaacatatatttcttactaggataaattagctcaaaccaaatcatgaaatttctataaaattttgtactcgttagagacatacagtccatgtttggcatcataactaaaaatagttttt

SEQ ID NO: 307254 - DNA, 1345 bp, Cannabis indica
ttttctcttgttacattggaataatctttcctttctttttttaaaatggaatagccattccaccagaatggtataaagatcattctattggaataatattcaaatacttaaaatgcaaccaaacaaaggaatggaatgaaaagtgttttctttccattccattccatttcattatctccaaccaaacgccaccttagaaagaaattttttgtctcttggtgtgctagattcaaaaggttacaactacaaggcatatggtggagtcttgaaggtgacaagagaggtgaactcaagcaaagggtttacattatgcaaggagaaactgtaactggtctaactggagtctcaacaacaaattataatacaaatgacttatggcatagaaggcttggacatgtgagtgacaagggactcagaactcagcaggcaaggttttttagactccaaaaggaagtcacaaatatgcaattttgtgaaacatgtgtgattggtaggcacatttattgaaattcacaaatgcagtacatacatccaacgaaattttagattatgtacactcaaatcttggtaattctcaatatttcctttctatagttgatgagttctctagaaaagtctggatctattttttgaaaactaaaaatgaggcttttggtaaattcaaaaaatgcttaataataattgagaaacaaatttctacgaagggtcttgagtttttgtaactctgaatttaatggtttatgcattgaaattggaatggttaagcacaaaactattataggaatacacatcaacagaatggcctagctgaaagaatgaatagagcaataatgaataaagttaggtgcatgttatcttattctatttttcctaagtctttttgggcagaagctactgctactacatattatctcataaatttatctccatcatctaaattgaattttaaaatctccgatcatgtttagtctagttatgaacctaaatataataacttgaaaccatttggatgccctagtagtgataaaggttacaaattatggttaattaattataagaaatgtgttattagtagagatgttatttttaatgaggaagtgttttataaatataacctaaaatttagtattaaaattaactctaaacaagttgagtaagtattttagtaattagataaatattatgtttcgtgggtgtgatttatataaatgtatatatatagtttacctataataaatataattttgtatagttttagatttcgttatcgtgtcactactacaatgtaggtttttagcttccctttttcaacccaatttatgaaaagggaagctaaagggtgtga

SEQ ID NO: 307255 - DNA, 1086 bp, Cannabis indica
aattcttctttctcagagaggaaattactttatccttccttttttgtagttctaaattaatataatatatatgtatcaattgatcggagtggaatcataaaaaaagaaaaaattacaaaagtttaaaaattattaatcgtgttattgattttttttttgacggtgtaacttcaagagaaacaaagaggaagttacagaactggaacagatccattccagcttaactcttcatctagccctaaagctttcctagccaagcaatgagcatttttattacaaagcctagcaacatgacggacacaagcttcagggaagttggacaaagagcttctaatatcgcctataacattggaaagagcagaaagatctagcttcaggttgctagctctttccattagcacctttgaatctgttttgataagagccaatggaattttgatgttagagcaccacaggagactttatcaaagagcaaaggcttcagccattaatggggaaacaatgcctgctgctggtatggaaagcccccccacaatttggcccttccaatctttaatgactgcaccaaaaccaagctttcccagggtagtatccagagctgcatcagtgttaagttggtaaaatcctgagggaactctttgacattgctggtgcgagtaggaagactgctgtagcgagggtgacagtttcttggattgagcctggcctccttaaaatctgagagaaaaacactagtccaagcaacaacatcagtaggcagcataaaagaatttttaaataataacctgttttggttatgccagattgcccagagaatacccaacattaacacaagatcatccttatttagagtcataaaaccagtaactaaaaaattcttaacatcttgatgcctattggagatatatatattattaaaaggcttgaaagttattaactgttatcgattattgatcttgaatatatattattaaaaatgtttgaaagttattaactattatcggttaattgatcttgaatcgtgtattgaaaagtttaaagttaataattgtatttgtattgatcttgaatatgtattaataaaaa

SEQ ID NO: 307256 - DNA, 2807 bp, Cannabis indica
gttatgtgagattttatttgatactttgattataataaaaaaaaaaagtatttatcaattaaaattattttggtgttatacttagttaatgtgtcataaaaaaagatagttttcaacttatctcaaattttttatttaaaaaaaaaaacaacaaattatgccttaaaatctacaaacatcacattactggtatattatacaaattaatttgtaacgcataattattcatattagacaaacctttatatattaaaaactattaatatctaaattaaatttagcggaatttttattatctttaattctcaatgaatcatcacaacacggttcttttgttcttgcgaagaaatcataaataaattatcatcacattcacaaatattaactccaataagtaaaatattaaaaactaaaaactcgtttgatatgtcgtattatattatattgtattagattgtattatattgtattgtattgtattaaattagtattatttaatacatgattatgttttagaatttgacttatattaatagattgtgtaaaattataaaaaaaatttttaatacactcgaccccaataccaactatgggtccgggtttgggtcaggagttcgggtcggggtcccaagttggagtcggggtccgggttcaaatctgggtctagattcgggtctcgggtttgggtcccgagtcccgattcgggttcgtgtccgtgttcaagtcagggtcccgagtcggggtccgggtccgggtccatgtccgggtcccgagtccgattccgggtttgggtcggcgttcgggtccaggtctgggaccgggtccgggtccgagtctgggtccaagtttgggtccggagtttgggttaggatctcgggtctgggttcgaatttgggtctaggtcccgatctgggtctaggtccggaacctgggtccgcgtccgggttcgggtccgtgctcgggtcagtgtcccaagtcggtgtccgggtccgggtctgagtctgggtttgggtttggggtccgggttcgagtccaagtctaggtctcgggtctaagtccgggttcagggtctgggtccgagtttgggtctaggtctcgggtctgggtctgggacggggactgagactggggccgagtccgggtccaggtttgggttcgggtcagcgtctgggtccgggtccgggtctgggttagagtctaggtccgagttcaggtccaggtcccgggtttgggttcgggtcccgattccgaattcaggttggagattggtgttgaccatgaattctttgtaaatattataatacaaactaatacagaccatttgttatgtattaaataatacaacatacattgtattaaaaatgttggtcgtaataattattaattaatacaatacattactttatctaaacacagtgttatttattatttagtacaatacaacgcttatacggcgtaccaaacaagtcctaaatcatacagctaagcaattaaaaaaatgtactatattatattagacaatagtaaaatccattaaaggtaggtgttattttgagggatttttaaaaataccattttttttatattttatttataattttacaatctaaagttcttatttataaaaatacgcttttaaaattttataattatgaaaacatgtttttttcagcaaaaataagtaaacatctaaaagacaacgagaaatcaactttacaacaactataaatcaattataaataaattataaaataagacgaaaaacaacatcatgacaactataatacaactataaataaactatataacaatatgacaaaaaaaaaatagtttattattttgattgaaatacgtatttttataaataaaaaagttaaaagcctaaaagtaaaatttttgtgttaacgtagtatttttttttttaaagagattttcaaaacctgttcaaattaaactgagataatttaactaaaaatataaattgaaaaacctgataaaaatataaactcgcttaatctttatattaggcaagttaaaaataatactaatctgcccaatcaactcgaagtaatatatattatacattatttgtatattatatgattatttaaaaaatataaagcttaaattaatattttttttatggtagttgatttgaactttgaattcaatctatatatttgtcttattattacaattacctaaaatataataattgaatgtaaaaaataaaaaataaaaatatattagtagttggtttgagtcagttaacccgacgaaaccgactaatatcattattattctattttttttaattagatgaactgcacttaaatttttggaatgagacatataggttgaataaaatgtagtaacagattaatgtacaccctaataatcaacatgttaatggagagactattttcattttttatcccaaaaaaaaaaagaaattattgacattgagggttacatatgcatgcatagaggctaggtgaaaatctattattatagagaaatgctaaaaagaaccagtggtgtctaatacactcctatatattatattattattattggtccaattaagtatcggacctcatataatttaatgtaataaattttagaaaatatcgctaatcaattgtaaaacgacatgtctagaagtgctatgcaccactaatgctcaataacaatactcattattataagtacataataaataataatataatataaaaagattatatgaataaaaggtttcttagaataaatataacactatatataagtgttggaaatattttacc

SEQ ID NO: 307257 - DNA, 2871 bp, Cannabis indica
atttaattaattaattgaatatgtttggtgattaattaccacacatacggatttttattaacattttttttaattttatttttttatagaaaaatttattttaattttatcaaaattttggtagcataatattatatttatattaggatgtccctaaaaattttaaacatgcaaaatacgacgaataaaatataaaataaaaaaataacatttaacaatataaaaatttgcagaacatactttactactataccacgcgctcccgcttcaagcttccattaggcccttacacccacaaacttatggcccttatatacgagtacgtttgtttcctaaaataatgattgaccgtatacaaaccatcacaagtgttttcatcatgctctctcctcactcgcacacttaattcctgagaaaatttctcaagaggtcaccaatcaaaaaattactccaaatcaagcacgcttaactttggagttctcaagtgatgggctactgaaaacaagatgcaccttgtcgatataggtagtacccatcaatccatttaagccatttttcagttgtacaacctcatacctacacagtctcgaaatcatcacacttgacttttcccgagcgatgtgggatttcacagctctcagtctttccccttacgaatcacgagactctgactgtctacgaggtccgatgtcctcttcgactacactttcaagtggattaaagctctgataccatgtaatacccctgcttaaagcttccattgggcccttacacccacgaacttatggctcttatacatggatacaacactttgactgttttctagaataacggctggtcttacaaaaaatatgagtgtttccagcattctttctccacactcgcaagcttcttgagaaaacttcccaagaggtcatccatcttaaaattacttcaagtcaagtatgcttaactttggagttctaatgggctaccgaaaataatatgcacctttttgatataggcagtacatctatttaaatcgttttcaaatgtgtagtctcatacttacacagtctcaaaatcatcacacttgacatttcccaagccataactataaatgaatattaggatattcaaactcatctaacatgcatattccacacatctgaccgtagtaaaattaatcatagaacttacttcactaagaataaatatataagatttataaaatactaagagaaaaattttagtaacttatcgactccaataaagctaccgatcaacttcctcgaataatatcatcactaataaagaaatacctaaacataactaaaattaacaatagctaaaaacttcaaacttttctagtattttttaaacattaagtgaaaaaaattagttgtttattaagtctaatatagtgttcgaaaaatcttcaaatggtatcaccacaaataaacacctacgtacacaaaattaagaatcaagagttaaaagtaaattaaatcaaaaataaatatataaacttaaacatattatataaacattgcctaaattatactaaacttattatattaaacatttttttacctaagctatactaaactttttttcctaaactatattaaactttcattagaatattttattgacctaacctaattaccattaaaaataactatatatattaaaaagaatatatatatataaatattaaaaaaaatatttaaataaatatatacagtacatggttatgtatattgtatatatatatatatataccaaaggtggaggaggaggccggtggtggagcgatgtaggatgttatgtgttgatggcctcgccgttggctcgatggaatggtggatgacccctcgaatctcgtaaagagagacgaaagggacagagatgagacgagcaaacccatcgatcttaattagtggctcaatgagctcagtgctgggtttagggtttcatgggctcaagaggaggagggtgaaagagagagacgaataaatgatagggaatgagagattaaggagaaggaagggtgggtggccggtgagagagccgagagacgagggggaggaggggttgctcgtcgaggctgtgaggggtgggtggctcgtcaggtttgtggaggacaagagagagcaaggagcgagagagagtttgattgaagacaaaatgaaaattattatatcagggggtttttatatatctacactatagttgtcgatttaaatagacaactattgtatacccgactatttaaaatcatcggttatagtatagccgattgggacccacagacaacaataagttatttttatttttaaaattcaactgtatgttcattaataattgatatttcttaaagattgttttatagctgacactattgagggtctaataacatcagtttaaatattcacacattttcagtaccatcagtttttttaaaaaaatcaatttttaaactggcaaaaattgtctcttttgtagtggaaaaaaaaataaatgactataattcttttttctttccgtgcaaactaaccgcgattctattaatttaaaataactcactataatttttttttctttcgctagtatttgagtgctggcagtgtgttcttgtagacaaactttgtaacgcccgtattttataataataaatccgaaatctaattttaataattaatatattaataatcatatggatcgggatcccgagtatcaaaatacgagttaaaagtattttactaatatgtacatatatattttttttaaaagtttagcggacaagcatcctcaaaatacagactccaaaatactagtaaaccgaaaccctccaggttgcactgccgcgatatgtacaatcatgccgag

SEQ ID NO: 307258 - DNA, 1473 bp, Cannabis indica
aaaaataaaatttaaaaacaaaaattttattttcattttgtgattaaaaaattagaaaacaaaagtgttaccaaacggcacctaagttttttggagtttggaccatacatacaccataagtactctttgtaacataatacctaatgtttataatttgtagaattctttatactttgttttgattgtattgctgtagctaattgcttgttgaactgatgtttctgttggttgatcaataatgtacatgaattacttataataaaatattcctaaagtgtttggaaagccacaatataattgaatttatgtgtataattgaaagtaattataagcttttacatatttgtttaactatataattacactttaattgtataattaaaagtaattgagaggttctaattcttattctcatggatcccataaaaattgagtaaaattataatgtgtaaattactaaaaatttctattttaaaattaactattaaaaaaatgaaaactgttttaattagggaaggtattagaagcttggtattggaacatgagtctggtcttttgacctgtgttgtttgttttgctgtggtttgttgtcttttattgtctatacctattgttatgtctgatcgagatattatggatttggatggagaacatcagtatgatgttatacaaggaggggaggacgatgatggtggcattgtatacgagtcaggggaaaaagagttatcagattttgatgatcgtgggtgcctcgtgggaagatttcttacagaccgaacgttggatttcatggcaatgcaacataagatggcatctttatggcggccaggatgaggtttatatgttaaagaactggatcagaacttgtatttgtttcagttttatcatgaagttgatattgatcgagtgattgaaggaagtccttggacctttgatagggtgccattgattttctctcgtctgaaggagaatgaagaaccacgatctgtggtcttaaacaagctggatttttggatccaacttcatggaatgtctaccggtttcattcagcaaaagtggtgaaggatattgggaattatattggcaagtttatagaggcagataaaaacaatttcatgggaatatggcgcgattacctccgagttagtttcagtccgtgtggatttacctctcaaacgcagaatgaaattagagcaaaaaggaggtgagacttgttatgctaatttcaaatatgaggatttaccaactttctatttcatttgtggaatacttggccattccgagaagttctgtcacaagctttttgatactccactacacttgattaaaaagccttatagtattgaactcaaagccatgcctaggcgacgtcaacatactattggagcaaaatggctcaggcaaggtttaactagtaaagatggaggtgacacggtgcacaatggtggtggtcagtgtaaagaccgcttagtt

SEQ ID NO: 307259 - DNA, 2099 bp, Cannabis indica
ttgtcacctaacttgccaaaaaaggactttacaaagatctcttttttatatatggaattttgcatgatttcacttgtgttgagactcctgacagaatgccattgctgaaagaaagcatcagcacttgctcaatgttgctcgagccctatattttcaagcacacatgcctataaaattctggggagaatgcatcatgactgctgcctttttgattaatcacataccttctccaaatttgcaaaacaagaccccttatgaattgttattcaaaagacaacctgactatcaacatatcaaaaccttcggttgcttggcttttacctccactctcactgctcataggaccaaatttgatcctagagcacgcacttgtgttttccttggatatcctcaaggagtgaaaggttatcgactgtatgatattaataatcaacaaatctttatttcaaggaatgtagtctttcatgaacatgtatttccttttcataagctgaatattaatagcagtaatgtcgatcctttcattaccacggttataccttctaataacatttcaaaaactcctattggagattatcaacatgttgctactgatgtatctaatcctagttccactgcagaaaacacagctgatgtctttactgatacagcaaatacaccagcaaacactgcagcatcacgggaaactacaccagcaccagaaaatcttggtgcaccatcaccagacagtcatggtgatcctaacacagatgtccctcgcagaaccacaagagtctcacggcctccatcatatcttagagactttgaatgctattctgccatacatgacaattcttctacacctcatgctttaaataaatatctttcttatgctagattaactgaatcctacaaggcttttatccttgcaaatacttctttaaaggagccacaaacatataaacaagccattcaattttaacaatggcttgatgctatggatgctgaactcacatcccttagaaacaacaaaacttggagtgttgttcctctaccaccaaataggagggttattggttgtcgttgggtctataaaattaaactcaatagtgatggttcggttgaaagattcaaggcaagacttgttgctcaaggttatacgcaacaagaaggccttgacttctttgacactttttctcccgtggccaagatggtcacattcaaacttctccttgctatatctacaattaaacaatggcatactttacaaattgacataaacaatgctttcttaaacggagatctcaatgaagaggtctatatggctataccacctgaataattgtttctaatggtgctcctacaggttctaatcttgtatgtaaactccataaatccatttacggacttcgacaatcatctcgacaatggtacaagaaactcacattagccttacttcaagaaggtttcaagcaatcaaaggctgactacactctctttacaaggggaaacgatgacacattcattgctttacttgtctacgtggatgacatcgtgattacaggtcccaacattgaagttttgcatcaacttcagactactttacatcaacaatttagactcaaagctctcggacagctcaaatacttcctcggatttgaaattgcccgttcttcacatggcctattcctctctcaatggcaatacacattacaacttcttgaagataatggatacaatggctgcaaaccagcaaaggcacctatggatccgagaaccgagctcgacgatcaacaaggagagctattgacaaatccttcagcttatagataattgattggaaagttactctacctcactctatcgagacccgacatcacatacgctgtcaacacattaagccagttcatgtatactcctagaactactcacatgcaagctgtttctcacttacttcgataccttaaaggcagtcctggacaagggctgctttaccccagaaattcctctcttcatttaagaggtttttctgatttggactgggcttcttgtccgattacaagaagatctaccactggattctgtgtcttcataggagattgtttaatctcttggaaaac

SEQ ID NO: 307260 - DNA, 2928 bp, Cannabis indica
aaaagtttatggggcataatttagtacgtgtcaaagttcagggagtaaaaatcctaattagccatgtaaaaataaaaaaataacataaaaggttaataaaaaaatgtcatatatatttgtaagacataatatattttttttcaaatttagtgtatatttgataagaatagaaatttggagcaattttgtttaataatataactttggtgacactaaaaaaaatattttcttgcaagtttcatgtttcataaagcataccgagaaatgtgtcagcttgttgaatatcaactcaagtctcacatatcaaaagaataaacaagaatatataaatattcattagcatgaggttttttagaaggtactcaaaaataaaatatgtgcaggccacactcaaaattgacaatattatactaatgtgaaagaaaatgaaactataatacaatttttaagggagacatttgaacaaattgggagaaaatattcttacaaatgtgagtcgccaaacacgcagaacacaaatatttggatggaaaaaatcccaccaatattttgttcaatctttttgcaaattcgatcaacctcattcaaaaagaataaataaaaattctcatatttctattgatttgtgctcaaacctagagtgctttccactctgctaggatgaagcatatattattactattgattatcaatatttcactaaagatcaagttcatttttttttgagtgtaaattctcttcccataaactcgcaagtcacaatttcttttcataacctatcttgaaaggaaatatttaaataacacgaaattgaaagttcttcctaattacgaagtatatatatatgagaagaaatttcaactttgtattatattttaggatgcaaaaatgtatagtgttcatattgtaaatagagttaagaaagaaatttgtgataagttttcattttaaaagagagaaaatttgtagagaggattgaaattggtttgagaaattgaggactctcaattaattgtatattgtaaaagtacttttcaatatatatataaatttttgtatattattaatttcatagatacaacccacttctttctttaaaaagaaaaaagaaaaaaggtcgaggtgctagtccacattataatttatataatcatgatacaaacttgagaagaatgagctataacaccaacaacaacaacataaaatttagatataatacccaataataacaataatcataataattaatttaagctctagtagtggttttcaatttgtagccacaccccaaaatataatcaataaaggaattaaactcataagaatcattgagatttatggaacgatcttcatctttatcagagaacttcatagcttgacgagttctcctagagctccatttggatccaagagttttgaacacttgcttggcctcatccttggaaagctctccattgttgtctctatcgtattgtttaataaactctataactgtctgtctttccatatgagctttctcagaccctttctgattacaaaatgtggttccaattccaaatcccataattaattggttattgaaaaatataaacacaaagaaaactcttgtatggatatataaatttgtataattggaagataattataagactctaccatgcatatatatttttatttataggggtatggcacttatctctttatatgtattatggaaaaattgatgttgaaggaacttgatatatatcccttttaaatgatgataagaaaaaacattggaatcggccttttgacacttgttaagatagattctcttgccctttcaaaaaatgagattctttattctttacaattttcaaaagatcatgatagtgggtgcataacaaaatgagctaattccataccaaaaaaaaagctaattattaataataaataattaaatcttttaaattaattaattgaataatataaaagataattaagttatgacaaattatacacttgtgaaccctacaataatttttccattttattttaaatcaaataatgactcaaaatttaattatctttttctaatttgtttattaattgaattaatccatttaaatactaattttaatttaataattataaattaaaatatatttattaatttgttaaataaattaattaattgaaacatcaatgtgatattattctagatattgcggagaccatggcctataaaatcaagttccaataagttatcttaaaattaaacaaataaaatttttaacttattaattccttgtaactctagtatagattcggaattaaactcataattacatagaacactctatacaaatgtatagatacgttatgagttattcattgtttcaatcataataatcaatgatcttctataaacggtttacattgagtagagacaaaattattgttttaccctccaatgtatttgatcctctatcatatatcgcctttaaccaagctcaaaggaaaccattattttacttctagacaaatatagaagctataggtgtccatatctataattaacgttctcacgcaattgaactattgcgttttcaagatgtaagtatgaactagaccgacaggtaagctgataacgaataagttaaagaactcaagcaatacaattagctgaccgacaggtgatgtaattgattcttacatgaaaaaagtgagagcataatatcatgatgactatatttttatagagagaagcaaataaaataattatgtaatttaagatgatgaaaagtgaaggtttagagcaagagacatgatgtcatgatttacagttatggtgttgtcatcattcgattatgtaactcattatcatgtaacaagtaagtttattaatcttgatattataagggaaatttgattttctatacttagaaa

SEQ ID NO: 307261 - DNA, 2116 bp, Cannabis indica
tgtttttttagttgttctactgttgttttgagttgttctgttttgtgttctattagtgctttataaaaacacagtatttttgaaaatttttccgtgtgacagcatttttgtaaaagttaacacaaattccagtatttttataagtttcccttcaataattcaaaaaattttatcgctaaaattcaaacttagaaaattaaatacaaataaatttattattgagagagacattttagccgagaaaactctaatttcttagaaagtctcctacaaaaaccgataagaacaaaagatatgacttatgagttgatgcgttatagtttatacctctcactacctaacttatccatatcgttgtcacctttaccatatgcaaaaaccattgattatttcaccatgaatagtagtcataaataaagatatatagattgcttaatttatagtcataataatagttccctctccattgtattgtatatgattaattaatggccgatttcagaggtcaacctctctacaattgtagaaattgcagaaacccaattgccctccgtgatgaccttctttccaaaaaatataaggtacaaaaatacaaatctctctcttgcttaattttaataacttataatcaattgttgaccataaaagtcatcatatgtttttttgggtcaactaaaagaaaataaaacccagttgaaatttgattttgtttaggcaaaatctgggcctgcatatctgttttctcatgtaatgaatataactgtggggcctaaagaagagaagcaattgatgagtggtgtgttcactattgctgatatttattgtagaggttgtggtgaggtacttggttggaagtacataatagctcatgatcatactcagagattcaaagaaggcaagtttattttagagattgctaagattgccaagttgtactaaaaatcaaatcaaaacttgtatcaatcttcttctaaaaactagtattgtatatatgtcaaatcataaataatctcactatgtggttgtgagagttgttcaaacttttctttgtacttaatatatatgatgttatctaagttatgatatttattattgggagaggttctatagagacaattttatactttaattttaaacattaagtggggtttggttaaaagtaatgaaatgaaataaaaatataataatttttattttatttttttgtttagttgtattttaaagcattattttggtagaataataattttattttgaatttgaaaaaatggttatattaatgcaagatgtgaaaaattttaataatttttttattaattattttatgtattttaaaattaattctactccatttctatttatgttcttatgttttcattcatctcatctaaaggtcactcaagtttaatctatgtgttcaaattaaaatatatattactattaattaaaataaaactcatatttgtaacaataaaaaaaaaaatccataaatatgcaggccaaagtgatcttaattgaggaatctaatgccattatctaaaagaaatttttcaaaagcttaaggatctaattaatttttctatttcttgtgagattggtaatttgaagtttgacaaattattatgcgatcttggattagtataaacttgatgcattttttggtattcataaagttaagtattggtgaagtaaaactcacaataatttctttacaattaacagatcgattatttacttatttaagaaaaatcatttgagttttagttaaagtggattagttggtattttgtggtgttatagatatgaaagaagataagaatatgtcattaacttttgggcactatttcttagcaactagtgacatacttataggtgttaagaagtacttaacgaaaaaattaaagtgacatttggttggaggtaatgaaattgaatggaatggaaaggaaataatttttatttcattcttttgtttggttgcacattaaagtattggaatattattccaatgaaatggcctttctactattttgatggaatgattattatattttgaagtggaaaaaaagaccattccaatacatgatgagaaaaaatttaataattttttttatgc

SEQ ID NO: 307262 - DNA, 1754 bp, Cannabis indica
ggaaggtctctcctggttcctaaggaacctggttggatagttttccagtagaccctccccgatctgtcaactagtctcccttagagtggatctctgatgaggtcctggcctctcccaacagttttttcactgattcgccttatcaggtctctagcttctctaccgtggtggtccagctctgcctgatgagatcataggatgtacacttggtcatccatccatctcaaaaattcgcgtctctattgtgctaatacatcataatcaacaacgtgtggttcttcactttggctgacttggtacacaacctctctaagtctggctaactcaagatcttctcccaattctacatgagactcgctaatagctggctcaccgattcctagcactgtctctccagcataataccggggaagaatttcagttgttgtgcctaggggctgctccacgtgggtccttccttcagtgggaggtgtcagtggagggtcctccctaggaggcatgggccggttgttcagatccaccagaatggttgtgtccaccaggctagatgtggtggccagattcgttgtgtttgctgagatggcaggagtggctacatctattaggtttgaggggatttcaattgtagggtcttgaagaagatacgatgaggcaaatattgtagctggagttctcttcgtgttaaccatgacatttgatcagataaattatcaactcactctcaaagaaagcaccaaaatattgacctcaaatttggccaaccaatagtagagtcgaatttaatattgatgcttgccacgtgttacaaattagaataataaagtaaatagacataattttatagaggtttggcccccttagttagcaggtaatgacctactctcccttttagttgtatggataccgagagataatactaggaaaatttacatcttaggactttatttataattaaattacaaaaatcttgtgagccaatttaatgtctaatctataccgttttaggctgcctttttaaaaataattattcttttaaaggactttagtttctaattgtaaatatctaagttatgagggcaactaatgatattaaaattttaaggcatgctattatcaatcaaccaattacttacaagctcctatcatataggccctttaggggttaccaaatgcctaggcaccttgaattgctctagctcccggactaggccatccatatccgcgaggactcgctctacctccagtgcatcgccaagttgcaacagtttttggagggccacatattgctggaattacgaaaaaatgcccagaagaagtacctcaatgaactagaccaagaaggggaagtatgtgtccttgtactaattctagctcagcgtccacagatgatgaatctaccagtcactttaacagaagagggtgccatgcatttacatttccctcataaagatccattggtgatcgatggccaaattaccaataagagaatgtccaaaatacttgtggacaacggaagctcagttaatatcctgttcaaggctgctgtaagaccctgaaattaagaaatggattagcaaaaccctaattagacaattatgaataattgaggaattatattattatatagttcagtatatgtgaattaatatgaattttaacttgttaagaccccgttggtgagccaggggcattttaataattatgacccgagaagggtaaaatgataaattaatttaattacgtgcttaatagaa

SEQ ID NO: 307263 - DNA, 2341 bp, Cannabis indica
cacacagatgctaagcccattaacaagtgatcgccaacaatatggactaacacagtaaagaactatctaataaacccaagttttaataaaaccaataaaatttaatgtaagcccaaataaaaagtctaacaatgaccactctattatttattttctcaaattaaaatgttcagaaaaccatataatatatgatattttaaataattatgtttcagattttacacttttattatgtgcgataatataattatttgtatatgattctaagactatatatttgataacgtttctgaaaaatttatatagaaaaatattaacaaattaaaatcatcgtaaaaataattaattaaatgaaagatttttgttctttctttcatttttttgtcaaagcaaaagttcaatacaaaagaaaagacatgttaattattacagactccaacgtcgtacaaggaatactccttctcaaatagcatatgctttttcaattaaaacattcttagctatgaagtgagctgcccaattcgttgaccaaggatggtactaaaagcccttaatctcaatcgttgtaacttaagaacgaattgtagtaacaagcaagtttaaatcccacattgaccaggcgatctattgagcatggtcaccacatgcacgactgcaatctgaaacaataacacaacttcttaatcccttatcatatccacagcagcaactttaaattttataaccataagttttgcaaccaaaaagggaaaaggttttaggaagaacttagccttggaacctaaaaccatcccttgattatctccaatcaccacaccattaccgcaccactcctgccctctgtccacaactgcatctacatttatactaagatcatctcctccgccgactaccacttctcatcctgtttctcaatctttggtttccttgcttgtttagactccaagaatttctcgatgagcctatccacccgctccaatccatagaaggcatagaatgtttaaggacatcattattatgacggtaccaagattgccaataatacaaaaaaaactcaaagttgccttaaggtaaaatgttggctatcctagataagaaagcaataggaccctcatcattacattgtacaagtcgcttgatatcaaccaccacaaaccatttattttttgacaacccaatatagtatggaaccaaccctccttcacatcttcaccacatcgatcacactctactttatcacgacttttcactgtgaacaacacactacttgttcggagccactcatgacaaaactttcacatgaattatttgactttaggtagcacattcaacccccaaagctttctttaccacctttctctcaaatgcataagagaaacttcacttctttccctttcctccattgccagttgataaccactctcaacagagtaatcaccattagattgaaagtaccatataatcttgtccatactatcaagtggctctaggaccatcctcaaaataaaattttaatcctcttcattgaaaacaacccttataaactatatcccactcactcgaagcttctcaaagatctattacacagagcccaacaagaatacacagtttatcatagaaaaggaaggacttgggtctcaagatcgatgggtcctcaacaatgcaaaaagattcccaaaaactaactatccatctatagccttgcaagagaatctccattccccataacaagctcttccacatgaaagaaggtgaaccaccaagttttgctccaaagaagctcccattcctaccataactatgataataaactttagacaacaaagactatggcttttgcagtagcctccatatttatttggcaacaagagctttattttgtaacttaaaattcttaaacccaagtccccctaatcttcttttgacaaaatattttctacttgcaccaatgtatcttactcttctattccgtaaatctccaccaaaattttccagccatactatgaatgttattaataatattcttggaaaactaaaaacggcccatagcataaataggtattgctaaacaatagatatgataagtactaggggtgttcattggatcacatccaatatttttaggcccatccagatccgatacatctaattatatattggatgttagattttaccatccgatccgatccaattgatttcagtcatccaatcgatccaacatctattgaatgttggattggatcggttctatccattggatatatttcatatatatttattggttcaatttgaatttattcaatattttagactagtatttttggatcggatcggatctatc

SEQ ID NO: 307264 - DNA, 973 bp, Cannabis indica
ctaaatattggggtccacaattaaattaattcacaaataataataaaataataaaataataaacattagtgctaattgcttttactaatccaaattactagagcggtcattacaactactatactttgtaggttagtctaatgtttatacttgctctagcaatttcttcttactaattttattgcatatatatacagttgcaattgcttatgcttacctcttatttcgcatacttttgaaagctcagaactttaacattgaaaagacgatccaaatgtgggaaaaaaaaatgctaaaccagagagaaaagagtatggaataaacactattttagaggttagatagatgttaacattttacaactctataaatatatgctagagtgtatcggtgtagctgaaaagcaatgtagatttattatttctgacaccatttttagtttgtgagtcagaaatgggtattggacaattactaaaaattgaagtacatacgtgcattgcattgtaactaaccataattttctttaactcatttcatttttatgagtattctatctaacagattttgttagtaatgtcaaacacgtgtccatttcatttcattattgagaatggaaattgttgattaaattatatataatatcatatagttactatttttaagcactctctacctgatttgtgaggcagtagaggaagaccacagacatctcttctttgaatgtcttcttttgagcaggttcttaggcaagcttggtagcagttggtctcggtcttacaatgactggatcgtgttgattaaaggaatgaagaaaggaatcaaggctaagcttgttgcgatattattagcagtcgcagtttactacatatggaacaataaaaatacttgtatttttaacaattacatttacagtttgagacatattgtaaatatgattaagggctcgtttggaacgccgtattaggtcgtattg

SEQ ID NO: 307265 - DNA, 2051 bp, Cannabis indica
aatcaatcaagaacaacaatgataaatattatatttcattccaaaattaaattattaatcccgtagataattacttattccagtctctctattacaataattatgacgaaacactaaatagttaaatatttttactaaacaataaatttacgaaatatgcaatctatttaatctagaaaaatattaaattctataaagatagattaatctaagcaaaaatttatttagcatataattcatttaacttaagttatattctttatcacaaataataatacccgtcacaatatcattaaaagtaatttatcacttaaatatagaattctaaactattaggtgaatagaaattctaataatgatagtagaatagtgtaaaacttaatttagtgaccgtctaaataaaattaaaactttaatcataaaattagacatagaagaatataaacattttaatatgaaggaataaaataatcaaattaatcaaagcattcaaaaaattatatctcggattttaaaataactcttaacctaaaagaagaatactccataatctcaaacatactcataagcataattatatgttatgacatgtgattgaagaactagttagttggtcaactctttcctaggttcactaactgattctagtaagttagttacctgggctccaaggtaattaaatctagttggtctagaaactcatctactcgagtcactaggtatacagtgatgtctaacttccttagagttaatgttttctagttccattaatgcaattactgagttgagagtgaaaagaaaaaaacagggagaaggagggttgtacatggaaagcttgtgtatctgatcaagctattctcaatggtgaggtattttaaggagttaaactccattgtcttaagctcattgtcaaaccgcaagctctctcttccattcttttgtacaaattgatataatcaataaagctaagtttttctctcaaaagttttggagtattgaattctattttattattgttcattgtttatgacttatttgatctagttttagtttattcttgattatggtgatcgaatcacaataaattggtaccagatccataggctattgatccaagattcaagaatatattattcacactttcgagaattcaaccaagatagcttcatcaaagtttaaggtggacaaattcaatggctccaacgattccagtctttggagaattaagatgaaagtacttttggtggtttagagaattgtagaagcgattgattagaaattgcttgatggattgaaggatgagaagatcaagagagacacagaaacaaagtctcacagtgcaattcttttgagccttggagatgaggtattcagggaggtacccaatgaagaaactgctctgagattgtggaggaagttggcttcaatctactttaagaagtctttggtaacaagttgtagatgaagaagaaactctacactgtaagaatggatagctcaaaggaactctacactgagtcacctttgggcctcttgtttgggtttggctgttagacctcgtcggcctgggaggattgtcatcattcagggcattgtcctaattttgaatgttgggaaaattggcacaacatttatcacgcctttggcaacaatgtcatcatggggcccactatcggctccacatcattcttgctagaaaatgactgaccactctgggatcttgaatggccttattaagattgttggtcgacatagattttaaccataggtctggactctttcatcctaattgtacaggttcatttgccctctattgtgaaattcttaattacacaagtgcacgtaggggtgtatgtcagtcggtttggtcgggttatagcatatttttattaatccaatataaatatcgggttgcaaacatttaatagtaaccaacctgattaaaaattaaaaaaagttcaatccgcccaataattttgtcggtttagtcaggttaatccgtccaaactgttcttcactttttttataattattattgttagtttctacta

SEQ ID NO: 307266 - DNA, 2009 bp, Cannabis indica
gtatttcttcttttacttgtaaaactgtaataataagtattacagagggatctaatttaacattttatttatttatttatttaaaaataattttgtgtattatctatagccaataagtatgaacataattttcatttatttttttaaccttcaaaaataaaaattgctgaaaaaaaagttattttaagtagttgaagaactaaaatcacctcaagtaatatgaaaaaaaaaaaagagattattagttacatctataaaatataatccttttaatgattaaagtttttctatattacctattaaattaatatatgcatattaacttttaattaataataatatggtgttagaattttaaaaaaaattaaatgtatgaacaattctaatgcgaaaattgtaacaaaaattaaaatgtaacaaattgtgtatctctagtcattgatgcatgaaattcctactaatttgagagaaataaattagtgggatatgtgattctaagttctcgaccactaaataaatgttgaccattaatattagaatattttatcaataaataaaatattgttttgatatattaaatcaataaatatattaattaataatcatttactttattattatcacacatatataaatattttaacataaatttttttttaggtgagtttagatggattaactaaatcaaaccgattaaattatcgatcgagttactaattttattatttaaaaaaaattaagcgagttgcatttaaaattttgcaacctaataattacattgaattaaaaaatatatactataaattgaccaaaccaattgatgcacaatcctactagaaggaagaacaaaaattcaaatctttctattctatatagtatttgaaatttaaaaaaaaaaataaattgaagaaaatatcaaaataacaaaataccttattacctaaaatttaattggacggtagagaaagcaaacaatgtcaaatatattctagaaattaattaaatcaaaattaattaatcattaatagcttagcctccacaatccaatgtcacctcctccattctctctatacaactatattattaattattattaataatattagtatttattgaaaaattcaacatctacattctcgaaaagaagtctacaagaaaattttttaatctaaatttttgtatattagtttattatgttatagttatttaagatattttgtaaaattttaaaaattttaaaaaaatttaacacgtcaaaaataaattcaaacaatctatttcacaagcatataaaataaaatagtctcgcttacaacatactatttgaacactattttcatcgtgttaaatttttataaatttttcaaaattttacaaaattactcaaataattacaacataaatgaccacattcttaaaattttacaaaatattttaaataactacaacataaataactatattatcaaaatttaactaaatgttataaataataaacataaaatattctaaataactaaaacataaaagataataataaaaaaaaaaagaattacctcttatactatttttttaaccttcttttcaaatttacggtttggatttcaaaagtggttgtaacgctaattagaataagggtcttatacgattttttgttgcaatttaagttgcagcgctagttacaatacgagtttttatgtagaattttaaaaaaaattattttaaagtgtaaaaataaaaaaacccataaaaaaaatagactattttttttttcaaatatcaaaatacatcatcagggaatgtagaatttttcaaaattttatttacattaataaaaaattaaattaatatttattattattattattttttttaatttatgaggtttcgtcttcaagtcaaatccagctccgccatgtatttaaactgattcttcaaaaaaaaaaaaaaaaaaaaaaaaaaatacgtaggagtgtatatatagatatatatatatatatacatttctc

SEQ ID NO: 307267 - DNA, 1171 bp, Cannabis indica
aaccatgcaacattaaatgttatttctgatctatattaataagtaaatctgattatattgaaatgagttttatttagggcataaaacccaacagtctcgggctccaatcttgtccaaacctatagaagagaaagatatatacctctacttggcttttttggaacacgccatcagtgcgacactagtctgggaggaagacaaggcacatcatcctgtttataatgtttgtaagagaatcataggtgtcgagatccgatacccgttgattaaaaagctagcctactgtttgcttgtcttgtctcaaaaactacacccgtactttcaagcccatacaataaaagtcttcactaatcactcgctctgcctagtgctccaaaaacccaaatcttccaggtggttgcttaaatgggccatggagttgagccagttgacctccaatatgtcccttgcatttcaataaagggacaagctctaacagacttcatcgtggaatgtaatgaaattgagataaatgccgatgatatagaaataattgtacccaccttgaaggtgtatgtagatggagcaacaaataaaacaggtcaggagcaggaatagtgttaatatcacctgaaggactaaggcttcaaagtgccttacagttcaagtttacgcctctaacaatgagatcgagtatgaggctgtacttgcatgattaaggctgtccaaagtagtgggagctacccatattgagatatttagtgattcctaattggttctcaactaggtgttggagaatatcaaacccgtggagaacatatggcttcatacgtctcaacattgtgagaattaattaatgaattcacaggctaaaaaattgaacagatcccaagagaaagaaaatgcccaggctgattgcctagcaaagttggcctcatacaaagaagtaaaagaactagaggtagtcccaatcgactgtattcccaaagcctagcatcttggccaaagctgaggttaagttaccactagggacccatgtggatggacctcataatcaagtatttcacaaatggataactattcgtagaagattcgctctgaaaactttagtatcaaattcctgttgggttttattgcccgtaataaaactcattacaatctgattgtatcaatttagaagtgaagcatgttt

SEQ ID NO: 307268 - DNA, 1549 bp, Cannabis indica
tactgagatagcttatgcggcctaggcaggggttgtatacagcaatgggttaacagaaatctttgtatatatgagaggaagtgcttaacaattgagcatattggcaagctgataaatagaagcatcaaagtgaggatcacaatggtttgtacagggaatcattcagctagagatagattggcttatgagtttattgatcaattgtaattgaggaattattgtctgttttggccttagttggctttggttgattcaatttgtttgtaacatgcttgtcttgattaatgaaaatttcttttttgaataaaaaaaaaaagtaattaagctaagtgacaaacctccacagtgatatcattcacatgaacatggcaaatggggaatcgttttccaacaatttcacaatgggcaaacgtattctttacctgaaaattgttgaggatgccatacatataatatgattcaacctagtgaaaatacacaaacaagtttggaaattgaatgaatagaaaactgacctctctgagttcagctgaagtaataatatcaaaatcttttggaattctcttgaggataagatcacgaacgcaaccaccaacaaggtacacttcatatccttcaatatcaaaggaaaaacaaacaagtactcaaatatttgttctttccaagcaataagaatacaataatggtaaaatttacaaactacaaaccttttttcctaagcccatttagaaccaatttaatgggtttcgaaatcgatgacatcttaacacccaactccttggaattgaacttcttccattctacaggttccttcttcttatctttacgaggagtagcttcaccatcgttcttcctatctttactaactggttccgcaaccgccaatttggagttgctgtaccgcacctggaaatgaattcatataccgtttggttgccgagaaaatatgaaagaaaataagaaaaaaaagatggaaaaaagaaaacctttcgaatacacaagacaggaaaatggggatgaacgaggtggctcctccatgcgactactccaaatgcaaccgtcattgagatttcagcatgccatgaccagagaaagcaagacggtagagaagctaagtaagcttactccgttactggatgagattagatggaagaatattggggactgtatatttgaaatataccataattatacgtattataattttcaaatgccatcacaattggtattattgatgaccagtatttttcacctgtcttataattttgttggtataattaagtattggatatcatataattttttttttgaataagtaatcaacttcattaactcaagagcaatcgctcgaaagtacatcttcaagttccgaagggacattatccctcgtgaacatacgatcagcaaacaaccgagactgacgtgccataacatgtgcagctcgattagcagaacgtttaacaaaccgtaacgaaacattattcatagagtctaacaaagacttacaatctttcacaattaaaccaaatcccgaaaacatctcaatcgg

SEQ ID NO: 307269 - DNA, 1323 bp, Cannabis indica
gtaccacaaaagagcaaagagttttaatgcagacatgaaatcccccttcaaaatatagaccacttattataactcatcatctcttggctccattccagctaagtcattttcagctttccatgttctaaggctcacaacagattaaatgagtctgcaaaaagttaagatttagtgcctcatacggctctgtccttctgctacaccctaaatatatatatatatatatatatatatttatagtcttttctttttgtttttctctaactcctaaaaacacccttttatctaagctattagctagtacaaatttactacttaaacaatataaactcatgtctcaggtatttttgttttgaatgtacctaacactaggtcatattttagttgtttggacacttttaatataatttttttttgtatggttttaagttctaacatgatgaccaaatttaaaaacctactctttatctatatacagttattggggtccacttttaagtctctttttaactaaacattatatcaactcatcttagctcagctcacagtcccttttaagaagattaaaatgtaactatttttggtttggaattacatttttgtatatttataaaaagtaaatgtttagttaagagttgatatgtttccattaccaaacttcactatccaaatcagttatattgggtccacttgagtcttaaaaactaaacattacaatattaatttataatccaaataatgaaatcatgttttgatagccgtatgaaatcagaaatggtcccaaaatattagaagctccaatcaaagtaagatatatgagttttgattaatatgaatgatgtttatttattttcaataagtactgaaaagtacaggttagatatgcttatacttgaaactgatcataagatatttttttagtaacataataataatcttttgataattctttacaaaatagagccttcgacatattcaatactctgtctgaaaatctacatagcaaagaattataatttttacaaaatgagaatttacattataaaagtttaacagtacatttagctcggaggaatagaaatggaaattaaaatataataaaattttatgtataaataaaattattattattttcttttcaatctttcattatgaaaatgatctttttatattttaatgaaaggtgtacttttaatgggtattactcatgaaatagtaatattagaaaaaattgagtttttatgattaattttttttatttaattagaaaattttctcagttttatattatatgggctgtgattgttccatcagctaaaaaaa

SEQ ID NO: 307270 - DNA, 1784 bp, Cannabis indica
taatattatacatttatttagtttaaaaagaatatacaaaagaaattattttagattaataataaaaaaatcaataaatcactattatgtaacagtgatgatttaatgttgaccaagaaataaaagttcacactactacaaaatagggaatttcggtcagaaaatcaattttcttttcgaggatcgacgggaaaataattatgtgatggtttaaaactgatggctatggtttagaattgtcattagtttttaacactcacaatgtaacgccctatttgcttaggcacgctatagtaatattttatttaccgtgcatacattttctaatcaaagggtttctcaaaaattttgtcaaatttaaacttttataagtatataacctaacataaaagttgggatcccatatttaaaatttacaatcgtatacaaaatatatttataaatatgtcgtactgtgactacaagataaaggcccaagtcgtcccaatactgaactctccaagtccaaccatctagatatatacaatcatccccaagccctgtactcattggtgctcagtcttcacctttcttttacctacacatataaacagtatatgtgagtcaatagactcagtaagaaaaacatatagcatgtatcatattactgactcgtatttaggcgcccatacacctatctacaagacttaacaaatgattaagaacattcttaacatttggcactatcgattatgatatcagccactaccagtactatgatcacattgcgagcccagtgttatgttcataccgctatgatagcatcaataacacccaaaagtataattaacgatgatatcactcttactagtactatgcttgtactgctggcccagtactatccttgtattgctatgataaaataattaatactttatggactttaatatcagtcttaaccaataatatgctcatactgctgacctgaaactatggttgtgccattgtaatatcaattcataatattatactgtattaatgtaccccatatcgttaccgtattagtgttcatagtatacaatcatataatttagcatgcatattacatgcacacacatatacatatacatatatcttcggctagtcttacctcgtttctaaattcaaatgtgcatgttgacttgaatggaaattcatgcgctaaacggaggtcctatgtcataatataaaattgataagtgtttactctaaaacacttgtttaatactcatatagaacctaaggttttgatacaaaattatatggtgaaaacacccttaaataaatacatattttggccctaaattacattccatacggtagagctcctcacaagctttaaaacaatatatagaacatctaaaatggacatttacatgaaaagttatggccaaaatataaaaattggtctccttggtaaagtcctgaatggaagcctcccaatccagaagccccattccggaaactccattctgaaagctttctcattctggaagctctccctatccagaagctctcccactccagaagctcacccattctggaagctcttacagggcaacaagggctcaaaattttccaatttttaggcccccaaaactagctccctgcctaaccaaaagctaccaaacttttcagaacagtagtttgggctattctaaagataatcacaactcaaaagcatcgaaaacaacattcaatgaaattcaccatggatgagcaaagcttgagttcataaaactcaaacttcctcaaatcttgctaca

SEQ ID NO: 307271 - DNA, 1271 bp, Cannabis indica
tttattttctttgaaaaataaaagtccacattgaacctcttaaatgaaagaaaagaaaaataaaaaaagaaagattttatatgtttattttgttaatgtcgttcattttcacttctcctatttttctcctatctaatagaagaatgtagttgaaaatatgtaagagaaaaaagaaaggataagtggagtgtatcaattgttgtacaaattaaatttatataacataacaaagtgcacataattattacttgtgagaaaaatttcttcttctttatgatgacaaaaggcataaaaaaatatataaaaaaacaatgatctcaaggtaactttacctggtcgtgctttccaaaacccactcattccttcattatatatgttttattatttttatacacctcaaggtaaaagaactagactatatgcaaacctttatttataagttgagagacctacacacatttatatgcattataaataatatataataattgtaacattactaccattttgaagagtccaaagaacacaatctgatcaccaatgttactgtgttagtgaaaatatgatgggcatttgttcatgtacacacaacaataaattggagggtttattgtccttatatattattttcctaaaagaaaaggtatggttcataaaaaggctgtcattatgtggatcaagcacacagagttggagctccacaaaaccatgatggacatatttcacaatcaagtttaccttttgctttttacaataagattattagactagttagctttgtttttgtttttgtttcccctttattttatattttttaactttatatatttaataaaataaaaaaagctttacccaatgtcaacttcaagttggccccacaaatgtgcatactgcagggtgtaaaatggacatggatgccccaaaattgtttctctagggctctctatgtctaggcctatgcagtttggagttttgtttaggttcaaagcaacgattatcacactcctagtcatcataatgttcaaaatgtaaaatatatacactgggttatttataaacaaatatcatgaagaactaataaaacccttttgtgcaccttttacatgagcgtattttttttacttagaagaaaaaaaaccttaatatggacaaagacccaaatcaaacccataatcatcacgggaggcacatccttctctatatgtaatatatatatatatgagtgactattcaatggttacatttttattgtaagttacatttttctttaa

SEQ ID NO: 307272 - DNA, 1233 bp, Cannabis indica
aattttattaactaaaaaaaaaaaaaaaaaaataatataaactatatatagctaattagccgtaaaagatttctttctaacaagatgaaaaagaaaattaattatatatattactatagagaatgaaatgtatttacaaagaaaaaaaaaatcagagataaatctaattatttgtggagaaggagatagctgtctggaatttaagggtgttttgtaacattgtttgtataaattggaactgggttaggtatatatgcatgatatatataaataaataaatatagagagagttatgcgcgttgactagaatattaatctagctatgtatattatagaacacaaacaaacaaacaaaaaaaggtgaagaaaataaatataaataggattattcatgaaaaattaattgtgatgataataaaacataaataagaatagaggaagaggaagaggaagaggaggggcctatggtatttaagaaaaggaaacaaatggtccatggcagtgtctgcagtaagaagagattgaaagaatggactaacgtgagggtcatgttagttgtcaccccaaaggaccaattagactgatatggtccctaaagctatttgattaattggcatggttggggggcacttaaacgaggctttcacatgccttaataacccttcttctactacaaaccacgtgccccctctcctctattatttaaaatcctcttttttttcctcttaattaattaccttcctcttcctactcatttaatatccaataatagttttgcggttataaatatatatataattcttcactatatcaagacacaagaccaccatcttgcatgtgtactcaagcctctaacgaaacatatttataatatatatatatctatacatacatatatgatcaggctttgaccttaccggcccactagtatttaattataagtagggtacatcgaattaattggtttttcattttttattattttatcaatattattctagttttgacactaataaaataagaaccaagagtttgtgacaacatatatttaggtagctcaaacttctcagtttttaactagtttagagaaaatttctgccacttatttatgtaagaaaaaataatccttgatcagtctaatcagatttgagagtttggtagagttattggggtgtaattttaaaaactgaagaatatttgtttcttataatatataccatacgtacgtaattg

SEQ ID NO: 307273 - DNA, 2158 bp, Cannabis indica
ccacatcagtacgactagagtactgagtataggctggattcgcagttagtcatacattgtcgagaacgttcttgactcagttagggttatagtcgggtgtataggcacctggttataacccgggatattagtatgttttatgttatgcttttcttactgagtctgtcgacttacagtgctatttccatgtgtaggtaagggcaaggtaaaagttgaggagccgtgagtacgagcaggtgaagattgtacatgtcggggcggttaggcctggagcgtacgatctttgggacatcgaggcttttgctgtatagtcgtttggcgacataacttttgtatatgaataccaaacttttataaatgtattttgtaaacgggatcccgggatgttataatgtattactatatgtttttaattaaataagcaaattttaattattcacgattttcaataacctcgttgattagcgacgagctgcacagtacgttaaaaatcacgttgacacgcctatactagttagggtgttacaatttgaattttattatcatttgaatttatttataattgataaatacgtatttatttttataatcattttcaaataataaagttttttaatattttgtgttttcgtactagtctaaatgtgcttacgtgtcgtgcttttcgaatttattatatcctatcgtgtcatgcaaatttgtaatatcgtgctcaaatttatttttttttttatgtttgatcgtactcgtgctaatttcatgttgcatcaaaaaactcagttcgcatatttacagttctaatttaacagccaaacaagatgtattttccactaattttcttgtaagagaaatactaaaaatactaatagaactagtcattatgttatattgttaatggttaattaaatattaaatcatatataatttaatatttagtataattgtgttaagggacatctcaatcatgctaaaagcaatgttctagtaataaacccaaaagctatgtcatttaatacgtaaacaacccaaaaaggaaaaagataaaaatatagaaaagggtattaaatccatgaaagcttttgaattgaccaatatgactctttttgtggtacaaaacagaacagtcgtcctttccaaaatgcaaaaccacaagtctccaactccggaaatttcccaaaaactaaagcccatcgcttccaaagggtcagcctttagccaagtcaccccacaatcaccaacaccacttgcatgcacatttctgttggttgacatgaaaagataaaaggaaaatatatgtagaaatataaaaggcttttcttaaaaatacaaatataggtaaagttctaattaagtttacggtcttttatcttttaatgcaggaatgaataagtacttttttttttttttaatttgatcttcttcagatttcttgcaagtatagtccaacatcctccatttttactggcaacctctatctttagtgacctccatcgttagtagcaatatgctatcttttattcgtaaatagtcaattccttccataaaatccaaatcactattctcatttttaaaattttcaaatttctttgcatttaagttgaagtgtttgaagaaggtaagaattccaaggtgattgtgttctttgtttttgttttgattatttgaaatttaactttggtgaaacttttggttttggtgctatttccattactggaacactcataagcccagcaacatagtagcagtaagagtatagttcatcaaagttgtagtatcaaaattgagaaggtaatacaatgttatttatgtaaaatgtctgttatagaattggaaattaaaataatataacgtaaaactgtaaaaaaaaatgttaagtttacatataattgataattttccaaataaaaattgtcctacaataaaaacaaaaataatgctctcacataaaaatttcattctaagaatacactctatatagaaagttatttactaaggtggcgtttggtaaaacttttttaatcaattttttgtttttaaaattgaaaaagtgaagatactttttaaaaacatgttctataaaattgtttttacttttcaattttttaattgagaatcaaaattttaaaaacaaaaaaaaaaagtcacttttaatatattt

SEQ ID NO: 307274 - DNA, 1113 bp, Cannabis indica
tctctctctctctcctcctctctctctctctctctctctctctctcctatatataaaatccaaaaagcacccatcgatacataaatctctaccaaaaccacatcactcacgcccagttatttttatatccctcatcctttaccatcatcatgagtagagatccctattcaaatttcatgaatggttggttgaatctcaaccaaattcacaatcatcacaacttgatatcttctccttattatgattacttgaataatagtagtaattataatactaataccaccaccaccaccactaacatctgctttaatattcaaaatacctctttattatcatcatcatcacctccctcacctcctctcaaagaggctctccctctcctaagcctaagccccacaagatcatcaccacaacatgatcatgatgaatatggtgatgatgatgatgaggaggaggaggaggaggaagatgttgatgttaatgagcacaataagaaaaaggtagagaagaaattattagaggatgaaaacagcttcttatcatcatcattatatgataatgatcaaagtgtaaccgtggctttgcatttagggcttccaaaccctagttcagcttactcatcagctcatgatttgacctcgaggctttcttccacagagatctctgataataatattaacaaaggagttattattagagaaggaacagaagaagcagaagaagaagaagaagaagatcatcatcatgtatcatcgtcatcatctggctaccattcaaacagatcatcatcgtcatcagtgctcaataacggccagtattggatccctacaccttctcagattttgatcggtccaacccagttctcttgccctctttgctttaagaccttcaacagatataataacatgcaggtaaatatatatataaatatacatacatagaaattaattatatataatccctctatatatatatatatatatgccaaattacacatgtttacatatatagtaataatatataaatatatatacatattctagtttcccgttttcgtcaattttcgtaaatttcattttgattttgctgaaaaagagaaaacttaattgttcc

SEQ ID NO: 307275 - DNA, 1729 bp, Cannabis indica
gtttcaagattccttaccacattcccagatcggagaacgggaggagaaacttgcaatccctttgacagtgaatctgagcaaacttgatttgcagctaagaaaaaaattgaaatcagccttgatactttcctgcttcttgatcagctccagtgatgattttggcgaaaggtacccctgactcgcaccatgggaatgatgcccttgcttcacaccacacgtctcacctaaatccaacccttcttcatcgttagtgaactccaggggatcgatacctatttcttcaattttctcgtcgtcgttcgcatcagtttttgcccctttcttcttcttcttcttcgcagaaaccttcacctttccctaccctctcgatcgagtgtttgccatggcaccagctaggagaagctgcacacaccaggagagagagaaaagttgtattctaaataattgagttcaaatatacttatagagtatgtgtctcctctcgtttagtgatctaacatttgtatcatttctattgtaaggtattatcaatcactcaacctaaaacttctcaaaaactcgaacaaaaactcaaagtcttcacaatcttccacaaagctctaaatgttgtaataactaatagtgagttattgctcaacacttaggcaccaaaaaataaatagagagagtccataagggtcggcaactatggtttaggattgagaggagagaattttctttatctgacaatttaattgataaagcattaggtcagaatgctcttccatctcattcttaaataggcaaccattagggttaagcttcattatttagctaactaattaattaaaaataaaatataaaattagagtaaaatcactctatgggtgaaatcgctatgggtcaaaattcccgagattttccatagcagactgcagcctctccttgacttggcgatccaccaacacctttgcttggttttggacttcttttatattagccatagcctcaaatttctgtgtgtctgaagctgctcactcagctctaagattctctagctccaaggacatcttagacactactttcgaacaacgctcaactaacaagttcccctagaaagaatagagtaaaaacatttattagtaaaaagtgctagatagaaatgatgttagaatggagttagaatgttcacctcatcaagttgatgtcgaagagaataagcgaggaaagttggatcttcgctggctattgtagcccatctctgtgcacccagttgacagtaagtgtcacctgtttgctcccatagattcctacaaatggagccaagtcactcctgactataggcttaagtttcttagagaccactgagtgattaatgattggatcatgtgcaccaactcccgaagctaaatcagctaactcagctttgcgtcttgaagcgatcacattggttctttgacgaattttagtcgcttctactttgaaccgcttccagaagggttgggagtatcctcaagctagatcctgtattctttcgtctgctcaagcagttacactaggaaagataaagtagactaaggcactgaaggaagtgtcatccctttggatgatggttggttgtaagttttggaacttgatctggagtcccgggacttggggttaggaatttgtatttttatgttatttaattatatagaaaaatatatttaagttaaaaatcagttctcaattaattttagactaacttaaa

SEQ ID NO: 307276 - DNA, 5545 bp, Cannabis indica
tagtagctcaggacactcttgagtatttttttgtctttgtatgcctctcttttttcaacttctgggtgaaatttatctgttatcagctttgcattgttgatatcaacctttgaatctatttttttttatagttgtatttcaacttttctaccatttcttcagcaacaagatttgcatagtcaacaatgtcgaattggttgttgtcacgttcttttattttagattcttcttcttcatctgctagttgttttggggtatttaattctgttgttggtgcgttgttctcaagcattaccacattttcttgttcttatgttgtttttgatgtgataattagtattgcagtggttgttgtgttgttgttctgcgtgttgacacataatggatatgtgtagtgaattcaatttctttaatcttcagtaaaaaaaataagctcgagattgttgaatattgttatcggaggtattcctcttttacatggcactggatttgcatggttgtttttgtgggatcgcattccaatgaagagagtagaatctgtaagttgttcattttgcaatcttttggtataaattctccactagcctcataattgatataattttttccttcttcccattgttcattgctcttcaaaagaatgagtatacattccataacttgtaatattttgacagtatttcaacaattcaatattttcacaaatagacaacaattgtaaaacaactctaaaaaaccattgacgctggatctttttgtttcagtgtttcaactattatttgggtgtccaaattttatctatttccttgattataataaattgcatgtaattaaccaagaatgactctagaaaaactttggatattttaaaattctattttaacttctaatcaacattattttttaagaaattatgtatattaatatgcatttacttcaatcacacatgtatataaaaaccaatttcagaagctacacatcatttttatttttgatttccagatctatgtttgagcattatttttaattttgtatttaaaagaatttagttgggtttaagtttctaactttttttattcgttgatttttggttttgatgaatctgtttgctattgtattgttgtcgatttcacttttttttttgttcatatcgctggaatttatggttgttttctgagttttttgtggttctattcgttggattggaaggcggaggcatcctagttcaatttttttgtccgtacagtataaaaaaaaaaaaaaatgggccagggcagtatttttgtaaattctgtcgtgtggcagtatatttgtaatatttaccccaaattcaatatttatgttaaacctctaatttttaggggtttttacataaatactagattttaggcaaaaatttataattttactgtcacacagaattttttacaaaaatactgtctttttgtaaaatagccgtaaaataacgaaatagaataattaaaacaacagtggaacaaataaaaaacaaccgtgaaatattagtaaaaacttaacactgtacacaatataaaacttacacattatttttgaaaaaaaatttaccccataataaaaagttaaaaaagttggaaatttgatttacaaattccaatttttttataaaaatttatgtttcatctaattatccctaaagatatttgggctttcatctttatttgggcctcagtaaataagcccaatggcccactttaatttcttgttacagttccaaacagaaatggagaccccaaatcaaaccatccaaagcttctcttctccttcgtcacttcaccattgttgagccctaaatctcaatcccttcttccattgttgagcaaaggattacgaacatgagaaaaagaggtcgtcttcttgaggcgatgaaaaggtctaaaagaacaccaccaccactaccactaccactaccagtatcaccacaatcaccaccaccgcgaccaccacgaccaccacaaccacaaccaccaccaccgtcatcattggtgggtgttgatgaaaacgacagaatttcgagacttcctgatgcagtaattcatcatattatgtcttttctcccaactgaagatgtggttcgtacatgtattctttcaaagcgttggaaattcatctggtattcagttcccacactctctttcgttttttccgatttttaatagtggtgatgttgataagttttataattatctccataaatatttgaagaaccgcaagagaggcgtgtattttttcgctgattcagtcatgactagttttaagcttgatgtgattgatcattatcaaagtagtaaggtcgatctcgtggataaatggttaggttttgctgttgagaataaggtcaacgaaataagtcttgctgtgattggaatgtgtgatgatggcagctatgatttttactgtgtacctaaaatgttagacaatgcaagatatttgactattttggagttgaatggggtaaagttggatacttctcattcatatagttttccatgtttgaaaactttgacattgaaagatgtttcatattcagataattcagtaaaggactcgaaggatgtggtagttaaatttttgttgggttgcctttcaattgagaaattgcggttaattgatcatagattcggttttcttcgtgttcgcttggagagtttgagcctcaagttcatggaacttgtttatgaatcatttgaggatgatttgactcatattcatgttgatgccataaatcttgaatctttggtactatgtggagtttcctttgaccaaattattgtctcttcttgcaagaaaattagaaatttgtcattaactaaattttacggtagcatccatcaaccgtcgtcatttgaagctctcatttcgaattttcctctaattgagaatttgactttgagctactgcaatacactgaagtctgaggactttaaaatctcgagccaacacttgaaatgtttccattttgagaattttgattacttgtatgatggtggtgagatgaaggttgttacaattgaatctgctccaaaattagcatacatttgttatgaaggagatcttaattttagaatatcaatgaagtcatctagtccattaaatgggaagattataattcgcgagacacagatagattatgacgcagaatggtttgtcaatatgctgatttttcttgtgaatctcagttgctcatggaatactgtaacattgcatgtcagcacatacaaggtatgctcattgcttgtattatatatttgatttacataattatgtggtgttatttcaacttcatattgttactctatatattaaggctctatatgttttcgtaaatgtgcatatgaaggctctcatctgtcctgaaaatttgaagaatctatgtagcctcatctggccagaaaacttgaagaatttatgtagtcgcgatcctttgcttaaatggaagcatctcagagttattactaatgagctcgggaaagagtcagacttgaaggatgccttgatggtgattgcaccttgtttagaaacattgtctattaataaaaaggtcatattttagtttctttacaatactgcatatgctgattatgaatatggatatgactctctttcgttactttagtctgttttgagattgttatcatgattagtagctttattaatgaattttactactttacacaagaatgataaatttttgcttgtgaacttgctgatattccctattttttttaaatttggaaagatttatttttattcatatattaagtttattagcatatacgatggtgtttcctaagttgctgaattgaaacttggaacttcatgagaaatccaagaattgttcttggaatatatcattgtgttccaaggctactattgtgtgctttgtatgcttttaaaacattttgctttttcagagcaaaaggaaatcagcaacaggtcaattatggtgtgaaattcatctaacttgacaagttgctattctataatatacaaaattttcctgaattctcaagaagaatttacagttttgactactactgcttacccaaaacactaggcaatgcaagatatttgactattttggagttgaatggcgtaaagttggatacttctcattcatatagttttccattactaaagattttgtcgttgtcaaatgttaagttctccttctcttgagagattgcggttatatataaatatgaattcgcaggttctaatgttcattgtcgattcttggaaattatattattgtgtgttgtagttgtacaaattaaaattgaagccataaatcttgaatctttagtagtgaaaggtattcccttggaccatataaaattctcttcttgcaagaaaattagaaatttatcattatgtagaatttaccttgagaacaatcaccttgaagctctcatttcaaatattcctctaattgagaatttggctttgagcaactgcaattcattagagaaggagcatattaaaatctcgagccaacacttgaaatgtttccatttaaaaaatagttacaatcctattagtcatgagttgaagccgttacaatcgaatctgctctactttcaaggtatgttcattacttgtattatatatttgttttgtataatgatgtggtgttatttcaagttcatgttgttaatgtatgaaggttctcatctggccagaaaacttgaagaacttacgttgtcgtcatcttttgcttaattggaagcatctcaaagttattactgattgtaaacccgagaaagagaaagattcaaacttgaaggatgccttgatgcggattgcaccttctttagaaacattacgtattaatgaaaatgtaatcttttagttgctttacaatattgtaactgctgattatgagattgttatagttacttattagtagtctttatcctaatgaattgcataagaatgactgatttttgcttgagaaactcagcaagttcaattttgtctgtaataattgagtgagctcttttgtaattgaaactgagagagagagagttgtaacactcaaagaggaacttaacaaataaagaaaaagtggcaataaagaaaatgtgtgtaagattcatccgagttcttatttgttgtttcgaatttcttttgatttcttgatttttcgatcacattgtgatcttgttgtgttttgtggtgaattctcaattcgattcctaacatgttcttcgaattagagtactaaacatttaggcaaaataaagaacgtattgatttagtatggttctaaacctaaaattcaaaaacattttggatttgggcaaaattgttacaacatgtcaattatggtttgaaattcatctaacttgacaagttgctaatttataccatacattacaaattttgcctaaattctcaagaggaatttacagctttgacttctaattaggttgtataaattgtggttttttcagtagtgatacaaagttgtggtagtgatcaaagcttgaatgaagacacccgatcg

SEQ ID NO: 307277 - DNA, 911 bp, Cannabis indica
atcagtcaataaaatgactcattcgcatttccactttccctttacaacacgaatattaatattgcatgccttaatactaatataaatatactatttacatcttttttcataataaatatacaatttaactaggatcgttatatttctttcataacctaatatataaaaattctatttttagacttgaactaattttaattaattatatatttaataaattattttttaattaaaaatatttaatagggtaattttaatatttgtaaatattttctttcatatcaaaaattattatatagaaataaaatagtataggttataatcaggttacaggtagtttattaattatttttaactgtttaataatactcaaacgactgtgatggtaatatatttaacaaaagaaaaagactgtgatggtaatatatttgatgtaactataattaaaatatataaagtgagtttattagctaagagtatcatttttactcttatcatgtatgtatcctttaaataaccaataaaagtactgatatattagattttgtttcacgatgattgctagctatttaatttccaattaatcaaattttctaattaaatttgacaaacaaaattttgatttgacaaataaagttaaaagaaattatataaatataaattaaaatacaattaacttcatttactatcttatgttatcaatttatttttggagggttgttaagagctactatcgtttttagctagacgttgatgaagtttcaactcgatacacttaggagtggttcaatcaacaatcctctatcattattaactcaaagttgtagttttcggagctttttatttttacacttcaaaatatatatatatatatttttttttttgcatttttatggaattctacatagaaa

SEQ ID NO: 307278 - DNA, 3859 bp, Cannabis indica
aaaaagaagagaaaaaaaaaagagagaaatgatatatagaaagattgatgtggtacatcaatctcacgtgtcaatcaagaaagcatttattgtgtgtgcatgtggtacaaatgtaaaaaattaaaagaaaagggtataaatgtttgggtaaccgtgtagtggttttttggtaataaaattaatattttgtatttttaatgtaaaaatttaattcagaattaaaagataatactaaaataataatttataaaaaattactactttgtcctcaataataatttttgaacacaatttattctttcactacataattatttctcattttaaccttacactgaaaaatttggtatagagggaatttgagaaccaaaaacttttattaccaagctctaataaattcgagattacaattattgtcatcaataaaataaggtagtttattaatttattattactctactataatatagaattacaccattactacaaaacaagcttttagaggtgcttttttctagcaaattaataatcaacgaatgccatagactgtagctaaattaaattttaataaaaaaatacgtacagagtcggttattttgtaataactaactccatacgtgataattttttaattttcatgaaaaaattctacggagtcggttattttgtaataactaactccatacgtgataattttttaattttcatgaaaaaattctacggagtcggttattttgtaataattaccttagatagtgattttttaatttcaaagaaaaaacacttatggcattggttattttatgtctttatataactctctctagctatcgttttccccaaaccccaaaatatctaacagcccttcgtcctttcaaaccaacgaaaccctcgcccaaccacccctttcttcccccatttcttcattttcatccggctttatccatttttttaaaatcttgcattttcacactcaaaaacatatccctggagtttgatcgccttttgtttagttttttagagtaaacagagcttaaaggtggtggttgtggtgattgtagcccccaccatcacttttggtggagaaatcgatgaatttcaacgtccattaaggtataaatctaatctttaataattttactaatgtaaattactttatttttaatttcgtaattttttttttaggattttcttatattgttaattgtgttcttatagttatacatggtgaccggattttggtcggtattggtggcctaattttgataataaggtaaaaatttaaactttaatattatatatgtatgtattttgtattttattaaatatatattgtatgtatacatattttgtaattgtatatgtattgtatagtatatgtgtatatatacaaatattataattatattatatttttttttatatattgtatatgtatatattgaatattttaaactagtagttttgttaaatattgtgaatgggaatgagagaggagagtattaaaacaatttaaaaattaatttcgaaaaattagtttagaaatttattctattttttatcattttttttattttcaattttattcatgtgtttttatttttttagtagctagtaaatagttagttacaactacttaacaagttactaatttttattcctattgatgtatttttagtactaactattagtaactatttagtaataaattaactagttactcataaattatataactaattagtacgtagtaaactaaataaatttttaattttgtagtatttatttatattataggaagaatatatgaagccaacttactagtagattaggaagtaaaaactaaatgagtcaccaattataggacaaaacaaagaggtttgagggtgttcaggacagcggtgaaggtaagaataatgaatagtgaccttatcctaagtgttcaagatgtagaaaggcaccatttgagccaatgtagagccggatcttgttttattgtggggtagtgggtaatctgaaaagaacctatcttcagttaagaaagactgatgttaaaggagaaaagtgtacaggtcctgcccaagtgctggttatgacttaaggggacctgggtatcggtccttcggccgactcaaattagaattttatggtaaatattaaaatttctgtttcaattgatattgatattaaacattgtacattcagttagagacatcaaaaaatctgaatggactgtgtatgtatgttacttagtggtaacccatttggcggggtggacaaattagagcaatgacaatatgagttaagttgttggtatttccaagtggaatataggacatgagtagttaatggaggcatctatccaattgattcaaataacaaaatcttttatttaggagtgatctagcattagcaaaggtaagaacatttatgagtattgtctggaatcctaggtgaattgaaggcggcaattatgtagtaattttaggattatgtgtaggtgtgggactacctatgctagcaagaatcatcttgttttggtaggtcaccatgaaggaactccatggttaagtgtccttgtctttgggtgatttcatttaggaaatttccccatgaagcgtgcgattcagagcaaagcacgttggaagcacttggattggtctgtgggaccagtcgtcagtctggaaagtagctagagtgatgcacttgtgtataagagtcatcattctgtgggagtaagggcccaatagaggcttgaagcggggacattaccagggtagcatataaaagaacgccaggaagagtagtggtatcactaaagtaaagaagattacctaaattacttaaagtaattcgataatgatggagagtaattcataatagactggatagttaatattgtatataaggagaccattgaaattttgagaaaagattactttattaagcaaatatagaaaggcatactcacccagaatgaggagaagcttatgaattgagatgcaaacatgtatttgagtgattggtgaatgttggatcacaaagtaggttgtttattaaacaattaactatataattgagtgtaaaataagtttagagtggttaaccaagtaagcagatagtgatgattgtaagggagcaatggtggcgtatgaactagggagtaaaaccttagtggtaatgacaggaaaagtatacaagggtcttagaataatctcttccctaacgaggtgtttatttaaaagtgataattaaacgtaccactagttaggtaccttaataagtgtggtacaagagaaatattagatacctgtttactggggtaaataggctaggtagcctattagctagctttaactcctacattgtccggagtataaaatgtgtttgtctccatgctgagaaaatatatatcaaactcaacccatattctgagctttaacgatgttaaaattcaaacaaatttattatgtgggaaaaacatcttgtccaggtttttgactagaaaaggaagtactataaaatgagacaatttcactagttaagaaagtgccgtagaaagacaacaagatagaaacaacagtttgagacttagaatcataaatacaggggtaatatcctgaattgtttaaataaattttgaggacaaaatttttataaataggggatggttgtaatatcccgataagtctaatagtaaatattagagtttatatttataatatggatgaatcaggtaataagtgggattataatcctgctaatctattgcagcataaaatttaaattttgctataagtttgtaaataagcgtaatttataaattacacagatttatatagcatgtgtgaatgtaata

SEQ ID NO: 307279 - DNA, 2772 bp, Cannabis indica
tttttttaaaagggattatgacaaaatactcctgtaatcatttaaaagcacttttaattaaaaagaatttcttaaagggcaattgttatactcgaaatttggctggcacttcagaggaggacacgtctcaacttgggagaatacgaatcaacaaatataatggtaattatattaaagaatattaaaatggaataactcattaaatgcagagctgatagactatacctataactcgttgactgtaaaatcttgagcgaggcacagatatacaaactattaatttacatattgatgagaaaccatttcgtatatgaagacacgatcataaggacgaaatcattaaaacacttagcgtataatatacattatacaaactaagtatgatagttggatgaatctgaacaacgaatagcgaggaatccatctcgctataggaagacatactcatggtaccttcactaatcagcttcagacatctttcaatgagatccactaattcgtcgagtcagctctctcagatagaagcagacattcaaatgattatgactgttgaggttcaccttgtcaccaagaactgcgattgtcagatggagcgttatatcttcagtagcaaaaacaacggcatttttattatccacctcggaaagacatgggaaaagcttcagctcgttgtcatggttattgttgctatcctagcgaggtaactctacgagataccctttggagcgtgtttaaatccacaccaacattgacccagtaaaagcggataaatcacagttgtgtgatttttaagtaataaccgcatttattttacgtgggacgtaatcaaatcccacaatttcagggaattagtgttgtgggatatcaatctgattgtaattaactgtcctcttatgtaactataaatagggataggatacactaaaaaaaggacggaaaaacctttagagaaagagccctagttttgtattagaaatctagtaagatagacttgcagactatacagaattttaacagcaaaactacgttaagaatttttgtgttattttttttctttttactactattatttctgtgcaaatctatcatgaaatagactttaatttagttaacgaaaatttgcgttaacaagaattaaaaaaataaaagtttttttctatgtagcaaagacaataaaagtaataaatattttaaaagaattatttctttagaagtttttaaatttataagaacatttatgatataattttaggccatttattataatttttcatatatttttagctataagcaaactaaaagcttaaccaaatgaaattaaaaacagcctaattgataaagggtccttaattccatttatagagaataatacgaaaagatgagttactatttggcaataaaatatgagattcacataatttatataaaattaaaataaaaactacatgaatttgtatcatgttggtgtctcataacaatgctgattagctattttagtctgaaatttccttcacaatttacacatttcgtgttcttattagctacctctaatgttaaccaatgaggttcctttaacatacaggcccatcatacaaccatgtaagtagtaacataatcttgtctgctggggtctctttgtcctatcatttgaagcggttgctaatgtttgtccacaatttttttatgatgataagatcgattagcagacacaataatttgtcatcacatgtggaacatgtcttcccatagattattagaaaagctctaattagatttgctaaatttgattaacaagacatgtgtggtcaagaaagagcttgctttcccttgatttttggtcgttatatgcaaaatcttataattttgttccatcaactagtccttttcaattatcgatccatcattaattaaggcatttttcttctaatttgaatgcatctcttggtagttggtataaatagttgagaaacgttaaaaagcactaatagtgcctagtacatttattaagtgtaatattattattattgtaatttaataccatgtctcatttattttattttattttatttttgtttttgagagagtgatctaaatcacactatgataatcgtcgacgcagaggaatttctagtcaacaagctaatttctagccaaagatatatagagtcagaatatgagtcactacaaacaaagcgacttatataagaccaagttatctcaaaaatttaagcaaaacaacttatatacagagtcagaatatgtctcacttattttaatttaataaaaaattttaaataatcacttataaattatgggaagtcatctctagtagtactaggcaccttagtgccttataacaatggtctaaataatttaaatccttaataattatcaatggatatgtgtgttttcttgtcttctcgtaaatgagtatttcttaatgaacctagttattttaagtcatgtttagcatagatatttgatatatttactttattttttttaaaaaaaaaattgattaactcgtcattttgaaaatggatatatatattcaatagttacatttttattgtaattataatagttatatttttttttatttatctataaaagtagattaattaaaaataaaaatttattttttcaaaattaaattaattataattaactattttttttaaaataataaatttttaatttaaatattaacaagattacttttagcaattaatatttataaataattttaattttatatttaagtccctatta

SEQ ID NO: 307280 - DNA, 942 bp, Cannabis indica
aaatacaaggtccattttgtcatttaacaaaatacaaggtccaatctgtaacttttgcaaaacacagggtctaaaatggtatttaccttaaaatttaataaatatagtcaccttttgggattagaatacgggaccatagaacagaacgtggggtatactctgaaaacctcatcccaattcatgtattaagacaggctaaaaacgctattgaccaattttagtttcaaaattatttgtattattattattatgatttgtcaaatgggacagtttctattgatgagaaaaatagaataggttaggaagaataaactgaaaccattgtttttaaaaatatatatataagtttttattgtattaaactgaaagtggatgtgagaagcggtcaatgggtgaaagctgaggtgtttcaatggtggacacattaaggtagtcaattctcaaaactatatttgagaagtcaaacgagaccgactgactcagaacaaaccaataatgattaatgacccacgatgccacaaagaagattagaaaagtttcgaaaattgtgtgattatcatcatccaaaccaattgaccttcttttagaaaaagtgcaaattttataagataataaataaacattaaaagcataaaaagagaaaaaaaaatgacaaatgctaccatagtctctactctaggacaatctaagaccatcttcaatttcaagtgtaaatattatatttagaagaaaaaaattgatatatttacattgatttttaacatggtaaaacacaattgcaaaacaatataaaatttattatctagttaataattattaaaaatataaaaatatttatcattaactctattattattttattatgtataataataagggaaaaaaacagaaaaatacaaaaaaggaaaaaaaattacaaaatactttgggccggcccattaa

SEQ ID NO: 307281 - DNA, 2492 bp, Cannabis indica
tcgcaccaactttcttaaacactttagcaggggtccaatcatgggaaacagacatccacgcttgatccaccaccaaggatctacgagggtcccttgtccaccaagcttcaaagcggaaaggccttttggcgttagagtccgaagtgtcggcattaataaaggggggccgatggtcagaattacaggtggtgagagaccgaacgaccgtattaggaaagatttgcagccaaccattatttacaagagctttgtctagggccgacttaatgtgattagcaccgtctctatgattgtcccaagtcatgacatcccatttaataggcaaatcaaccaatgcatgacggttaaccaactccgaaatgaaggggataaattgatccctccccttggacccaacccgctccgagttgctcagaacaaaatttacatcgcctaagattaaccaagggccaccaaatttttcaccattaaccatcaagctagaccaaaatttcttcttttcatggaagtacggaggaccgtaaacacaagacaacagccaggggctccttacagggtcagagtacacaaaaccggtaatctgatttttagaaacattaatactttcaaattcaaagccctctttccaagctaaaattaatccccccgcacatcccacagccggcacaacaatattatgataaaagtgaagtttcttaagggaacgtaccagacttgaagcatccacttttagttcggtaatgaaaatgaaatcaggattgcacgaccgaatcagggctttcaactccagaactgtagaggtctgccctaaccctctacagttccacgctacacctctcatggctcctgtggaggagataagacattctcctccacaggggtttgagagtgagccaacccaagagagccagagccgccaatcagaaaagagcctatcaaaggtcgttccaataaattgtttcttccgttggaactcccttcaagcgactcagcagagcggttaatagcgatcgagttgtcatttgataattcttccaacgtgactttagtagcatgttcttgaatagttgtatctcgaggaaagaccagaaccacccccaggtgttgccgaagtagcttatgaggtttagagcaaatagaaaaaagaccatcaaataaacttttttttccttgattggagtagttctagcgttaattatggaagtcgacttgatcccaatgttaccacccacttcacgaatctcataaaggtccaagctcccaacatgtttgagctcatgcaaaaaagtatcttgggcttagaaaaaattagataaggccttttcttcatcatgctgaaagttgacctcttgccaacaaattgagtaactccttaattttaatgaaatataatatgagagtatttttgattaatggataaaaaaagagtatttctaaattaatccctaaaaacaatgtataaaaatactatattttaatttgtaaatataccttttgaaaaatacttgaagctagattgagtttgggcccatataacttctatcaaattcactttttgttttagataactgatcatacaattgaaaagcccaataaatattccgtaagcccaataaagttccttctgattttcaaacataatttgggtcaaagtcttaggtgccttatgtgctttttgtttgtcattttaaacaaatttataagaaatgacacataaaatttcagtcttttgagttacaaagatgtagcattttcacttataaaaattaactatataattatattggcaaaaaattgtagaagccatttataaagctttttcccctgaatattctagaattttttaggatcaaattgtggcattatacctaaacatcaatttattgggtgtttagctgcctcaaatagactaatcaatattagagaacgcttgaagtttatggtttagattactataaatttttttacttttagtcacgacaaaacttgtaagtaaaagtaaaaaaattgtgactaattataaatcatcattcttatattgtgactaaaaaatttgtagctaaaggtattagtcacaaaaattacagtttgttatgactaaatgtgtttttaatcacaatttttataactaaagttaaaattagtgacaacttatatctaaatattttagttataaataactttttgttgtgactaattaaaagttacatttaatcacaaaaaaattattttataattaaaaaattgttactaaaagtaatttttttgtaagtgttgttgttttagtgattaattactatattaaccacatgaaagtatggttggaataccaaagttaataattatatttattcttcagcttgaaatgattggtgacatgaagtaagaatatacaaagttaattttttgttgttactaattaaaagtcacatttaattacaaaaaaattatattgtaactaaaaaattattactaaaaataaacttttttat

SEQ ID NO: 307282 - DNA, 1444 bp, Cannabis indica
aataaccgaccatatatctaacatgtcttatttagaaaaactccatgccttaaataagataaacgactcaccatattgtacaaacatcgtgcctcaaataatgtaagtaaaaatataatttatcattaaaaagataaactattattttaaaataaaataaacgacatgtcttatttagataaacactgtgcctcaaataagataagttaaaatataagttatcattaaaaaggtaaatcattaacgtagaataaagtaaacgacatgtcttatttaagtaaactacgtgtcttaaataaggtaaacaaaataattattaaatatgaaagttattaccttaaaataagataaacaacttgctttattaagcaaattttttgtcttaaataagataaaggacttgctttatttaagtaaatacagtacctcaaataatgtacaccaaaacagatttatcagtaaaatgtaaactactaccttaatataaggcaaaaaaaaaagtattaaatttaaagtaaaataatttatcttttttagagattaaagttagtttatcaatattcccacgaagctcaaatttaaagaaaaaaaaatatttataactattaagtattaatttcccaatatttatataattgctacccgatatacaagtttacatgggagatatagaaaccacttgtcaatcatcaaagcaaagtgaaccacagtaaaatacttataatctcttaaaattaatgcacttcagttgaatgtttctcaatcatctttacactaacaaatctctctctagcttcattttccatgtacttaagaaaatatttgcattgctcgttcaccatctgtctgcaatcccaaagtagcaaaaaagagattacaatgtgttactattctatactattaaatgagaatgagactttttatacactgacataattgtaattgaataataaaagatatatacaaatttaatgtgtcatatatatgtactataagagatcaattttgtagaaaaaaactttttaaagtaatagaattttattttgcagcttggtaccaaactatacatacatacaattatgtttcaattaaatctaatatgaaaatagatttggttaattgatttaaaaagtaaaagagatatttctaaatttttcatgagaaaattaggtggttaccaacttttacttattttaatttttattatgtttttcatattcattcatgataacacggggattctagtcctcaatgtatcattttaatttagtttctacaataaataaaaataaaaacacaactttttgtacttataattattgtctcttctcaaaagactccaaaatcaaatttttattcaagagaatagaagttaacaagacaaattttttctgcaaacatacattttaagcaaaagcaactagagtatttttttttttttttt

SEQ ID NO: 307283 - DNA, 792 bp, Cannabis indica
ataatataaataatatatatatatatgctatgaaaaagctaggctctcaaacaaggtcttggataaaatcctgtgtgccttcttctgtgtgagcaagaaggatgcatatcaaaaactacacacttaattaaatcagtgtttcttgacgtttttctcaagtagagttgatctattctaagacaggaatttttccaccagctgccactatctgttgctccagctacattgaccagaaaaatacatattatatatatatatacatgaaaaagaagagcaaatctccaaaccagtacaaagatcaatcacaaaccatttttatgtacttaccatgaacaatttctcaagcttgctcttcaacacagagcattcttgttgcacatgttgcaaacatctcaaacaactgcaaaaaagttttaagaattagatttgtcagaaaaaataatgaaatagagaaagaaaagaagtgttagcctatttcaatacttttttactcaataatgaaactccattttcaatgataatatgtttaagtagaagatgaatccatgttaaagtcatcaacaataataactactttcctttggatatttgaaatcttggggtgcagattacacaccttttacaacacaaaccaatgctataaacaacttcacagtctcagtctcacatttcaagattttggtttcatcaactaatagaaaatatatcaaaaaaaaacaccaaagagggcactaggtacccgtaggatttaattccattgcctcatttcgaatacatgtatgtttaataaaa

SEQ ID NO: 307284 - DNA, 1479 bp, Cannabis indica
ttttagggacatgattgaaggtatgaggatggacactagaaaattccgataccaaacttaccagaactctatctttattgctactatgtagctggaactgttggattaatgagtgttccaatcatgggaacatcaccagaatcattaatttctgtaaagagaatatatgattctgcactttacttaggaattggtaaccaattgacaaatatctaagagatgttggagaagagtaagttttaatcatttattttcttctatgttagctatgtctctcatttgaattctctaacctattttttggacttgttttcccttctttagtgctatgagagggcgagtttatcttccacaagacgagctagcgcagtttggattatcggacaaggatattttctcgagaaaagttaccgaaagatggagagaattcatgaaagaacagataacaagagcaagattctacttcaacttagcagaagaaggagcttctcagcttgacaaagctagccgttggccggtatgacacttttgcaagcatagttatgacatgtttcacttctaatcctaatcatacggtaatcctgtgctaagacagactaggcctatacttagggtctacctcgcccagaggcttaagaaaaattatatttttaaaaagaaattttttatttttatagtttttaaggtacgtacaagtttacaaaattatgactttttttcaaaattttgttttcttgaaaaatatgaaaaaaacagtataaggtaactggtaactcttacttgttttcttcatgttttttaattttttcttaaattttttgaagaaagaaaaaaccatatttttgtacaggttgtacaaaaatccataaatttttacgatttcctcttttttaaaattacgataattcttttgaataagggttgaaatttatttattttgctaggcctaaataatttggttgatgaattaatcattgaatttttttggtaattatttttcaggtatggtcatccttgttgttgtacagaaacattttggatgcaattgaagaaaatgattatgataacttcacaaaaagagcatatgtaggaagaactaagaaacttcttatgttgcctttagcttacacaagatcactatcaacaccaaccatcaactttcattgtgaacaagttgcttaagcgataataataatagagaaatgttaaaggacaccaatggtacttagttctatgtgtcaatatcgttattggtccaactaatatcgggtcccatataatttaatataatagcttttatggagtatcgctagccaatcataacgagacatgttgagaaggtactaggtaccactagtgcttaatagcaatgctcgtaataatatgatcaccaaattttacaatcactaagtagcaaacattatgtataccatattagaatatttctaattaaggaaaagatgatataataccaatttg

SEQ ID NO: 307285 - DNA, 2164 bp, Cannabis indica
ttcttttttcttttttcactttaaatttcctattcaagtttaaagtttttgatccactacatggatttggctggtaatggtatatcacttattattaggattttaattattacatgtacactactttttcctttgggtgtttttttgtcgtgttataatagtaaaaattaataagcaatatattgtattgtggtgcactatacagtatacacacctactctctatagatctgccaataataaatgtttataatcatgaactttaattggatacccctttaaagcagttatagcatggcccatttttataattcacaaattttgttgatgaatatggcatggatcgcaagccccactttttcttctttcttacttcctctgttgattaatcgctctctcttctttttttttttggttggacattagtcttcttttgatcacttttagaactatgctacatatacttattggatctgaacatctatctcacacacatttcatcttcagggtacagtactgacccgtattttaactagaatgccttttcttattcttactagctagttttaacctgaggcaaactacattatttcctttatgcaaatatacatatatgtacttattgtatttatatataattagattgtttgggtaaagaaaaacacagctcaaagttgagatttttataactagttagtctagatttatgtccattattgttgaatttttgaggcattgattgatgaaaaaatcgaattaagaacaagtaacaaatgcaagaaaagataaagaaaaaaaaaagaagtgttagaggagagaaaagagagttttattattgagctcaattgagctagattatatacaagttaagagtagaaatacttgacggaaagcagagtagggaagaaagtaaatctcagctcaattagcatgagcagttttattgatatttaaggtgttacaaactttaatcatagccactgaataaaggatagatggcaaaggattatacaaaaaaaaatattacagaaacaatgataacaatgcagaaaaattgttgtaatcaaattgtacaatctagaatattctttcagacatattctccaaatatttgggagtcatataggctgccaaataagacaccagtatgcagctaagtcacctctcatttcttcacaccacccctcaaacgataaggtgattctttcacttggaatttgtcaatcaaaaattgaaatttggcaggtgacaatcctttgatgaggcaatttgctattatatcatgagagagtatatagcgaatctctaatttcctttgtatcatcttatctcttatgaagtgaacacctaacttgatgtagttcttgcatgataaacagggttagaagctactgcactaacactcatattatcacaccaaatgactggtggagcagagagatacaacttcatttctttgaacaattcttgtaaccaagtcaattctgaggcaagttgagtaagagccttggactcaaattcagtgctagagcgagcaacatcaaattgcttcttagatgaccaagaaatgagtgaatcctccatgtagacacaataacttgcaatggataatctatcatctgggcagcaggcccagtctgcatcggaaaagccaaccaagttgagttgagtgtctggtgagatgtgaatatcgtggtacatagttcctttcaagtatctgagaactctcttggtagcattccagtgagcagttgtttgagcttcaaggaattggctcagtttgtttactgcaaatgagatgtctggtttggtgtgactcagatattgttaagttgtaattatgcttctacaggttgtaggtgagttgagtggttctccatcagacaaagatagaggttttccagcaaccatgggtgtacgattaggctttagattggttgattcaaccttttgcaacagctctattatatacttcccttgagagaggtatatccctatgttgtctctaaataactcaatgccaagaaattagttgagtggtccaagatccttgagtgagaaaatcttgttcagtttggtaataaacagatctagctgttggaagttattttaccaggaacttagatatactcacaagtatgttaatttaacaacctaaatatgaa

SEQ ID NO: 307286 - DNA, 2393 bp, Cannabis indica
tttttattagaaaaaaatgtattgtttttacctaaaagctcattaatttaatgtgatgtgagaccatagttggaaccttttatagttgtaaaccattagagcatttttttaaagaaaatatgacaaatcttatgtgaatgagaaagaaaataaaaaattatattttaaaatgatgtgtgtattttgaaactataatgttgtcccctattggagatgctctcttagagcatctctaatggcaaaaattttgaagatgcttgcttatgtgaattttttatttggcaaaacacaagaatgctacaacgttggagataaataagtgtcattataaaatattgtgttgatgccacttcatggcattgatgctatatttttttttcttgtaaaaaataaaaaattaaaggtaaataatagtgtgacaatatttataattacaataaataatatatcaaataataatatctgagatcataattataacattattgaaaagtgttatacaattagagtatttgttgaaataagagtgtcaaaaataatgtggaagagagataaaataaaatattatatttttagatgatgtggagatttttaacacctttaaatagtactaccagctcttacggtgtcaagcaccacaagacgtggcatgtggcatgtggttattggtgtaaatggtattaataaccaatcacatcacacatctgtatgttgggcaccatttaactaatatcaatgctctaaatatgtataattgatgttagttatcaagtacaatttttgtctacctcgtaatatctctcatgctttaagcctgtactgaattacacgcttttcactaaatcttgttagcacaggttacacaactcacagtctctgagtatgctctagaagtttcctaggggtgcatcctcttcgtgttctggttccattgccagcctcttcctttctctttctataatttctaatcccaaatctttcatcttttactattttctaactaaatctttgcatttattattcataaacttattctctcttttcagaggtaataaattagctctacagctcgggtttgagaggcaggagaagattgcatcagggcaattaatttttactgctaatacttccttttcttattgtaatttaatgctgaggtttttttctttggccaaaacacttttcaccatcatatcagccatttgattgttgttgtttcctctcctagtggattttcctccacagagagtctacgaattcaggatctgggctatggctagggtggatcgatttggcatcttccaggtttcctacgagccccttctactctagatattactctattcttgtctatttaaggatctctattaacttcaattttatggttctgtacttagccttgtactctctttaccaccaaacctcttgttcttctcgtcaccttttcactatgagtatttccccccaaaacccagaatttagtatcaacctcactgaagaggaagcacttgtccatgaatttgatcatatctctatgcattctgactcatccctccaatccttttgtcttgttgccataattcttacctctaaaactatcaaatctgattgggtggccaatgctgtgagggatgcttggatagtttgctatccattctctttctcgaactaccattctggtatgttcatggtgcattttggctatgaaggagataggagaagggtaatggaaggaaaaccttggcattttgatcgtaacttgatcctcgttgctattcctggtgaggtagatactatctcttcttttcaagttaagtatgttcctctttgggttcagattcatctcattctgtttggtaaaagatctactacccttgcccaatttctgtctgaacaaattggtgatcttattgaagttcacattccttccctttatgatactataactcctttcatgcatataagagtccttgttgatgttaccaagcctcttcgcaggggtatgaacattaagtttagatctctctcatgcactaaatggtttaaatttatgtatgaggggattcaaaattattgttactactgcggaatgcttgaccatacttttaacaagtgtgaaaaactcttaaagttcagtgatgattctcttgtgccacctgctttgagttacaaagatgttctagatgctcctactaagtcaatctacaggaaaagcatctttgacctttccaactcaactccttttgaagagtcgtcattaaggggatgctcctttaatcaaagccttcaagatgccattaaccaatttttggttccaaatatggccaatactgttggaattattttaccaagatcttagatctactcacaagtatgtttattaacaccctaaa

SEQ ID NO: 307287 - DNA, 886 bp, Cannabis indica
atatatatatatatatatatatatatatgaacaaaatatatttcatatatatatagacccattattgtttatttaaatttgacttataaaattcaagtttcgatcatacaaaattaaaatttcaaaaccaaataacacttaatcattgtgcttgttttctttaaataagtgcatagcatatcccattagccaaattaatattcttcatattgtgagaccattttaattaattactatatagttatttttcatttataaattaaatataaatacactatatatatgtacctgttctatggcctgtgctgtttaattctgtcttctcgttggtgctcttaagttgaaagagtgggacatgtgtcattaatgtatattgtgacttgaaaaaaatatataatttattttacctaaatatcttcactatttttttttgtttgtttgtttgaaatggatggctagctacttgcttggaaattatttatattttgaacgaaatatttaaatgtgttacgaatgattacatcatatacagtatattattgtcaataatgcttattgttaatagactatagtacttctaataaaataatttatttgctataaatacaagtggtacactctatatagatatatagaggtacaatttaaagacaaagtaaaataagagttcttatccctacaatattatattaaggaaattacattttatatttatttttatttttaatttataccaagtttataggttatatcctcattatgtgtgctaagaactttaatcttgatgaattatgtatattaagtaatttttattataaaaaagtatttatcaattcaattattttagatttatattaaattaatgtgtaataaaaaaaaaaaaaaa

SEQ ID NO: 307288 - DNA, 1081 bp, Cannabis indica
tatgttctttccagggcattggttaaaggaagcgttcgttttcatctatctctagcggcttcttgtaagccatttgcttaattctcggcattttttctgctgctcaatattaattagtctaccacaacataccccaaaaacaataccaagttcacaccagtgcaactcacagaattaagaaaaaaatacagagcaatgtaccacgacaacaaataattactgatagcacaaaccaaaaaatagaatcaccaaatatagcaattcaacccaaaaagaattttcaaatataactcacaaacaaaaaattggctcgacagtggtgaacaaaaccagtggtggtgctggactttgctcgtgaatgttgatgttgaagcttcggttggagcttgatagtggtgcttggtggatggagctcggtagtgagtgctttgagctggctatgcaaaatggagctcgtgaagatggttgcgtgtgtgcgaaagggggttgttcattcgtgaggacgagtggtgatggtgagggccggaggcagtggggacaaacaatggtggtgttttttggtcgtgacggtggcgttgaaactggaattggatgttgcgatttaggggagattggttgtggttctacaggtacagacgaagctgggtcgtggttcgtgggttggctgctggtgcgatcgacttcgagtgatgggttggtcgagcttgacggctggctggctgggttgagcgaagaagaacgctggttgatgatggtgatgactgaaggttgtggtttgctagtatgtggctagggctggtttagaagctcaaattgggggggtgatgatgctgaacgatttgttgggctttgtttttgtttttttattttttttggttaaaataaaaatacaaaaaaaataaaagaaataaaataaaagtttatttatttatttatatatatatttaaagatactaatctattatctcctattaaaattgcttttttttatttatatataatatattatatctatatatatttatatatataattttaaaaatccgtgaatcactgaaatgaatcttcactcccagtattt

SEQ ID NO: 307289 - DNA, 1581 bp, Cannabis indica
tttcgatatatagatgcttggaatatggatccggggtgcagagatattgttagacaagcttggacgcaatcttttcagggctatcacaacttcattctgtgtgccaagttgcgaggtacgacctctgcactggctaaatggaacagggaacactttggcatatgcaaaaagaaactagaccttttggaaaaacttctcattgatgtgcaaaatcgctacccctccccagagaatgttcaattggaaagctctatccttctcgagattgatgaggttgaagcaagacaagcagctatttggagacaaaaatctagagaactatggcttagagacggagatcgtaactctaagttctttcatacttttgtcctagtaagaagaaaaaggaattttatctggtccatctctgaggatggtgtgaattggctggaaggcgggaaaatattgcagattacttcacctctaatttctctactatttttgaatcctctcgccctgagattggccaggaaatattctctctaattagcccttgcattagctctctgaagaatgaacatatatgtgtgattccctctactgaggagattagagcagtggtcaaggaaatgccccaacttaaatccccgagaccggacggattccccgcaaaattctacaagactcactgggaggttgtgggaaagcaaacggtggattttgtgtaagaattcttctctacgtgcaagttctctaaggaaattaaccgcactttcattgtcctcattcccaaaaaggaaaatgccaaatgtttcaatgactttcgacccataagtctctgtaatgtcagctacaaaatcgtggcaaaactcttggctaatcgtatcaggcctcttctggataagcttatttccccttttcaatcggcttttgttcaggggagatggagagctgaaagttctataattgctcaagaaatagtgcacgacatgagtaaaaagtagggaaagaatggttttctggggatcaaatgcgatatgtcaaaagcatatgatagacttgaatgggtctttatcgatcacgctcttaaggcttttgggtttagccttcgggttcgaaacctcatttcccagtgtattagtactgtccgataccagttgatgatcaatagaggtctctcgaagtccttttctccgcaacaaggtcttagacaaggtgaccctttgtccccgtatcttttcattctttgctctgaaattctgtctcgtttaatgctgtagcaggaaaggattggcttgatttcgggctataagtgcaccaggcagggtatgcaagtttcccacttgttgtatgcagatgactccattttctttatcaaagctgatcacggttgcgtttctcggctgcgaatggttcttgataaatactgctcttggtttggtcaactaattaaccagtccaagtctaagattatggcctcaaggaactgtcaacccaattgtattgctgagtatgaaaatttcttaggctttgagatgatgtgtggggaggaagtttgttagcccaagatatgtttccaagagggggggtgaattggaaatt

SEQ ID NO: 307290 - DNA, 2443 bp, Cannabis indica
ggctagatatctgaacggaagagtcatttatattccgctgcaccaatgtaaggtttcttaaacttatatgtgtttaatttatcgttttagaaagttcatatttaggatgttaataaacatacttgtgagtagatctaagatacctggtaaaaataatttccaacaattactcctaagaaatcaggtaataaaaaatccaaatcttctcacagtaatgcaaaaaccaaaaactattacgaagcggtataggttccaactgatttggaagtgtctttgcctaataatcaagtccaagatggagtggtgaaatatccttagttggaatattagaggtatgaataaagtcaaaaagtaaatatttattttggatatatgccgcttgaataagattagttttaggtgctcttttagaaactaaaagttcatgagaataagattgatagtatgatgaataaaatcttctctgatcgggattattaatctagttctgttactgatgggagaattttgccactgtggcaaaaaagtttgtgaatgtggaggtgattatggaagacattcagtttgtgcattgcagggttaaggtttcatgtcttaattatatttttcttgtcacagttgtttatggtcttaacacaattgctgaatgcaaaagtttatgggataatttagcagcaatttggcttggaaaagctttcttggcttgttctgggttgattttaacgcaatgttcaactatgaagatagaattggtgggaagtgagttaatcgtgttgaaatttttatactcaaatgtggctagctagtgggcaagttgatgttttgaagtcttcgggaccttatcatacattgtctataataaacatgatttcgggagatcgcatttttctctaagttagataaggtgttcaagaatgaaagtttgatggatctttttccaaattctgagactattttacagtgggagacgtgctcagatcatagcttttgtattgtaaagtagatggaaattggtaagtttggctctaaaccttttcaacttttcaattactggttggatttagaaaaaatttcagacactgttgtgaacaattggaaccggcctataactagcctatttatagttcttggtaaacttaataggctcaagcactgttttgagaaacctttctaccaacaactcggcggatgttgctatggattactccttcaagatggataggtatatctctgcccaaactaagttagcagttgatcctactaattctattttggctaaaggaagagctagctgtcgtagttggttcttctgctacttctaagctgtataccagctacattttgcgaatcagtaaaattacttgacttagatatggtgagaaaatgctagtttttttatgcgagcattaaaaagagaaaggaacaaaatagaattacaacatttgtggaaaatggcatagtagttaacaattactcaagagttgtgtctcattattttgatcattttttaaattcttgtgtaaaaagagtagtgcttctcaaaaaatagacctagaggacctttgtaatatgctatatatatgcatatctaagttacttttctctagattgagtgaagttcttccaggcttagtgcattgcaactagggtgcctttatcaaaaacagattgcttgctcacaatattttaatatttcaagacttacttaaaaactataccaagaaaaatatctcaattcagtgtttaatgaagatagatctaagcaaggcttatgatacaattgacgggaattttgtggctgatttattaaagggtctttgtttcccctcaagatttatcaattgggtcatggttttcctaaggtgtacttgtactccttatttctcaacggtcgtgttcatggctccttttagggtgaacaagattgcctttgggttaagtacatctcggtcatagctactaaataagattacctttgggttaagtagattgatagcatctatatgaagaattaggatttatggtctttcatcccaggattagacacaagttggtacttcaaaaaattcattaagttgagaaatattattgataaagctgaattgatggctgttggttgttctaggaagtaggggtgagcataaaatccagaaaatcgaaaaaaccgttcaaaccaacataccaaacaccgttagaaccgaaaccgacgaaatcgaaaattgaaaaaaccgataacggttaaaaccgacattaaacggtcagttttttttttggaataaaccgaccggaaaaactgaaaccgaccgttatacatgtatattaatttattaagttttgtttgcatgtattatagttactaataatataaaaaaaatactatattatttttttatttaatattaaagttaaaagaataaaataatagtttttgaacaattaattt

SEQ ID NO: 307291 - DNA, 1870 bp, Cannabis indica
tttccctaataataataataaaaaaaaagtgtgcactgtgcacttccaatcttgctataacataaacaatagaggcctcggtcaggccctttcatatgttactagaatctgggctgtttatgttaggtccataatgtcgcagtttacaatacttgattggactttgctatgttaggcccactgactaacagcatcacaatacttgaattgggcccatgggatcgtagttcacaaatgcttttgccattaaaaagaataaaaaagaaagccaaaaagcctttctcttgctgctatcacatcctggactagtgagtagtaaggccaagtccaacacaactggcaaaacgccattttgctatcaacctctcactaaaaatgagcactacttttagcaaagctagctcaaaaaaaaaaaaaaaaataaaaaaatttaagagcattgctatattgttagttggcatcatagtgtctagcaccacaatgaaatttcactctataattagttaataattttttataatatttatttaaataaaataaataggaccaatattaagtttaaccaataacgatattataacgcatgttaggcacatgggtgcccaacataattttgtaattatactccaatccagaaggtaaaaattttgaaattagcatatcttttacaacactagaacttcattttttttaaaaaaaaaatgtgttaaatagagcaacctaaaaatattgttggacttgaaaaaaaagtacatagtaatatgacgttaaaatattgccatttcggtgttgaagtgaagtagttggacatgctctaacacaagttgaaaaccaaaaaacaagtttgctctactttttccttacaaatcacctttgaggaatacgaatttgaactccctttgtcttatcccacaattattgtcctagcttctcacttttttattccgaaattagctctttacaataaagactaatactttaattagaaatgctaaaaaacacaagtattgtttaacaccctcctaaatgttgtatcgctattgatgcaattaattatcaactctcatataattataatatattaatttttaaagaatatcactaactaattgcagggtctcacctctaaaaaaatgttagacactactgatgttcaataacaacgcagtactttgtcaagcaaaataagtaataatagagaattgctaaaagacacctctagtacctaacaccttcctcaatgtcatatcaattaagtatcactaccaatcatgcggcgctacttataaaaggtgcggttgtcatgggtgccgtggtaataatagggggaaaataaagggatataagcgtgtattattttattttattaaactaatcaaatagattagaactgaatatctgatgtcacaacaatcacacccaatggtgtctctctcaaggaaggaacagagaacctaaatttaaccaaaacagaaaacttcaacaaaatcctgcccaaaacgtggtaataataattacaataaagaacttagacaaataagatatcttaaacttacttttcgttctaacaatagaataatctctttatctcttacatggttagatagcttagcaaaatcgatgactctgacactttatttctaactaccaaaatgttggtcaagtccaaagatgactattagggtcatcacttaggatttctcaatacagaataatacgccaacaacatctccatataaaccaaacttaacacttaagactcattcagaaaggccatttatttgaaaagatcttgtttttactaattcaacactaagaaaaagatcccatttatgatatataaaataattacacaaaattgaagttgaca

SEQ ID NO: 307292 - DNA, 730 bp, Cannabis indica
tttacaatagttgtaataaatcttgattttcttccattgttataaaatctctaacaaccagtagatgttttgcacttttcacatgccatgtaccaaaatttttgatcaaaattatctattgaaatggtacctttgatccaataatatttgttttgatatataataaagtaataattaatatattagtctcatatgtttactaatatgtattactataaaaatttaacataacatttattaagtttacctcttcttgtgcattttgtatgacattaatatgttctatttcttcatttggaggtggctgagttgtgagagaagatgacatattttttcctctatggagaagtttagaagtataattattgtcaacgctctgtaataaaatatacatttaatttatatattttaaaaaagttagaacttatcataaataatagtaaaagtgaaaagagaaatagctgaatgattatgttaccgcattttaataatttcatggcatcaacctcaggcaatttaggttgaataagaagagaaatttttggatttgtagctaataaaatctctgtacaaataagatcacatgatttttatataatggacaatagaaatttaatattataaaataggtaaagattgaatatgtttatacattttgtaatatatatatatatatagatacttctcctttatatagtaatttttaaaaaataattaatttaagatagat

SEQ ID NO: 307293 - DNA, 1022 bp, Cannabis indica
tccaataaccgatccaatccaattagaatccaacttttaacatccaatccaatccaattgtaattagatatccaactttttgtaattggattggattggatcggttcgattcaattggatgatgcccacctctagagatgagataaagattaataatctaatttgagattaagagagcaaaaggttaatcataatatcatataggactataggagcctctatgaaatttccgcgtgtagaaaatatgcaacaaatccaatatctatttatgtctatgcctttatttttggattgataagacatcacaccatatattatattataatataattgatttgccaatacattaaacataaccatttgtcgtatttctttgaagtgttttggtgaaattaagacaatcttgtgtatttcattgtcaacgtagaattatttattaattcatcttattctatgtcttttctatattataattattattaattatgaggggttataataaataataataatatagacaaaattgaaccacattgcagtgaaattttgacttttgaactaaaattatcaatagctttattattaattgaatgtgttaatttctagaacaaaactgtgaaatttggttctaaagcaccattggagggcagacacgtacgtagattgtggattattatgatatataatcactgtttgattgaatacctatccctaaatcctcactaagattctcatacaaaaaagaaaaaaaaatacacatttcaatctttgttatcaatctagctaaataaaagaacatcttctctcaaaactattacacaactatgatacttatttaatttcttatgatacttatttaatttcttaattattagcaggagcttgaataaatatgtataaaaatcccatcatttggttagatattaagaagattctgtcacgagcagtgacgaagccaaaaatttagatgagtgagggcttgaataaatattaagtcaaaactaataaaaataattgataaa

SEQ ID NO: 307294 - DNA, 960 bp, Cannabis indica
agtcaacgtattattgtcaaccttctattacaacttctgtgcttgaaaacacatactgaaatattttttttttatagcagtgtttattataattacaaaatcatccttgtaaatttttaaaaaaattcaaataattaacaataccgacaacagaatttttgatattctaatttaccatacgcgttcaaaaaacttcaaatgtattttcgacactaaaaactattcaaaaattgtaaaaaatttacaaaaatgatgttgtaagtataacaaacaccaccataaaaaaataattccgacatatattttcaacacagaaattaattgacaacaacagtcctctttgcatcaattgaccaaatactttcattctatagagcaaagtagaaatgatcacaatccacaaatagctgaccaaattgaatagagtcaatttataaattcaaatagcaaattcctataacaacacaaaagagttcgaaatcaaaatcataattttttaatgtaactttttcaaaatctattattaattaagagcataaaaatccaagtccccttgttccaatgaataagaggattagctgatttataattattattattttttatggttttataaccaaggtaataaactttcaaagctaattgaagactcactcaggtacacaacgactccccaagtgtaacgaaatctcaaatctctccccaccaccatggaagtatctacattcaactcgagcccgggggaaattggaggacaccaactacttgttcaaactatccgaaaaatcggatgttgaaatacagcaaaagaaaaatccataaaagtgatggacaattcttcacaaggacaaaaatcagagatagacctcttaaaaagttcttaattgccagtgctatccacactcccaaggctttctactttattgaataataataataagacataatttgatgattaac

SEQ ID NO: 307295 - DNA, 758 bp, Cannabis indica
ataaaactatcaactccttttttttttaaaaaaaaaaagcccaactatccatttgcaaaggaaatgttcaactataaacataacctcattttgatgtgattatttaagtatcacttaatggaaggcagtgaaatatatatttatttatattaattaatgagataataacattaattcaaattacttttaaaatagtgttaaaaaaagtgtaacattactcgttataataacccaatcaatttttttaattttattctcatgttaaaagaaaggttaatatgaaatcattacctaatccattcccaaaaaaatattgtcatgttatatacttatttcatattgttttcatcgagaattaaaattttatttaatttatttttttgacaaaaaaattatttaattaattgaaagacaattttcttcaattaaaaacgcattataatttagatcaaaaaataaaagaatattaggtaattctatagaacatctctgagaaaaaattgttctaatataccttctatatgttttaacatacaagagagttttatagtttaatttgtttttatgattttgtatgttgtagtcatctataatcacctgtaaatttttcaaaaaattctaaagagtttacagtacctataataaaatttagatattttgttgcacggataattttttttttcttatataggctgtaagcaattatttaaactttatttttatcactgtatacaattcaaaattctttaaaaatttac

SEQ ID NO: 307296 - DNA, 846 bp, Cannabis indica
tattattgattattaacggtggataggaaatattaacaatagaatctaatttctgtcgttaatacccccactattagcgacggtttttgtctgtcgctaataattctgcgactaatgaccaccattcttgtagtgaaaagttcaataacataggcataactaaaaaaaatggaatcgccttcactatctcttcttactttgttaatgtttctttataattaataaagttataattataaactataattttatatttttggcctcacatttgatttgtctacactcacagaatcttacaaaatacccacctcggacatgtcataactatcataaataacattctgttatgacagttatgacatcaactctcattgtccaaatcctatgaaaggggtcctctccaattgagctcattgtcgaccagaaattgagtatgtgttattgagagagaattagagaaagaaagagagaaaccaaaattgagagtgagagagatgtgtgcctctttgtaattcaagcatagcttcactcgagatactatgaactgttcttgacaattcttgttgtaatcttctggtgtttcattctctatcaataatgattaatgcccaaatggttgattctgaccatggagtaggcagaataaaaaactgtaattcttgttcgaaccatgtaaaatctatctccattttattgtttttgtgtttgttcaattcatttaattgctatagcatttgctcgtcattcttgtgctcaattctatactctgttttgtgtttatcattgtgttcttggtcgaattttcttcaacaattgctatcagagctttaggttcgaggttacaga

SEQ ID NO: 307297 - DNA, 1454 bp, Cannabis indica
aaaaaaaaaaaaacttcactttaaaacaccaaaataaaaatctgacaaaaagctctaaaccaatgtgctacgtacagcaaagaagagctatttgacacaataatagaatggaaaaatacaatatgagtaaatctaattaagttgttttcactatagaggaatagagagggagtcgtttcacaactacaacacaagtatccttttattaaagcacatgccactacaatttgcaactttaaagtaaacatttgtcatgacaagtttacccaagaataattgaagttatacataccccttttaacatatttaaactatacattattatcccattagaataacagttactagtatgatgctcactattctataaaactttacattcatctgtttggagtacacacctagtgaaaactttatcaattattggttatcaaaaacaagaaagcaagatatatgcttacaatcatgcacaattatgaaagctgaaaatacaattcaaaaccatagtaaagtagaaagaagaaaacatagagaacctttaaaatgccaagtcgcttgatctggattgcagacacaaatgtagctgtaacactcataattgcacatagtccaatgaagcatagctccctatgatggatggattaagacctgtcaaagaatataaattcagtacaaataaaaagctaaggctgaagacttaattgccatacagaatcatttatagatgtgaattcaagaagggacatttaaatacccttgacgagcctaagggtgaaaacattaaataatacagtaacttaataaccacagatcataagtgggctgtattacatgcagaatgtagcaagaatctataaaatccactatcatttgaaataataagcaaaagtactggcatgtattgtatattatattactcatatagaaagttgatgtaagcttaatgtataacccaaagtagaattccccaaaaaaactgaggcctgatatatgaagaggaaccaaggccatcaaataaagctgcatgttgtggaaaaagaaaagaaaaaataccatgctgcgttaaaaatgctgtcatcatgctccggagtgagaacaatattgaaatataggagcacataggctcggcttgcaggaggaaccggctgctgcatgtattccttccaccctagcttgatagctgttagagatattattacaatggaagaaaatcaagacattacaacactattgcaatataatacaaagatcaacaaaagagattaaataaatgttataatacataatatacaatatatatacactatatatattatatataagaaaggtagaagaaaatagattacaacacatgtaaaatatatatatataacaagagaataatatatatatacactcactcacaaccttgagtgtagattagtggggatcaccatgacttgaacaaggtatta

SEQ ID NO: 307298 - DNA, 2385 bp, Cannabis indica
ttcctcaattattcataattatctaatttaggttttactaatccattttctaactttgggtattacagatttggctcaccaagtagtttacaaaattagcataccaagggatgatgtcttgggttacgaccagcagctgttcgtcaggaaaattctcttaaattttcacttcatcttgcttgttacaacctactttaagccaagataagtgatcagccacttggttctctattcctcttctatctcaaatttctaggtcaaattctcgaagaagaagaagaatccaatgaatgcatctcggtttagcatcctgcttggcaatcaaatacttgatggctaaatgattagtgtagactataactttcgttcccacaagataagagctgaatttatcaaaagtaaaaacaacagccagcaactctttcttggtggttgaattatggatttgagcatcaatgagtgtcttacttgcataacgaatggagcaaaagatcttctttctttaccgcccaagtactgcacaaatagcaaaatcactagcatcacacattaattaaaagggaaaagactagtctggagcaacaatgatttgtgcagtaattagagccttctgcaaagtcataaaggcatcatgacactccttaattagtgaactcaaactattgatttttctccagcaataaacaaataggttttgagatctttgaaaagtccttaatgaaccttctatagaactccgcatgtcctaagaaacttctaatgcctttgacggtggtgggtggtggaaatttctcaatcacttctagctttgtcttgtccacctcaatgcccttgtgagaaattttgtggcccaaaacaatgtcttctttcaccataaagtgacatttttcccaatttaagaccaaattggttacttcacatctcgccaaaactttctttaagtttgccaaacaataattaaattattcaccaaatttagaaaaattatccatgaaaatttcaagagtcttttttgccatgtcggagaaaattgccattatacaacattgaaaagtagtgggagcattgcacaaaccaaatggtatccgtataaaggcaaaggtaccacatgagaaagtgaatgtagtcttatcttggtcttttggaggaatagaaatatggttataacctgaatatccatcaagaaaagaataaaacatttttcttgccaactggtcaagcatttgatcaataaatggccccagaaaatggtccttctgagtggcattactaatcttcctatagtccatgcaaactcgcccaccagtcactattcttttgggaattaactcattgttatcattggttgccaccataacttctcttttcttaggaacatattgaactagactgacccatgagctgtctgaaatcgggtacacaatgcaataatttagccacttaatgacttcctttcaaactacttccttcatgatgggattcaatcatcgctgctgcttaatagagttggtaaaaccagcttcaagcaatgttttatgcatgaaaaagcaaggaaatatgccctttatgtcttccatagtccaaccaatcaccttcttatgtttcttcaacacctctagcaataaaccttgaaaggcttgctgaatttaaaagttagtttgcttgaatctatcattgtgacttgaggcccctcttcttcactgaactcttcatcatcttcaaacatattcaaccccaatttagctttgcgagtttctttatggaaagtttcatccacaagtgactcaattacactcaatctagaacattctttgatgtcatctcgaaatttcatggctttgaaaacactaaaggtcacttgtttatcattcaccctcatggtaagttccctattttgtacatcaatcaaagtcctcccagtagcaagaaatggcctcccttatatgattggtacatctctatccgctttataatcaagaatgataaattagctagaaatatgaacttgtcaacatgcactcaatttttccttccagatgagccatagatcggttcgccaattgcaagataattgtggttgatctagcttctccactgcctaatttcttgaaaattaacataggcattagattaatactagcacctatgtcacataaagctcttcccaaatctcttccaccaatagaacattgaattgtaaacatactcagatcttttaatttaggaggaattttacttttcaacatagcactacagccctctgttaaaataactgtcactactacaaatatcaaattcacaacggtcctaaaaacgatttttttcagggaccgtcgctaaaaaaattaagtaactatttaaaaccgtggggaaaaatttagtatt

SEQ ID NO: 307299 - DNA, 1758 bp, Cannabis indica
tatacaaacaaatacaactctaatttcccacaagaaatagaccccaaaaaactgcaccaagaagatagctagacatatagactagagtagacataaggccctcaattatggccaaggaaaaaaaaaaccgattttataaactttttagaaattacatttaatattttctaagtttaccaaaacttggtcaatgtaataaatatccaaattatttgtgaaagtttggttgagcagtttcaatttatttatttattactcttcaaatgacatttttatccctattttttttctcttccacccattttcaccttctctttctgttgttgtagtttaagtttattttttttaaaacaacagaattacaaggaaaattcgttgtccttgatacaaaccagcatctaagctagagattctaactcttctagcaaggtcatccgtcgtaaaaaaattcaaattacgatacaagaacaaaaacttacaaacattaaacttttaaactaaatctaaaatcgataacaacacattcaagaagctccagtccggaaggcttctattctaagccatactattgactagaattagaaaaaatatgaattaccttccaagaagattggagagcccaagaaagagcaaggtgaattgctcgagtttctacctcgaacacaaatgtcaacatcctcctgctaggcatgactatcctctcagaattccatactgtttttggcatcggtgtttgaaggtgagaagaaaattcgaaaaaattaactccaatttaaaaagaaaccaaacttagatccgcagatccacccttcagtctaaggaagtgcctttgatgccaaacttctaaggcaacacaaccaaaataaaaatcaccataggtctactagagtttagaaaaataagtaaggaaaattctaacatctgaatcaaagaatcccttaaaatgacatctaaatggcatggaaaaggaccattaaaccagatagttttcataaaactacaatctttaaatagatgaacacaacttcctccaaaacaccacacagagacaatcttttttcgataaaaatagaagcctcaagcttagacctggtatgaagagcttcattcagaattctccacaacatgacaacaaccttaggatgtattgacgggtgccatatccatttccaaatctcttgctttggcaaatctcggaacttgatccacataacatgcatccttgacagtatactggctatttttcttatgtttccaaaccagctagtaaccgaaaggagtattccaaagattgttaatttgagatatctgcgattatcttttattgtaaagccactacctcttaaactcttcattaaatcttgaaaatcctttagcttcagccaaagaatctaaagttgtttccaaacatcaatggagtctccaaaggcagccaaggaaactgacccgttaagaatgatatctctagacttaaggatacccttccaaatactagactcatgacttatgttccacggacccaaaattttgaaattaagcaacaatactttccttccatttttataccacatcaaacaaacatgtggaaatattaacatcttttatttcgctagctcattttattaaaagtttactctaatagtatatcaaattgtgatgtagatatgttacataataaaaaatatcaaaatttagatcacagtatagcatgatgtaaaatttatatcataataaatgtgatacttttatatttatcat

SEQ ID NO: 307300 - DNA, 1988 bp, Cannabis indica
tataatcttcaaagactaccagaaggaattggaaaagtggtaaagttgagatgtctttatgtggatggttgttctgagttgcaagggttaccaaaaggggttggaaaacttactagtattcaaaagctaggaatgattcccatacccaaaaataacaaagaagcatattttccatttggagatttgaagaatccaaacttctatgatcgctttcaaggattttttcgtataaaacggtgtgtgaatttagcaaatgtgggtgaagctgaaaagataagccttggaaatatgaaagagctcttggagttgagtttaaactttagagtattcgatggaagtagtgttgaagaggaagcaaatccacaaaatgaagatatgatacttgaagccctgaaaccacatccaaacttgaaacttttaacaatcagtcagtaccatggagccaaatccccaagttggatgacttcattgatcaacttgaaatatctttctcttttgggttttgataattgtgaaactttacctcctctagggaaattgccatgtttggaatcacttcaactatccatattttctagtgtgaaatatattggtattgagttttggggaattaatcatgaagaagaagactcattcccgaaattgaggaaactttggtttaattacttctcacaatggaaaaaatgggaagggagtaaaacaacagcaacagcagcaacaagtagttcatcaagctcaaaagttatgccttgtctacgttcattacgaatcacatattgtcgtagtttggaagcacttcctggctttctaagaatgacgccattggaggagttgagaattggtgactctgccatccttgaacattcttgtttaaaagaatggcttcacatccccaacatcgaaattaattacagttttgtacaaaaagatggaacatggatcaagaaggaaaatgatcaaaatatgtctaaagtaggtgaacaatcgtgcaatattgaaattgggagtgcttcttctccataaagatccaggtatgtaagtacttatcctatattgaaccaaataggtaaatataatataggaaattttgtagtagtagactctcatgaaggttgctttggtaggcccatatttgtttcggttgtacgagatttttctagtttaatttttttttattattgtatacactatttataaatttttaaaaaattttaaatagtttatagttctgaaaataaggtttaaatattaatttatcacacatgtatgaaaatagttgcccgtgtaataaatatataagacttattttcaatattgtaaactactcaaaatttttgaaaatttacaggtagtcataaacaggtacaacgtatgcgatcaaaaaaaaaaaactaataaatttttttgaatgccgaaacatatagtaggtctatcgaaacacctatttagagagtgcactgtagacttaccttgtaatataattatacggtggaccaaagtttgtttgatgaaatttttacataaaaaaaaaaaaaattttatttacaaaaatacgggtatctaaacttttatacttataaatattaaaatttttactttttacttttatatttgcaaaaatatcatttcatcttccctcactccttttacacttctcactttcaatggcagccacttccaaactccaaccattggaaatctcgtctccaatctctatcgttgcaggtctcatctccaagtcccaccttcacagatttcgtctccaaactctgatgtcgtcatcaagacattgttaccaggtcctagttgtttgcaacccctcctatgtcgcgatccaattggggaatcaatgttccgggtttcgtctccaagctccgacgtcgtcatcaagacatggtttatttttttgtcattcaaatttttatattgaagtctgtaaatttttttcttattttgtttaaacatcatgaatggaagttttgaattga

SEQ ID NO: 307301 - DNA, 816 bp, Cannabis indica
aataaaacatacttggtagtaaatctagatcctggtaaaatatttccaacaataccttgctcactagagtgagaaagagtacgttgtagagaaagtgtaaatcaagtcgtaaagtcagagaaagagagtgatcgaatattagtttatcattttaatagttccaagaatcttcccacgctaagtccgagtaaggacatatttatgtcttaggagaacgattagttcctgaaatgtagtccatccctagagaattgaccttcctctacttttccagggatgggcgctatcttctaggttagaggaagactagatgtattctcctcaacgtggcactgagagagctagtcttctccctccgttatgtcagtgaagctcgttccttttgtgggttagttggaaaactgaatatccttcatcttccacgtgtcaaccttatcgttatagtttaggattgaactttatcataggttggggggctagatatgggtatgacccgaaagacatggtttgggtgtaacccatgtaagctcatcaacctacaaccttattattactgacttataagtgggcttccgtaatacttcgatcgttgggctccaaacgatttttggccactacaaatattaaattaattttttgtatatttaaaatttgaaataaatgcatgtttttaaaatatatatatataatcgggtagggttatagggttagggtaatcgggtaggggtacaccgtatacccgtaccctaccctatactctgttggtaaatagtttttaaccaggtatcttagatctactcactaagtatgttgatt

SEQ ID NO: 307302 - DNA, 1830 bp, Cannabis indica
tatctcaacgatattgattaattaatattgtacgatacaaatattatagggctcttatttttagctgtgtaagtaatgattagatgtataatattactgatcatatatacatacagttgtacatagatatgtagcccgtgaataatttttccttaatcaattgagttgtcaatataatacgcagtgaatatatgtgggtgtgtaactgttatgaagttagttctgcgaagaaaactacaaaacaatttaagcagtgtggcaggaaaagttaatataaggactcagtagtcatcatatatgtagttagtatttactacaaatatatttattacatacacaatatgaaacttcagaaagtaaacaaataagcaaaaaaagagtaatactttttgaatcttttaatttagtttacctgtttccgaggagagcatggagttgaataatggtttgttcttcttgtaaactaaactttcccctttttatatcaggcctaagatagtttgtccacctcagtctgcagcttttcccacatctttgaagccctacaaatataacatacacaagaaaattttataagctatgtaggaaaagacgaacaaaactagtactatatatttgcatatatggtctgtgtgtgtattgatcataagcttatatatataatagtatttttttattttaattgctttgttgaaaatcaccagctttagcaggcaaggctctccagcttccatggccatgttcttcgatcgtaagccaataacttctggtcttcctcaggagtccatggtccttttttcaaccctaccttctcacaacatggagaccttcccattttagttatttctttctattgattccaaagaccgaaatactagaagagctagcccttattaagctatagcttatatgatgatgatatacagagagaacttgattatcaaaagatgagaccgatctcttaataataagttataagctagagaaatgccctaaagagatttgggaaagtaagaacatgaatgccaatatatatagaggggtagagtaataaataagtaaaacgtgttaaagggacgtcaaaaccaaggagaaggagttaataataaatatggatatgacatatatttaaattataacaatatatattcatattgtatataaatctatatccctatgatgaccaatatacccccttggctacttgattcttaattaataattctctggtcctgcaacccctctgaaaaaaatggttattccaaaattaattaatattagttatcatgaaattaataatcttgagtagtgtagctaattataagatggcaaaagagtgctggtccagcttgcttgtttacgagacacgtgcctttgcagtccattggataatgtaatttataacgtatatatagtgttaggtgaagctttaagcgtattattaatatgtcatggctccttctctctttgcagatttgtcaaataaatatgcttctcattaattcattattgtaattaaaggctctctctctctcttttatgtttttgttttaattatttctaaaattcaaaacttggtataattagagtcccttaattgtaacctaagattattttcgtgtctacgctagtgttttcttaaatttgagactactatacaggaatggtttcacaattcgtcatattaacttcttctgttggcactagtttcttttactctcctcaccacatacctttttaattacaaattagaaaaaataaataaaattattttcacaaaccatttaccaattttaatttcgtaaaaaaaaaaattaataatgaaaattt

SEQ ID NO: 307303 - DNA, 2196 bp, Cannabis indica
ttattttcattgttttagagatattcatatttaggatgttaattcaatgtacttgttagtaaatctagatcctggtaaaatatttccaacaggtctgtcctacgagaaagcatagagcaggaggcttttactatcacgagacccatactaatgatcgcgagatcatcgtaaggctacccaataaaaaaggagttcaaggatgacttcttttggaccacttgtctgtatccaattaacttcactaaatttcgaatcatacataactactaagttctctcaaatccttggttttgagttttctttttcttttgtacttaactaattctatttttttttcatgtttctagcgttcactaagagacccatctacactctagagataaaggaaagacatgagatcttactcaatcttccctatggcctacgaccagcttacttcttgttacatggtaataatctaaaggcatgtgcccttctcggtagagatcagtgcacaatgactttaaaaccccaagtttccaaactagcaataagtccctttgcatgaggaagaagaagactaggactatgttgttcgcatccactaccttaaaaacgtaaccacttgggaacctgaagacgaggcctcttgaggtaataatcttggtgcttgtggatggtctcctactcttcttagggccgatcgaacaacattagttcactttaaggatagtcaatataatttattcatttaaaattgcatcgacttaatggcccataggtttgatagttattatcctaaacatcacgtccaattaagttgtgacagctcctactttagaatcattgaacagtatgaaactaactttgatagagctagttgttcacattaggatatgtctcccattaactattttgatctttatatcattattggatttagggatttaagtaattattataacagttcctcctcgtctgaagattatggtaatattctaagtgggagatttagcctcgccacctttataccttttgcttgtacaagttttaatgttttttaatttctatctcgcaaatatgcattttgaagaccttctatgcagtccaactggtcccactaagtgaggcaagaaaaggacagcctctgtggaagctacctctagattaaacccagaagttacaaagagaaccaacaagactactggtaagaaatttgcctcaaccaagctttcaatcgaggcagaaaagaccatagccactctttagtgccaacaatttcaagctctagtagacagccttggggtctatccatctggtcaaatttttaggtctcaacctatgctagttttattggagccctcctgtccccttcctatcatcgcaggcgttgatgactcgttgtatgttacctaaaactggcgtcacttcaagactttccaacaggaggactgggatttaatcaactagggaaattttcaagtcgtatgacaatgagtgttgaacttctgaagtcagttagtcccaaatttataaaaaatttgtatatcttattcattgattccttcttctaacctcgttttttgcaggcttccttcttatcttttatggctcagtagaggggcttccaaagtgttacacctcttagcattgaacttagcaaacctaacgaccagcacgaggttttggctaaccaatggaataaagcttcaatggagatctctcagttgaaaaggaatgctaaaaactaagacaaatccaagaagccctttaagattaagctcgaagctgatcaaaccaggatcaaagaacttcttgaagctaaccagatggcccaaaccaaatccaacaaaaagattgaagaggacaaatcggatgcaaaggtgagggtcaacttgatggccaagctatccatttatagagcatggattgcaaattctgaggtggatttgagtttcttgggtgctagagccgatgagatgcgagcatacagtgagcagaccaagaaggatgaggttggttatgctgaagaaggcaaggtttaagaaaaagaagaagaagaagatccctctaactctttaattatgtagacttagttttaatcatttcaattttcaaacaatggccatttggctgagacaatgttttgccccttgtggaatttattatgtaatatattaatttttagagtaatttgcggcataaatacctaaattt

SEQ ID NO: 307304 - DNA, 768 bp, Cannabis indica
tgtttctttattgatgtagaataaaatggattacattgaaatagagttttatttagggcataaaacccaacaggtatgtcatatggtacctggtatgggacttctccttgtgcatgccccctatccagatggccccttagatgaggttgtcttctctgattgaggtgatcatgcaagtttgggtcccttgcatcatgaggggatgcatagagtatatctcaaagtattgagatggagtgttgccatggaaactcactaatcagctccttaagttggagcgataactatcttctaaaaagcttaccgttctttgttgttgggggttctgaggtacagccccttgttgacgatatgtttgggagtcggtagtctaggaccttgataaataactatccttctgaggtggaggttgggcgtatccacgttcccttggtacagatcttcaacgaacatagttatcttgagagacatcacattatcttttccatttatgtcccctaagttgaggttctgggtgaatgtagttatctcgtgaattcccttacctctctcgaggatgttgaggtaagtcttgacttgggggtaaactaatggttccccctaggttgacaacacaataaacaagaatatcagtgtgaaaaaggggttggatgaatttattaatcaaataagtaaatagatgatcacatgaaccaaataacacattaaacaagtaatgaaattaaatctgtttctttattaatatttgaatggaaaagattacattga

SEQ ID NO: 307305 - DNA, 2453 bp, Cannabis indica
aaaaaaattaatctgattaaaaccttttcctatcatcacttctaaaagttatttctcatgtattgagaataaacaagaatacaatatacactttatcctaataactcaaactatttcttgtttgtgtggtggaagatttagaagactatgatatgagttcttcataatcattcgaggatacaactcacgaaaagaaataaggatactctgataggtttaaaaaagtaaattttcttttcatcgatttatttcaaatttaaggtatatacataaggtgatcttgaggatgtggtacaatgataataaaaaactattactctgttacgcacctaatttcgtaccacaaaattaacaccggcagaccccattggagggagattaggagttgatattaaaacttgagtcggataggctttcgcatagtgtatcaactttcgggaacaaaggatagtcttcagggggttcacaaaggttaattatgacttgagcctctagatgggtgggaacctcccaaagcctcgagagtttcattccctctcttcgccatattaccaaggcaaggtatagttgatgactcttttcatacacacgacaaatgggtctgtccttataaaggagatgtctttgggatttcacatctccccatatgcacctattggcggcttactcttgcagtgtcccatcagccgcaaacacatctagtcttgtctcatcaaactcctacttcagactctactcgatatccccattaccaaaaatcatttcctaagcataaaggatggccacaatagaccctagctagtaagaaaagatgtattgaaatcattggatgcttttccattttcacctataagtagagcaacaattgaggagaagaagatatccccaacagaaaaactctttaaaaattctgttgtaagaacaacattacaagcattaatacaattaacttgtatactaaggctaattaacattccaaccatgtaaaaacatgtttttctttataatataacttagcaagattaagtaattatcaaaagtctcgatcaacaggatccaaaattaaattacaccaagggacaaaaccaactcaactagtcctctggaggcaactactagaaaataagtatctattagaatgatgatcgaatatatttatggtatgttacaaaattataaatttatactaagtttttaacaacttaatttttcatataacaattaattaattgaaaaaatcactatatattactaaataattataaaaattgaaagtgtgtgagactaaaaatatcattatattacattttttttatgttttaatttttttaataaatcatagaattttattcatggaactcaactaaaatattaaactgcaatttaattgggacatcttctcgttggagatacaaccactattagaattagagaaatgagccaaataattagctgcctaattcgcaaattttttgacaaaaaaaaaaataaaatcagattaaaaagattacagcatcacaaattagcttaagagtacctatattctgtttcattcaccgctcagatgatacaacaatagaaactgttgttgtaggttcattaaacatcgtagcttgagcattcagctattgtgtaaggtatgtaactgcactactaacaatcccttcaatcgcagagaactcgttattaccaatcagtaacaatagtttgatggcgaatcatcgaaaaacaaagaagaaccaactacaaaataaaacaaacaaaatcatgttatacaaataagactaaaacactcaaaattatatcacagagataagactaaaatactcaaaaccatatcataaagacaatactaatcgcggtagcaaaaattaaattgcaatagcaaaacacaattctaactaagccacacctaaaatttaaggaaggccggtaggcatgactagaggaaaaagactacataaacgagatatacttgagttttctccttatttgtgatacatatttttagtttttactaattacaaacataaataaaaaataattaactaaaactttaaaataaatcacacatatataattaaaataaatattgaattccatccttccataatttcaactcttgaatattaattaattgcgtaaataactcatgacaacattctctctataaaaattgtatatattgattgttgatattattattattattttgaaagatacttactttttaattatacttatttcatattattattattattattattattattattattattattattattagattaattagaatttttgtcccctaaactttgatatataccaaatcatgccccctaaatttttaaggtcgttgaaaatgccccctgaactagtgagattgtcagatttaaggactttttttttctaatttagtaaaaattaacatggatgaaagttca

SEQ ID NO: 307306 - DNA, 1668 bp, Cannabis indica
taacattttgacacgaggcttcgacaacaccttctccttcgcgcaccaaattaacatttgtgagtgaaattccttcgcatggattactcttgctacactcgaattttactgccacttcagaatcactcgttcctcttatgttgttgtacactacatcgcttatcttgacagctgacctctgccacataatactctttgttaaaatcagtttgataatgtaataataaataatgtatacttgtatagtgctttataacttatgttttttttttttttgtttataaaacaatttatgttacaaattatgtatcaatttatattaaggttaataacgctgaagttgataaccaagaacactactagggtttattattaccttttcatgacaaggttcatcttggtcacaataattttgatcgatgattattgggttggtcacattgatcatttctatattttggaatatgatgttttttgcataaccggatcctccctgcaaaaattatgatatattgtcaatggtgactttaagatttgatggacattgaaaaaaaaaattatgtcttttaattagaaaaaaaatatattatatcttcaaaaactcttaaaaatatatgtatatttaaatataatttttttttttgatttttgagctgaatagatcctaagcgcgtgctttaatcaaggcaagtcaactatattcacatatacaaattaaagtcaaagaatatatctatatgaactattaatatgtgtatagttttctttttgccataaaattgcttttagattacactcacttatatacatgtacatgtaataaaaaaacacacacacatgaattagaattaggtatagtaaaggtcaacattagcatagtatgcttgacttaatatggataatatttgtataaatatatataaattaatttatgggtaatcaaaaaaattagtattggtcaagtatagttgcaacaatattgaaataagttcacaactaattaagtcaaaaagtaagtaatagttagtattttaattagcaatgcatgattatttggtttgatacaaagtagaaatggttagaaaaatgtcattatttttggtagagcacaacaaaaaataccaaaaaaattctctactactcttttttattttttaataattattatttagttcataaaccactataccataattcgccttaatgtatgctaaaattaattttatatatataaatttggacaaaattcacatgttcttaccaaattttcaaaagggtttgataaaatattgcattagaaatctagtaaaatcaagaaaaataaacaagtaaatagtattaaaatgtgaatatattttcttcccaattttattttttataatttgttgacatgaaaatcttggtatatagaaaattgattaataataaaaataaataaataaataaaaaatctcacctgccaagttttaattcttactccattagtagtgcctgaaattcttgctctattcaccatcacattagagacttcagcttctgaatttccagctcctaagcttccaatgctataaatatatacaaattaattatgaaaaatagctttaataaaatacaatttaataaaataatatatttttataagagtgatttacgacataaataactaag

SEQ ID NO: 307307 - DNA, 1540 bp, Cannabis indica
aaacccatgcatacaattctcaaatatttctcgtaaatattacacttttttttattattattattattattattagaaagaagtgtattagattaaggaaaaaattaaacaatttacattaaaaacaagaataagtaggaaatattttcttttagaacaataaagatgggtgccatatatataggcacgcatacatctcctagtatatttatatagaaaattctgtaaaagtattactagtatatcttttttccttttttcttttcattctttctattccttcctcattcctaaaataaataaaattattagagaaaaaaattaattttatgtatgaaagtgttataaattaaaaaaaccatatagtatctaaaaaccagttttttaaaaaccttttaaaagattaaaagaagaaaaaaaatagtacaattctaattttatgaaatttgctcaaagaatttcaaagtcgtattattgagcaaaagataaaaaaaaaaaaaacaaaaaaataacccaaataaaaagaatccaatttcactcgaaaagttacatataatcttaatcaatgtttattaaattacagaagaaatcttacaaaaaataaaaataaagaaatgtagctgacattaaagtatatggcatataattgatgatgccaaatttttaaagtaatataaaaatatgagtacatgagtgaaaaaactaaatttaaagccctttctcttcaactatatataaactaattacattatttttttattaggacctattaatctttaattccatccaattaacagtaaaagatgataatgacttgataatttaataaatatgtgtaaagatatataaagtagtaatttcaccaaaataagttggtttttaaaaataacttctaatttttcaaatattattagttgaaattattgttcccaagtgtataaaaaaataatataattttaaaaaaatattattagccacttacaaaatatatatatatttatattaaattattaacaacctgctatatactaagtcattgcgattgaaaagtgtcccatttatatataatatggatattcttactatgttggtttcaggttgatgaaggaagcagtgtggtagcttatcacagaaaacatcttccaaaaatcagtatgttgttgtctttgattaattgggtgtgcatataagtataaaatatataaatatatatatatatgtagttatttatacatgagtatttaaaaatgatgtatatttccttttgtttgcttaattttttaataaaattgtgagtctaatagtgtttaatgttatatatagattgcaatgatgcatgtgggaatagatgcaagaaggcttcaaagaggaagagatgcaagagagcttgcaaaacttgttgcgtgagatgccactgcgttcctccgggcacttatggccataagaacctctgtccatgttatgctcgcctccgaacccatggaaacaagctcaagtgccctaattaattatatctaataataataattattaaaattaa

SEQ ID NO: 307308 - DNA, 850 bp, Cannabis indica
tgttaatttttgtatatgtatgttatttttgttgtttttgttgttattttgatgttattttcatgttacttttatgttgttttcttattgatttatgttgttttcgtgttactttttggaaaaccgtaaaaatgtaaaaaaacattctttgaacgtaaaaatgtaaatattttacaaaaaatggtgtcttatgtaattattcttatttgtattctcattcaagaagctctaacaaatattgtgccaagtttggcacaacattctctatgtgccaaatttaaatcaccttttgatacattcttggagtacatttttcctaactgaactgtattttagttttacatcacatatcttttggagcacatttttcttaagtaaacaatattttaactttgcatcacttatttacatctctattaaaaagatttgtatttcatattatggtttgtttatttttatatattgaacaatttttcttatctcttgtttatgtaatgatatgttattttattttgctcgaattgaacaaccttattgttttgtttatatattagtttacattattgaatttccaattgaacaaccttattgttttgtttatattttagtttacattattgaattgaacaaccttttcgtgacatgttccgttttgtttatacaatttattttgttggataattagattgtacatccgtttcactatatttttaaggaatcttcgggtggatagattagagattggtggaatcgagggagaagctaatctctgaaattttgacattatttgattttactccttaaaaatatatgacttgttaattttgttttaaaaatataacagttacat

SEQ ID NO: 307309 - DNA, 1561 bp, Cannabis indica
attttcataattaaacatgattaactgctaatttccaaattaaactaagcggtttttacacaacacctagtgtaatatcctgaactttgatcaccttccttcttagtcctctaatatgttgtgcacttttgtcgaggctagtgttgtcactttccataggtttcttccctttatccatcatcgtcggccacttcacggtgggatttctaggcggaaggaaatttgctctggcttcatttttaaatcactccaattgatttcttgtgttgaagcaactgattactgccgtctccacttttgtccacgggccaaacgccataacagctttcccttccaagggatatgcaaacaccgtcggtctccatcagtcgttcttatcatgtcctattctttcacagttgtagtaaaattttggcagtttgaagtagcggaattggatccactccttccttcccctcataatgtccaaataaaagccaggaatcaattgttgattcgtatatatttctacttggaatttaaagaatccgcgtctagagatggtgcgttgatcccatgtatcactattcatgaatgttcctactttagcagcaatgattgagatattagacctattcaggtagggagttgggagccccgtagcctgagcccaaaataccgtcttcttcatatcgactactgtccaatttgcatcctctagccattccctgataatcagcagcttcccattgatgatccaaggcctcctgtgaagaatctcaatgcaatcctcttctaaatcaaagaaaattcccaacatccctggtttcagtgttttgaacctccactgaccttttatcccttgtttccatatgttaccaaatttcctcagcttcattctcaaaaggccattaccgtcgaagaaacataccagtaccccaaatcttatcagctcgccatttatctcgaaatccggctccaggtctagagccattgtctgaacaaaagtgttctgaagcttctctagctccccatcgcaatcttcacctccagtctcttcctgcgtagtcttttgtaccttatcgttgttgctctcttcctaccttccattattatgagtattagaagaagaagttaatgtctccttatctgggccatttggagtagataagtcgacacctaccccttccataaattctccatctaccccacctgccacattctcaacattcatttcctctatgttctgattgctatcccccattacacccagcaacttacttcgaaagacccaacaacaaacctccgacaaacaagaatgtcaaagaaagaagacacaaccgtctagttggaccccaacactccatcaagggagaaaaaaggcttattccaatttccaaaacatcaatagcaaaatgtaattgcagagtgttcgactggatatttattgcagttgagttaactacttgtgtcgaaattttggtggcaaaataggtaagtagtgaattttgttgtacttaattacttatgtaaaaaaaattatacattttaatgtataaaatatgactatctaacagttttt

SEQ ID NO: 307310 - DNA, 885 bp, Cannabis indica
agagttttcttacatattaatcagattagatttgaatgcagtctgggccctcacatctgctgatcatttggcttttaaggtgaacatcgaagagcccttccaatggttctctcctatgtctataagaagcttgtttggattttaagactctgtagttcagtgattcacaacattgctaggtgggctaatacacaagtcgaatatatcacaaggaaaatctcacatgagcatgtggatcgtgaatctttctacacttatcattggaaatgagataccctactatcacaaaagttgggcatgtgaatgtcttttgtaaatagcaatcaaaatcacttacctattatctatgtcattcaaatcattattcacatgtctgaaaaattcaaagaaaaagtaaaaacttctttcatatccgcagttaatgaatgtttaattggggattcgaatcggactgactgattgtacgagcctgcacaaatcaaaattatgagctttcaaaagtaacaaaatccaatatcatctcctccatgagtgttacgtggttgcgtacaatgtcaaaagttgttggagaaatctgaatcgttgagaagaatgggtcctgggtcctttatttgatttaagagggagctcaaaaattttgacatttgaaggagatcttggtaaattgggtcttcatcttgggatttacgttaaagaacttgagaatttgaattttaaaggatgattaaccctaatctttagatttaaaatgagtaccgataaaataggaatgtgttatacccaaaattcggtaagcacatcagaagaggacatgtgtcgagctaggacgaacgaagaactcaaacacgcaatcgtaggtacacttggcatggaacaactcgttag

SEQ ID NO: 307311 - DNA, 1825 bp, Cannabis indica
aagattgaccttgtgttttgtgtgtgtgagttgacttatgtagggataagactgtaaaatcccaacatattatttttatgaatatatattacaaagtaaaattaactgaaaacttaattaattataatgccaaattattgtaaaattattttaatagaatcgaaatctattttatcaaaaatcagacttcatagattaaaattatactgcaaaaagtaaaattgcaaaaattagaatagcacgcgagatatcaccaattcttgtaatttgttactagtctacaatcagtacttgatttgtctaacaacaatctctctggtcaaattcccttaagtttagcaacaatatcatttttgaacttcttgaagtttgtggatctcctctaacaaactcatgctctaatggtaccaataatggaagcattaatgttgttgaagatggtgacaaatggttagacacatgaaacaatttcatatggaaattggagttggattcctcgttggaattgttggagtttgtgtcaatatttttctcttgacatcttggagacctgtatatttcggatttcaattgaaatggctaaattcaagagaatgttttcatcaaatactttataatcaggtactaataaattatatatcattatgtttttaaatctgctaattattattagatgacttctgtgtatatgtgttctatatatcattttatgtattattttttttttaaattaagatataaatatttatgtattaaagtgcttttgatcatctgataaggtattggagtagtggagctatatgtggtacgtagtttgcatgaagtttcaactttcaagagcttagagttcaagtggtgaagtaaattgagatcgataatcttatttctaattttaaaattgtacttattagtgctttatgagtagtgtactgttttgtgtgtaattttactctattttacgtgaaaattgttgtattcattgcttttgtgtgtttttgttatatgcggtttctttgttaacacattatttctccaccaaatataatataacaagcttactcatgacaagtgatattttgtatatgattcaatatgagaactagaattgtgttcttcaattgttgattatactgaagtaattatatcagaatgtgatacacatttttactacaacaccgtagtctagaaatttctacacaatatttgtagaaagaaccttaaagtatgtaatttctagataagatttagtttagaattatgtgaactctaaatcaatatttagatgtgtatggatacaatttcttctaataaaagaataattctaaccaaaaagtgtaaaaggtaattaagcaaaatatatctcatcaaggaaccaaatttaaaaaccaaatgaagtctcctactacttccaaacatactacctacttttctatttgcccatatataattattttctctcgtataattctcttctaagcaagacaaatctctagtatatacataatcaatatcactatttcactacattactatcacacttattaaacacttattccttgtataaccaacagtataaatcattattcttatatcactatgcaatgtcacttttgccagcacatttttgtgctgacaaaagttggtattatgctggtaaaataaaatttacttgtaatgtgttggtaaaagggggttggtaaatcaacattggtattagaacttttgccaacataaaatgaaaagtactggcaaaaataatttttcccaacgcgtatatgtgttgcgatattttgcacacgcaagtgtacgtatcgtttcaagtagt

SEQ ID NO: 307312 - DNA, 1480 bp, Cannabis indica
caagccccatcatcaccaccaacagcctcaccaccaaccgccacaccaccaacagccacaccccccaccgcaactcctcccaccgccaccccacccactgcttcaccacccaccgcctcacctccaccagcaccagttgcctcaccacctgccccaaccccagccccaaccccaaccgctgccccaactcccagctcggctgccccagcccccagctccgactcaccagcttcatctcctggtcccgacgcttcttcaccaccagctcccactccttccggctcaccagccggtgctccctctgctgactctccagcttccgactcacccaacgccgcttctacctgggctagccgagccgttctcgttggtaccgctcttgccggtacattcgttgctgttgctttggcttagaatggatttcttccacgtgagagatttattggcgtttagatctatgatgggattggacggttgagatctatttatttatttgtctatttttttttcggggtaattattattctctttttctattttttttttactttctctgttgtgtttgttcattctatttcttctacattatttgggcttgaatgatttgagtggagaggtggaattttgggatggggaagactacgctctatgattcatttgttttgctgtcgacacgtgtattgatttttatgtagatgagtctgatgtaaatctaataatagttgaataaaacagtttttcattctttttcttgtgatttatcaaataatatagcatatttagtgctaatcctaacttgataacaaatcataaaaattatatatagaactatagcatatatttttacagaattccttctggtaatgtaattctcaatatctcttgaaaatagctaatcagttttaattgattaaagttttaataattattgttttttaatggtataaaaggtattagttttgtgactttgtgcattttatattattactgttgatggatgtaacataatacaatgtgtgtacagctcattgaggtggcacttggcataatagagtagtaactttaaagataagattaacttttacaggatggctttccttaatttgtagagtatttgtttggtatcaaattgtgacacatattagtctaaatttgaaaagaatacaaatgaatagagagtagtaagtaagaagtctctattttcttctatttctatatagtgtgtttagtttgtcaaagaataaggaataggacaagttatctaaccttcatgttgtacatatacatagatatataattttgatacttagagattgacattgaactaatatacagttgaaaagccaccactactattaattgctgcataaaatttgtgttcaagattgaagattcctaaggacctttgggctttgcttgtccccagctgtactttgcacaataaaaatgcaataattttatgtttttatttattggggtt

SEQ ID NO: 307313 - DNA, 1237 bp, Cannabis indica
ctagaatgaatatgtataacaattagttgcacacgatcaattaataaaacaagcatgtatgcagttgactatctgaattttatcagggtacaattacttagaattttttcaaaacagaaaaatataatatgtaatgactacataattaaatatgaaaactaataattaattagtatatgatagctaaataatgcttattattattagaaaataggtaaatatgatataatttttttaattacggagattttattaaattatgtgtggtactatattattactttaatgttcagtaatagtggaaactcgataaattgatcaaaagtgtcacattggtgtagataagtagtttagatgtaccaaaattttttatgaacatttggaagttttgaggctatatatgtgggttattggaaatgaccattatgcccttgagatatttattcattataattttgtgtaagggcaattttgtaatttgccaagtatatgatggataagtattacttaagtaatattaagtcttgaataaaatagaggaagaagaaacaaaatcagaatttgttgcaattaattgaacaatattgagtggcaagtttcgtaaagattgtacatattcagtcttctaaatttggagggctgcgatcttcaagacaccatatagcagtattttgattatgtaactagacgataacttttgaaatattgtatatattaagtatgtttataaatagatttcggtatctcagaccataagaattttgtaaacatattttaagtttattaaagtttataattattataaaaattttattaaacacacttttagtagtaagactttaaataatctatcataactataatatataatgtcacattaaagaaaatagggatataattttctaagaacaatattcctatataatataaacgtgtatatatatgcattcaaactagacaagattagtaattagctcaattttggggaaagaaataaagttgttgtttgttcttataattattttttcaataaagaaatgaggaatgagaagaacgagtagtgatagctctttttgttgatgaagacctcaattatagtaaaattatcaataatcaagtacaaaaaaaaaatcaattagtatataatctttatcattaagttattatatatgttcatacatacataaacttaattttcaaaaaaattgtatatgttatggtcattaattatgttttg

SEQ ID NO: 307314 - DNA, 909 bp, Cannabis indica
atgggatggtttagtgggagttagaaaaaatttggaagaaacaaaatgagagggaaatggttgaggaatcgtgggagttaaaggttcaacaatggaggttatttgttatttcaaaaaaaaaaaaactgaaaatgaaataaaaaaaatcaaaggaaaacaaaagaaaaagagagagggaagtgattgagggatgcatgatggttgataggtgagttgacgtgactggtgcatagatgtgatgtgtatgtggtatatgtgtaataaaatataaagaaaaggtaaaaaagttgatttgaccgtgtataggtttatatgtaataaagtgtgcaaaatggatttttggtgtaaaaatttctaattaataataaacagttgtaatatacttactacgtacgtacttatatttaatccatgcgcgtttcataattattatttattgtaaacatattaattgattaataaacaattgcaatagtcatcatcttaataattagatactttttttttttataacaatattcacctacaaaccttaacaaacctaactataagtaaattcattttataggcatacatatattaatttcaccaaaccaagaaaacaaaccgaccatataatttcagtacttcagtttacgtttgcaaattgactaagttaattttacatgaattattttcagaaagaagtacaactatatgggtttataaattgaatttccaataaatatatacgtaccaacaataataaattattgaattaattaatgtatatatagtattcatgatggaacaccctatagcctaaatgatgatgatgaagacgaatatgaaaatatgatctctcttttcccatcaccattattcaccattgatccatatctcaatatatataaaaaaaaaatgaaatta

SEQ ID NO: 307315 - DNA, 1009 bp, Cannabis indica
ttcatacattatgtacatataatcatgaaataaatcatgtgaaccatgcaacattaaatgttatttctgtatctatattaataagtaaatctgattatattgaaatgagttttatttagggcataaaacccaacacatgttacttaaaagatgaaaatggatggaaaagtttaattgctaataagacacgaattttagggattttgtcgctaaaaataagttttgggggttaaatgctagtgaggtgaaaatattgagaattttaccgcaatttactcaatacgttataatattgacattgggttgggtaggtgagacccaattcataggctgtttgtcatccgtacggattcataccatttgatggtgacaactgggcatgcgccaccaattgtgaataatgggtgtcaagatagtagatgttggacaaaaagtggtttgcttttttgatgtgcgccatttccaggtctgacacaggggacaaaccctcttcaggatatggtctcaaaggtgtgccatgtcggatcgatcccgaacggtccgtgacaaccctccgactactctttcgagatatccataggggtatccatctatacctcctcgaatgctcgataatttggttaagtattaaccttccaagtttatccgtccggctttgttcataacagtgtcgtggttgaactcgaagcccaatctgatttttttcttagaccaagccattgatttatttaggccttatgaatgggccatcaagcagatttggattgctaaaatttacatggtcatgctctcgaaacacgaataacaaaaagaaacaaagggttaactttataaaaataaaaatatatggggtttgatcataaattactatgcttataactatttatttctaagaataattagcttttttagtccctgtacttatgacactatactatgatgccccttaatttataagtgtagttaaaaataccccctaaaatatatcagttggaatagtataatcctt

SEQ ID NO: 307316 - DNA, 1474 bp, Cannabis indica
gagtgtaattagaacccctcaattacttctaattacacagtttacagtgtaattacatggtcagacaaacatcctaaattgtgtaattacctccaattacacacaaatccaattacattgtggctttccaaacgcaccctaaaagtcatattgaatattatgaaacatgcatatggagcttatttttaatctaataaaattagagtataattttaataaataaacaaatactcaatttaatagttttatttatattaattcattgttaagaattattctatatatataaaaattctatgcactgatatattcttatctattttagtattcaaaataatattttagtcaaattttttgttatatcatgtaatttatatagttatttaagacattttacaaaattttaaaaaatttagaaaaatttaacacccacaaaataaaattcaaatattgtgttgtgttgaacatgtgactattctattttatacatgtatgaaatagattgtttaaacactgctttctttctatatcataaattattctgaaaaaaatttataaaatatcttaaataactataacatacacaaataaaaaatcggactaaagagatgtagtatcaataagtttatgcaacaaaagtatctcatttttttttatataataatcagattggcagaagctcgacaacctttatggagaaaaatcccagtatcatcaagcttaatcagtccataccgtatagtcatcgttcttcgaatcattattctcttcttcttcctccaatttcgagtttcgactccagttcaggacgcatttcccttgtggttgatttcagtgatgtgtgagatttggtttgccttatcttggattatcgatcaacttccaaaatggaaccctatcactcgtgaaacctatttagatagactttgtattaggtttgagcccaataataataatctctcccctattgatgtcttcatcacttcatttgatcatcttttcaatgagcatgatgatcccattgttatggcaaacacacttctttcgatcttggctacagattaccccattaataagctttgtgtttatgtatcggatgatggtgcttctaagttgtttttcgattcgattgtggagactgctgagtttgctaaaagatgggttccattttgtaagaagcatagtgttgagccaagagctcctcagttttatttctctgagaaagttgattatttgagagataaggttcaccctagttttgtaaaggaaagaagggcaatgaaggtaagaggacaaagagtattattaattggttatgaaattttgtagtatgtatggcttaggggttcttaaattatataagtttggtaagttgtctccaaatatataaatagatagattgtaatatgcatgacttataaggttttattttaaaaaaaataataaaaaaatgtgtatttttaaaaagaaattt

SEQ ID NO: 307317 - DNA, 1991 bp, Cannabis indica
gcaacaggaagagatgtgtggaagagtttccaaacaaagattctaaccttcggagggagattcagcttccaaaaatttgaccaccagtgttctattgaactgctgcaggttgattcatcttgttcagcaattgaaacagctagcttgtaacccgatttgacattataaatccctgtgaaagagtgattccaaaccagtacatcgtcatgaggaaaaaggcttaaaggaatggtgagaatccgatctatgtcaggttgatcaaaattagcctgaagtgagagcaaatcccattgcctttgcccagtaattaagtctgcaaccatcaaattggagtctgatcctttaaaaaaactaaggtttaaaggtagtgtgcccaggtaaccaagaatcagttttacagtttatgttcagacccaatcctactctccatctcagtccatgcaagagtaattccttccccaaaccaatgcttctccaggttaaggaaggattagtcccaagaccagattgaaggtaattaccatttgagaaaaatctatgccgaagcaggctacttaaaagagaattaggagactcaatgatacgccaagcttgcttggccaagagagcttggttaaagtggatgaaattgcgaaatcccaatcctccttgaattttggccttacaaagaaaattccaattcttccaatgaatggtattacccgaagctgatgaaccccaccaaaatcttgccatcatactttctatttggcgacataaagtaacaggcaatcgaaagcaactcattgcatatgtgggaatagcttgtactactgcttttaataaaacttcttttccaccaacagagaataaatgttctttccatgagctaagcaatttccaaatcttatctgtgattcctccaaaaagctttttttatctcttccagcaaaagaaggtaaccccaaatattgttcatgacatggttgaatgggcatactaaggaggtctttgaaaaaaacctggtcctgctgtcttgtgttttctgagaaagagaggacacacttgtctgggttaattaattgacctgaggctttgctgtatatttgaaggcaactatggatagaccgagctgattgttgattggcacgacagaataagacactatcatcagcaaaaaacaagtgcgatacagaaggggcagatcgtgaaatttttagtccttgtagagcacccgtggcttcttcatattgcagaaggcttcttcatgttttatagtttataatatcatatattaaaaaaataattaattataataatattaatatttatgtagcatgttattttttttagtctcggttgtttgctgatcgtatgttcacgagggataatgtcccttcggaacttgaagttgtacttttgagcgattgctcttgagttaatgaagttgattacttattacaaaaaaaaaaaaataaataaaagataaaaaacaactctataaataaataaatttaactttatttttttaccacaactttacacataaaaataaaatttaattagaacaatccacctcatagtacaattatttatttgatttttcaatgtatttttattaattttcgtgaaaagaagtagccaattatatttttttgaactttcaagaataaagtgcaattatactttaaaataagaagtacataagtaattataagaaaatgaatacttgatgcaaaattatttttctccctttttcttgataaccgaattatttttctcttcactaatatttactcaataatttattcttatttcttaaaaaaattatttatcattattatataaaattaaaaattaatgtggatggagcagtttttgaagatacaaatgagatcggcactggttttgtagcacgcgactgtgatggtcagataattaaggcgttttcaactatttcttctatcagttgccgacctaaaattgcaaaaattctaagtgtcaaagaagca

SEQ ID NO: 307318 - DNA, 2706 bp, Cannabis indica
attccacgtccttacttgtttgagagggtgctccccccatagtccagtgtagtcattgctttacttatctttaatttaatcttacctgttcaaatatttaacaagtgttttcttttgtgtatccatatctgaggagataaaatgcatgctcaagaagagggttgttgttgcatctgaccaaaaatcacctggaaaatgaccaaagttggatgctactcttcccaaaagaatcgccccaagatctaagacgccccaagtagaagttaagaggatatcaccaactgtccttgtggatgtttctgctttcattcccccattgaagaagactttgaaaactcaacctccagtcactccagccaaaagttctaaaggggccaatactgagtggcccaaattgcaaaaactaaatgctactatgcccaccattgagccaaaaagaaataagtctaatgaaatgcttagtttctgccaatatcgcttagtggctgagatcaacgagcaacttactcaggtggaggatatccttgtaaaactcctggtcagcagagttgtaaaagaaattaccatgatcaacctttattccagagttctttgtacgagtttgttgcacaaatattttagttgcatgtttctctttataggctaagttgaaactgtcttatacttattttttagacaaatcctccactctccaaaccaatacaaccactgaagatttgaagaaggctttgagaaggccaaggaagtggttgatctaaaggattagcagctggacgaagtgaacaaaaaactagttactgcgaataagtttattgacgctttaaagcaggaaagagaagacatgtcttccactgccaagcacaaagcagacctagagctagaattcaagagggtgcgggatttaaccgacgaaagggaaagattctgtacactctttcaatacccagaggacaaggtcaaagaattgactgatcttctttagcaaaaggaagaaactttgctaaaggagaaaacttatttagaagagactttggctactaagcgggaggcgcaccaaaaagaggttgaggattatgaaataactacttttgaggtcttctacgagttctggttggaaaaccccaaatataacttcaattacttaaagggagatctctgttttgacatcttgggcttttgtgaagcaaagaaagctaaagaagaattaaagaagtctgtagggggttcttctaccgtttagcatcaaggaaacccaactgctcaagatgaagtccctaggaccccaatggagtaaacctcttttattttacttcttgtttggcgtacatgctttttatttgacacaatatggataaaatagcagcttttaaacttggatttatatttacatgttgtttaagacaaacaacttatcgccttatcggaaagcttttaatcccagacttactctgcttctttatcataatataaatattgccttttgttttttgatttttttttttgctagcttgttttatatcaataatgactgtacgggtataggtgccccccaagtgaccaagtagacctttgactcttggtcacttgtatttcacaggttctattttgtcagtctagctttttggtttaggaaaacccttttttatgcatcttaggtagtcaaataacttgctatcatttgcaaaaagtataaaattaaaataatatgaatgataattgatatatttattcatttattagtcggtatatatagttaccgtgctaacgtatatttattgaattataaaaaactattacatgatctaactgatcattaattaattataacataaaacttttgaacgattattttgataaaaagacattactaaagagaaaagactttttaaaagctataccttggaagtggtcatttgaccttagtaccagttattctctgaacctttgaatgaagtccgctcaaaagaccatcacataagagtgatgtttaaacattgtgcaatttatgtggtcctcaaaccttttgcacttattgatagtattttcttaaatgttcaacattcaaataccttagtactagaacttactccatgttttcatcataccgaccaagcttgtgtgctttatttttgtaacttcagttacttgatatggtccttccgaattaggcttgagcacactatccttagtattaaagaataaccttctgagtaccatgtctctgatgaaaaatttccttgctttcacttgcttgttaaaatatcgagctactttttctgatgagcttgttgctttagatttggtagatctcttttcttcaatttcttcaagtggttctgctaggaggttatagttattctcctagttgtacgtcaatattctgtgggatggaggttctaactcaacggacaacattgactcatagtaataggccatggcaaaaggtctttgcccggttgttgtcctctcagttattttgtatgaccaaagtatctcgtgtaattccttcagtcggttacccttggcctcttcatgtcaattcttcatggtttctttcaatgtcccattgactgcttcgacttgtccatttttttaggagtgtgcaactactgagaagctctttataattccatgtgtcacgcagaagtcaatgaacttttggctgttaaattattttctattgtttgaaaaaatctttttgaggaa

SEQ ID NO: 307319 - DNA, 3798 bp, Cannabis indica
tttaaaattgtgattaaatttttgctttctaaaaaaaaataattactattttcagttattttcatcagtcatgatcacctaattaatcgatcttcatcattatttaatttatttcttttacatgttccatcattaattaataaaagagccaaatcaatgtagtaaaataaaatcttaaaaggtttaaggaaatttcattaaccatgacacaagcttaatctatttgataatgtgtgtccaaattattgcactaacatgaaatcattgaaatgtccttactccttagcaagccacccacttgaaagaaaaaagaaaaaaaaaccttaacctcacatagcttaattttgaaattgcagctacaatagttaatgagttcaaagttaaaattatgtattaattgcgtatgagaatgaatttttgttcaatttttgttaaaaacaaaattatgtattgaaaaatttaattacaatatactttaggtttattagtttgatacgcttaagcttctaataatcaaattattaatattacggttatcaagtatataggattgaacgtaatacatatattatatgggagaaaattttcataaatttgtcctatttatggtgatataaatatatatcaagtacaagttgttggatcatactacatttgatttagcataaataattagtaattaatcaatcgtatgaagtatctaaaaggatgaggatgtctcttgccccatgtgtggtgaggaagagaaaataatggagcatttttttctctattgcaactttgcttatcacttctagcggtccatcccctaagggtgatgtcagttttggactcaagggctcgtatttgggattggatcaaattcttatggggcttgaaggatagaggagtggaggtttcggaagtttttccgtatgcctcgattgtggttgacatgatttggaaaacccgaaatgacaaagttcataataattcggtatgtaacattaaacattgtattgattctatttctatatgttacctaaattttggttcctgtttgtttcctacgaaggtgatgattacgactcctacctggtcactccctttagacgattgggtcaagatcaactctggctttagagttggtagcgactcaatatatgtggtggccctggctagagatcataaataatcaattttgtgggtggctagcaacattctcaacaattatctgatctgctcattctcaacaattaactttgggattatctatcagttggaaacattcttttgtaattaatgagagtgattctgagacgataatcaataccctaaagggaacttgttcctgtttggtattgatagctatgtgcttcattgtcaacatctctcaagacttttgattagttgtaattttttgtttattcttaaaatttataactttgaggtttataatgtggccaaataaacttttgtacggaatgtaacaagtatgatcaatgtataatagataacttattttgtaatgaccattaagtctaactcttttaacttaatatatacgcttttattattaaaaaaaaaaatcaatcgtatgaagtagctcaagttataattactttgatattttaaaatgttttaagaagaaaacttttttaagctccagaatatattcctaagctgaaaaaagatgtagttttttaatcgggatcagccaattatttgtctgtccaaaaaagtattaagcactatactttggtttttctattatttaatagctcaaaaaatgagataaattagtttattaaaagatacataaatcttcaataataaacttactttattataaagtttttaagccacacatattcttcatatataggtaatattgtggtgcttgtgtgtatacatatatccttattaaaatggatcaagcaaagagtggaattgatcccaggagcggtttcaactcagcaaccaaaattttccatagcctcagaccttccattgattttcctccccaaaatcttgccctctcagtccctgaatacgctttctccattcacccaaaatggccagaatcagtcgccttcatcaactcagataccggccaccgcctcctattcttcgacttcgttcgccggacaaaaacgctagccgcaaatctccaaactcagatcggactctccaagggtgacgtcgcctttgtgctatcacctaactcggtcaatgttccgattctctacttcgctctcctcaccatcggcgtcgtcgtctctccggctaacccgcttagcgccgagtcagagatcgatagactcgtccagctctgcaagccggtattcgccttcaccagctcagaaacggctcacaagctccgaaatcaccgcctcagaaccatgttaatcgactcgcctgagttcgactcacttacaacgagttcgaatcgggaattggagtcggttacggtgaggcaatccgatttggcagccgttatgttctcttcggggaccaccgggaaagtcaagggagtgatgttgactcaccggaacgtgattgcaacgatcggtgggtaccacgcgaaagccaagcgaatggggaagaaatcgcccaaggtagcgcttcaaacggtgccgttttttcatgcttacggatttttttactgtgcgatatcagtggcggtgggggacacggtggtggtgatgatgaagcggtttgagctgagaaaaatgcttggagcgattgaggagtttagggtgacgaacgtggcgttagtgccaccgattgtggtggctctggtgaagagtagcactgatgtaatggctgcctataacttgagttcgttggaaaccgttacctgcggtgggtcaccactcaagaaggaagccattgacgccttcaaagctaggtttcccaaagtaacactgacgcaggtttgcctctccctctctctctctctattccacttaactatgatagttaaaaacatttgtatttgtgagtaacctcagttatacacgaccctaagtaaaaaaataatataaacagtattttattgtagttgtatttgtagagatatatttatttaataagtaatataataatatataacatgtatttttcagttaatacttaatgaataaaaaaaaatactagtgtaataaaattgtaagataacatatatttgttattattttttaattaaaattatacgtttaacaattataaatgtttcacaaatattcttaaaacaaaataaaaacaaaaaaaaaaaaagtaaataaacgaaaattatcttacatattattttttttaacattttttttttaattttacggtttgggtttttaaagtgattttttcggtattttttatgtgggttgttatacgatttttgattacgatttaggatgctttgctagttgcaatagaaatttctatgtagaattctgtaaattgcaaaacaaactgttttaaagtgtaaaaataaaaaaattactaaaataaaactactcttattatttattgattactttattatttaatttttaaagaaacattattgaatagtaatgtgagtattacttagtgtgtgagtagggatgcacaacgggcggagaattagtgtggagtactctttctctccctgtctccatccgcgttaaggattttaatcctcccgctctatccctgcttattccccatcggagacgaggcgggaaatcccctaatggggtgaggacggggcggagaatcccctattgtaaaaataaagtttattttaaaaatttaaatgtataaaattattaaattaca

SEQ ID NO: 307320 - DNA, 2421 bp, Cannabis indica
catgccaatgtttcattcagaatctattcttagtggcagccaacatttgctttggtatattcagaacatcatacttacaggagtagaacggtgtgcatctaagaacacaactcttaaaattcgctcaactacaacttcgtccttttgttcatcaaactgcacacatttaataaatgaaaatcaaacacaataagctcagtaatattgggtacatgcaacccaaaaacgaaacatcatatgagcattttgaacatattcttaccagctcagggacatagtctatatcttctttcactttcaaactcatgattttgaacttcaccttggcgttatgatcaaaatgcttttggctgttctcaggatgttccacaaacctaaacactatcaatcaagattcataataaacaaccagagttagacaacatcgaggccgtgaaagacttggaagaagagctaaacccaagtaatatttaccagttgcaacaaggctttctcccggagctagaaccccacctggtggacgcatgtaacaacattttggtgcagtagtttgaaactaaagcaggacaaagtaaacccattgtttaattaatatactaaatgtaaaaacattaaaaaaataaagttagtgacaaaaaactttatcaaaatgtgatcagacaaagttttaacagaaaaagaaaacccccattactcaatgttagataacctattaaacaattaagttagtagcaatgaaattgattgagatatctgaaatcttttaaaagaaataattaaaaaaaaatctattctttgcttacgttttaaacaagtgcagtaggattatatagcaatcaagttttatatttatttgaagaaatgtaataccttgaaagctacatgggacttgctcgtgttccttaacctaactgcgctcttcacttgtttcccaggttcatctatatcatcacaaaataaataaataaacaaataaaaatagatgtctatgaaaacaaaacaataaattgaaaaagtactttcttgcattttctctacatattaaaaaaaaaaacagtgaaataagagaaagaaagggaaaaagtgttactttctgtgagctaaagacaaaattaaaataaaatatatagaatatcgaaaaaaaaccaaaaatgaaacgacggcgtacatggaaagtagagactattggcagggtcaagtcggattcgccggcgtggagggagaagcgatctagctacagacgacaccgttttgggcttcggtttggaactctcactcacaagatgtcggctgctctggctctgaagattattattcgaagacgaagacgaccccgtttgaccccccgacttgccaaaagggacagagtctaaaaagcttcgagtcggagttcgatttcgagtggtggtggtggtggtggtggtggtggaggtggagattgttgtcaacgacggccatggagaatcagagatacgtggcagcttctacagcatctgtcactgaacttcacgtgtctttctttttgtcacactagaattttcactctaagaaggagaaggggaaagaaaaaaaaagatgtgtgggagggtagaatttgattattatatatactggaaattagaggtagttccactgtatgtgtttagctttcgcttatcctccagttgagtacgtgtcgtgttttgatttggtcatagtaatgtcgttttctgtttgtgaaagttacgtggcgcaccttttaggtgtcgttttgtagatcgctaaaataagaagccaaatccgaggactcaccgtgttcgattttgcgaattaccatcgcttgtccacttttcaaaccatcccttgttgattgttagtagtgctgtaaacatgggtcgggttttcgattaggttttttaatgacgcataaaattggcacgagtatgattagcataggcaaagccaagtgaggcagttgcacacgtaaaatttaactcgttctaaattatttgagattaaatggaattaattcctttttttttttacatttatacaaatattaatctaatcaaatattattaaattgtattgtttagtgtagccttaaatctatatgtaaagtttaagtcggtatttaaaacttcacaccttcactttactttttgtattaatgttgagatttgtacctaacaataaatttaaaatctcattatactaaagtttattttaacataattatttagtattatattttattatagtcaattctataattattaattcttaaatgttgaagtcctattaatataagaataaacattattattaaataccataatttttaatactaccatgagtggcatgttagaattttatttgagcttacattaaatttattagttttattaaaatttgagtagattagatagttttttgttgtgt

SEQ ID NO: 307321 - DNA, 4195 bp, Cannabis indica
attaggtatttaagtgtataaaggtatatatggcacaatttacccatttatgtttagtacttatattaggactgttctagaaagtttggtaggttttgagcaagtgttgggtaggtgtgatttttaaaatcttgtgtttctaatttttgcagagaaatggtaatcgtttctatagaaatcgtgaaccgtttctttaggcaagatcccagaaaaatggtgaaccatttggaaaatcttgttatccagttggggtgatttttcaagtgcatatatttttgtgttttatcgatatttagagtatcactacgctatttatcgataggggaacttttgattatgagttttaagtctttcaacaggattaaacaagttatttaccagtttatcgctattgtgacatagggcccaagatcatcaagtgctttgtactcaggttggccagcacacctaaatttggacttgaggtaagaaaagtacaattgtaccacttagcatgccatattgtgatacagtaattaccatttataggaaaaacttattactctattttgaaaccggtgttaggtttcttgtatattgattatctcattaagtaatagtattggcattggttgtatcatttggcaggtataaaggttgtcttattaggtaacgagagattataattactttataaagtaactgtaatggtttaacttattagacaaatacttgacattaatgaatgtttacattgtgttaaatggctttcgtcttttggattaagaatgtaaaatcttaatttttgttacatgagtataattagttttatctgtacgctgatatgtgttataaatttttttgctgaatctttgtgactcatgggtgttttgtggtgtaggtaagggaaatggatagttagggtagccatgagtcagagatctttcctaataaatgtacatatcggctcatctggctcgcaatgctgaattgtcgggaatttactttatggggcttttgatgtataagtgaattttgctataaaactgtgagcgagatcttttgtaaattttaaaaggtaatccccgactttaaaagtttataatggcatgacttttatgtttgaaaataattaaagttaaagtttttttttttttgtaaacaagtaaagttttaattaaatcttaattttattaaaactattagtttattattataaactaatttataaaagcacacacgtaacatttctatgggttaggacattacaatttcttacttttaattttattgcatagtggggacactgtttattttaagtttgagggaaggcaattttcatgtttttaattttttttaattttttttattattttagtttctatgggtaatttttaagactttattattattattattattattattattattatattaaagttgacttatgacctatgagatttgatgatgaaaattgacgctaaagtcttttgttgttatttagtatggatgatagacatataaattgtgttcttgacttatcttgtttgcttttgatattgtgatatgaattatgtgttcttttgcttgttctatataatatgtgattttatgtacatatgtagacttggtttgatttgatttatattaagataactagaatttgtgtgattaatttattgaggtgaaatcttaaatattggttgtgtagagatgattaagctaattttctttgaattgtttgagctaaaagctaactttgatacattatcctttgttctcctattttgagcctaattttttatcttttattttttgttaaataaatacaaaattatccttgataatgagccatgatcttaaataaattttctttaccctatttcgaaccataaacataagattattttgtaatgaatgaaaaatatgatgtatgtgggatgacaaatactctggaattatttgaaaaaaaaggaaatatgtgtatattataatgcaattgttctatatagaaaaactctcttgttaagaaaaataacaataaaaagaaagaaaaaagcttcaaagaagaattcttgttgcaaaaaaatattgataataagagataaaattttagaggattataattttacatgtgcgaaaaaatgaagaatttaatgaagaaatagtgaagagagaaagggggatttacagtgaatgtttcgtatttttattagttgttttttaagtttatggtctgtgaatcctcttgaaagagaggggtgccttctggaacacggacacaggtggtgcatgaattatcctaaaaaaacattctcatccactatttacttaagcctgacgatatatgtctattgttatcaaggtttctagatgggtgatgtgtacaattccaaagcccattatcagttgaggaaggccgaaacctaggcccaataactaagtcaaacctaaaactctggtccagaagcgagctacaatttgctaagactgtcagggttggatcattctgttctagaagagaccattttgactagagacaaagggtctgtggatgcccattcggagccctccaagaagtgatatttagaagcgagtaatcgaagagtcacttccatggatttcagatctcaacaaactcgaaacccgtcagaaacggggccctaccatgttaaagtatttcccctgcgtcaaccatacggactacacacactacgaaaagaaggtcacccttttgtctaacaccatattctttaacattcttggcacgaacataagattgcgtgacacctgacaccttcgaatggtccttgcttgtacagatgatcttcacctcgtgaattaggcctcactcaattggcccaaagtcaataaacattgtactttaccccaacaaagggtctagttgacacccaaaaaatcctaccagattcaggtatgttcgtacccagtttttccctataaatacaatataactccttcataaggggggtcgagagattgaattttgggaacaagaactaggaattaggattcttcaggtagagcataaatatgtataagaaatactttagagcttttctagcttaataacattgactcgtgcactacagatcattaacactcgaacaacgtaaaaatctggtcacttcatttttaatttatttctttcttaaccttatttatttttataattagtatccaaaaatctcggtaaacaccttaaagtccttttgatctacacaactttaatttacattagtatagatgaattgattatgtaagtttatgattatcttgattgttttgaggtatgggaagtctttatgtacataatcatttacatataagatttgtagaattgacatgcacacattctggtaaaaagacaatactaggagttaagtgttgggttgaaattctagtctttgatttgaaatacatgaggaataattgaaagaaaatttagtattttgagaaaaaattcttatggtttatgatttttgatttgtcattccaataattgatttttttaatttaattagtttttagatttatttttgtcaatcacttgaggataggcaatagttcaagtttaggagtttgatgagttaacatttgtacactcattcttggtcattatttaggtgaattgttgtttatttcttaaagtatacatttgaagtgtttcttgtaatgtgtagtactaagcataaaatgatgaaattatgataaattaggagtaaactacgcatatttgagcaaaatgttaaaatcgggaagcaaatgaactaagaaacaaacgaaatggtgaaagtaacttttggcgctatagcgccatgagtgtggcgttatagcgcgccaacctagaagaaaggaaacaaagaagatataaaaaagattatttttgcatatttgtaaacttggggaatcacacatggcgctatatatagtgttgtttctgaggctatagcaccgtccatacaatttcatttctatatttttttaaaaaaaaaacgtcaacttttccaacttttttggcttataaaagaaaaattataactttggctttgaaatgattagagagactataacacaactttaatgatagaaataagtctgagaaatcaaggaagtaccttagcaacattcaagactcattcattcattctttttctttcttctttatttctcaatattattcagattataa

SEQ ID NO: 307322 - DNA, 1764 bp, Cannabis indica
gaccaataatatttcgatacgtgacaattttaaaaaaaacaaacggctcagttaaaattaggactaacggataaataagaagcatgatcttgaaaactattgccgctatttttgaagattggagactaatctacataaaagtaatctttttaaggatttttgccacaaatttcccacttaaatattatggattgaaatattataacaacttattaacataaaaaaaaaaacaaatatatatttaattaaatgtcactttgtcttagtttattaaataaaaaaaaattataattatcaaacaatagaaaaagttgaccactttattatttcaataaaaggaaaattaactaatggactaaagggcactgtagtcctcaaaaataaattatatatattaaatattaaaaaaataaatttgtatataattattaaggatttgtctcctttttcagccaaaaaaaaaaattgtcacctaaattatctttttcttcacaatttgcccatcatcttacaaattcaggctcgaggtcaaagattcaacaaaattccatagatcataatagtccatatttaatatattaaattaaatagtcaatgcatgcatggacgatgcaaattgaaaagattttcttttttctttttatgtgaataaaatacaacaactttaagtttattataaattaataaataattaatgaacaagagagactatatattttaatacgaaatagagtatatattatggattccgttattttcccatcttaattatatatataattaatattgaaatagagtagtataaagtcaagcaatataaaaccataagataattacttgatatatatatatttatatattaaaacaaaattattcaataaaataatcaatccagaatataaatgacatgcagatatgcaagattggtaaagaattctctccgttataggctagttatttttgataaaaagagagtgaataaatatattcttttcaaacttgcatgttgtgattgtgaataaataatcaatatattgctgaaaggtcgagttagctatttctatacatataaatatatatatcccataatagagaagtgtcaatttttgagcgtttacaccaataataatgaattacttgattaggaaatttggtaatgggggccatgaaaaatgctcaaatctatattatttaaaagtgatgatcaagttgcatataaaatcatcttatattctttattggtatatatgtttttctcatacaatggattaatttatgtctcgtttttgtaaaagtggaaattgcgactattaatttatttatatatataaaatagaaaaggaaattcaatccataccagaccatcatatcaatattggcgaggacccatatataccaagatcagccagcccagatcaattttgttaatattaattaagaactaattaattaataataccatgagatcatatatatatataatgtataagaaaaacacaatatattcattaattatattataataatagtgttacaaaaaggctaagtactacacagtacacaccaagtagtagattatacatattatatatatatatatatatatttagctagctagcttactaactactttcttctaaaaaaggaaaaagtaagtctaattaagctatgcttattattattattatttttattaataacttaattaaagtctcattctataagctattttcatattccgttatatatatatattaatatata

SEQ ID NO: 307323 - DNA, 1803 bp, Cannabis indica
ctctctctctctctctcatgcccaatagggctctctcctctcttcatctctctcacatgcctttaaggcaatattactcttccattagagatcttgcctactaatttatattttgtatccttatagagagctatatcatatcccacctatagtgatccgaatagtattatctctttgtatcaatacaaccaaaaggggagtcattacccgcaatcacaagggggccaaacctctataacaaattcttgtgtttattggttttcattcttatttgtgtaacacgtgacaagcatcagattcgcacgaccccactgtcaattgatcactttttgaggtcaacagttgccaaagggtacctacaaacagatggtattgattttcaagagaccttttctccagtcgttaaacctgctacaatgtgagttttccttatcttggttgtctcctttggttgggaagttaatcaactagatgtatccaatgcctttcttaatggagatcttcgtgaagtggtctacatggagcagtcttaaggctttattgatgcctcaaaaccaactcatgtgtgcaggttacacaaggccctttatggccttaagtaagcctctcgcgcgtggaatgataatcttaaggccaccttgattagcaaaggcttttttgcctccaaatctgatgcttccctctttatttatggctcgggcaatgatctcatagtattataattggttcatgcagataattttttaatcgtgaatcccaataatgtcttgattggccaactgattttagatttgaacaagccttttcaggtgaaggatctcgggcctatacactattttttaggtgttaagattcatcgaactagctcagacttgtacctattacttttaacgaaattaggtatcggtaaaaaaacaaaatattaaatggaagattcataaccttaatttaaaaaaaaaaaaaaatacttaaatttcataaataaaatcatcaaatcttcaatcttatataatttatatgtgcacaaatcattactctttgattattactttttacttttttttcttattttgattaataaatgatttttaaattaatcagattttaacaattgtttttttgaatgtattaatcaaattataaataatttgcgagtttaacttcagattataaaaattaatgatttggaccaattagtgactttcatgtggctattgacttgacacttaatgattaggtaccttggaaggttttaaaatataatttaagtattattaccataaaaaattaaacttaaatatttacgcttctaattatcaaattaattccaaactatttaatctatttttaccctatacactaaaatctcgactttaaattccaactattgtttctatcaaaaaaaaagaaaagaaaagaatcaatccaactattgtgaaattggagcgggatgaattgggcctgaagaatgggccggcccacttgacatgttcataatcaactaaagctgctgaaggattgtcttattttgagacgttggatcctgggcctatactataggcttgaatggcgtccatgtaggtgtgcactgtgcacccaaagttagttggggaaattacactctataccctttttatattgtcctcttttatttttaccctcttttttaaagtctattatttttacctctttttttaaacattgtaccaattttgtccctgtcacttcaagatactctccatgtctctcttatgtcagggtattttaggtacaatacatataaaaagaggtatgtttcaaata

SEQ ID NO: 307324 - DNA, 1113 bp, Cannabis indica
ataaaccgaccattacattaacactatcacaacaacaatacctctactagtggcaatggcgctattgctagtgccattgccaatgccagcgtcgacaaaaatgcacagtttgatattatcgacgctggccagaatcgtgtgcgcatacaatgcattggaaacggcaagttctggaagcttgaccgcacacacaactggattagggttgaagatgtcgaaattgctacatcagactcgctcttcctttctgttcttgacggacttagctacaccgcgtaccaaaatgtggggaatcgcatgtactgcaagacttttacaaaacagcccgtcatggactgtgtcatggcatcgggctcagacttgaccgatgctgtaaagctgattcctatcgacatttaatactacatatactacatatgtatgtatgtacatatgagtcctgttccaaataaggagtctatatatattttacctgtgtattcatgcaggcaattaatattaatgattctatgccacatctcctgttctttgtgaaaaatgattaagctcatgatgataagactacgtacgtgcgtatactaatcagagcttaattattactatatagtattcactttgtgtcgtgtgttatatattgatataattttgcttcatgcatatgcatgcttgttttattaattattagcttcatggtcctgcatgggtctacaactccaactccaaagttctctctctctatgtgttatgaaaagaaagtaaaatcattttattgatgtggaaagagttgaattgaattacaagtatgagaacaaggctatatatacagagagttcactcaaataatactcagctaaaagaggaagttagttacaacaactaacaactgacagaatacaaaagaggaaagaaagaagttaactgtaataactactttcctataaaacaataaaaccagtactgtataaagatactaactaactaactaatgaatcctaatactatgcttgaattaataagcatctccatcatttttctttttgtttttctttttcttgtgttatcttgtttcaatttcagaagagttctggctatctcaagtgtccttcctagggc

SEQ ID NO: 307325 - DNA, 2111 bp, Cannabis indica
aaaattaactaaaaaattattttagatgttaaaacagatagagatttatcgatgtttttcttttaaggagatacattataaaatttcccaaaataattttgaggtttctactccccaaagtagtaacttgtttttcttttgaaatgaccaaagtagtaacttaaggcttataacccataagcctatcagcccgtttaaaatagattccatcatcatgtattaccttgagtttcttctaaaataaaattttgacctcttttttatacatttctcttcctctctctctccatttttacataaaattctagttcaaataatttttaaattttattttcagttaaccaaaatttaaagagtatgcatatgcaaatatatataaaaacatgtattttgaataattaatcaaacgaattttcttaaggcccaatccatacaagaatctaataaaaacaaacaaaaaaaaaacattcaatacattaaattatttacttaatcacatgcttttacattattgtgcaaattaatgtcgttattatgtaaaaccttactaaaacaaaaggttgtgaaagagaagaaatattaccggaacagggcataaatttccttatgtgagaactgattttgttcttcattttgcctttgttcaaatatgcaaatattttttttgtaagcagattttaatacttcaaaataacacctacaagaatttttttttttagattaacaccaataataattattaagaaaggaaaacaaaatgggaatcgagaaattaaagaaataaacaggattaaaatcatgagaaacataccttataactgtcaaatattctcaaagaacattacaaactaagttcttgtgctttctattacaagatatgacattaaaggaaaataaatagaatcgaatcactttataaaacaaaaacatataaataagatttcttttgcttttgcttctaagaaattaaaatatatgcttataatctggtgggctacttgtagtgcacgtgaagatttatattaattatcggttaatattacaataaattgcaatttttctttaatacataagcaaagaaaactttcttatctatattttcattacaaacacaaagcaaagtaatttacttattttcttattttaagaaaaggaattgttactctcttttatttggactaataattgttgctctatatttttagtcctagtttttaattaaaaattgcatgtgatatattttaaagtagtcactaagtaaatatatgtaatagtcatttaatgtacattttttgatttgctttggtgtttcttgtgtagattttgtaccctatctgaacaccgacttttgctccactaataaaataaaaatgtggattggatgggagggcattatttattattgttctctttcaataaaaggatgtttcccaccacgcaaacacgtgccttgcctcaattaccttcttatagaacaccccaaggacactacatacaacaaatattaaagggcgtttggtacgggatgttcaaaataatttgattattagagaatattatgaaggagaagataattataaggaaatgtgtaaattgtatttggataatgttatatataatcatatttctattaattaaattatggctgccgattccatacctcttagtacggagaccggatgagtcacgccaaattattttaatatatgacaatttatttaatattttaatatgttaaaattctgaacctattctcaaaagtaattctagcctgtgggtccatattcactaaaagaactaataataatattgaatattttgaattttaatcaccagtaaattttcattggtttaaacatttgttttgaataaaggtagagttttaattgcaatttttaattaacagttttttctgcaataaatttaaatggtataataagtaattttggcaatctggctaagcatttattttatagtaatatgcaacataaagcaagtgaacattaagggctcgtttggaacgccgtattagatcgtattgtattgtattgtattatattgaattagattatatattatatttttatataatactatgttaaactttaatt

SEQ ID NO: 307326 - DNA, 1158 bp, Cannabis indica
tctcgcatgcacgtttttttcgtgcaagaaagatcactaggggtacgatacgtcttcaactcttcttctcagaatggaagaattgcttaaagtctgtcctactccccgtaatgctttccagttgatcttttcaagtgaagtctaagcttgaatttttatacaacctcaaccttccttcccgaaatctaaagcttacgcataaaaatttaaattgactctcacatgcacgttatttttcgtgcaagaaagatcttaggggttacgatacgtcctcaaccctccttcccataatggaaggattgcttgaagtctgtgctactccatgtgatgttttctagatgatgttttcaagtgaagtctaagcttgaatttttatagaactttagccttccttctcgaaagtcgaagcttgtgtcgtaaaaattcaacatgactttcgtacacccaacaacgtcttgcccttcggtgtttgcaagcaaaacctcagtataaagggaactgcccatgcacggatacaagtcccactttccctccgggaaactaaaagcctctggtgccgcaagaggcctatacgttcgcctacaagggttatgtcatgaagggactatttaggaccaatcatgaaactgggtattcattcaggaccctatggtttcttctcaaggaagcctgaaagtagctgcacacttttgagaaactctcccagaagggcagtttgcttcccaaagtagggcagaactactcttaactctcctcttcggaaattaaacacaagttagtctccaagaaaatgacagagaatttgagtccaaaattccctgcttatttagggggtatgatatgtctgactactaacaactacaacatcttatgttcatttgctaaagtcaatcaacccaagagtatacatgtaaccaaaaacaggaagcgttttcaactgaagtctccccgagagaaatgcgcttgaattcttccctcaaaggctaaactcaagaatgaatccagagataagaagaacatttgaccaaaattcttgaaaaaagaaaagacacgtccaaatcccttcttacacatctccgcgacttcacataaccttagcccatcgagttgcataataggatagcatgaaaggctgacaaggtgttgggttttgtgccc

SEQ ID NO: 307327 - DNA, 1415 bp, Cannabis indica
tttgtgattaaaaaattaataaacataattgttgccaaacggcaccttatatgttttcgatcattaattaatcatatctacattttcaccaatatttaattaatttaattatattttgtggtgggcactcggctttagttttagttttagttcattacgtagccagctagctaattaattattaaatttatttacaattatagtgctttcctttttaatttgtttaaaaaaagaagacacacttgaatcattgttagcattattggtatatacttaatattccaaatccctgtttatttcatgaataattaatcactttatattgttattcgataattgaagatactatatatatgtgtgttctttatatatgtatacagacttttttcaaaaaaaataataataataataataataataataataatttttcaacattttttttcgaatagataatttttcaacattttttatcgaagagataatttttcaacatatacctaagagattttcaaaaatagattggctcaaaacacattttgaatttgaaaggtgatgattctaataattgatattaatagtggaagtttattaatacattgtgctcatcatcataatatgttatgaaaataatttcacacaaagtaatgttgtcctgtgcgataaaggattaatattactagtaatatattgctcataccatgcaaatcatagagtttttaattaattaggtgattaataatctaaacaaaagtttcaagaaagttgctaattaaataatatatatatatatatattaattcagtgaatatatataataccaaatgttatattattatatattagtgtcattgagttatgaccaatagtgcaataacaatgtgggctaatctttcttattatgcacgtaagcatcaatacaatatatatctcagaccagaaagttatgtttcttttaagcacatcttatatttaaatataatgcactgaaattaaagagatagaataataaaatcagagataaagcaatctcccctgctacctttttcattttcttaataaagtgggtatagttatatatatatataagtactaaagattacataacctggattatattttaactaaattaatatattatatatattaatatttagatatatatttgtgaagatatatttatagccccttatatataaatgtatgtagtgtatatattttaggctttttaatatatgctattatatccttaatggctcacgttacactaaattgattccaagatatttgatttggaagatctccattctccaacatatataaacagtatattggtagctttcttagaagattatgttggatgctactaagatttggacttgtctacaaatcgatatataataataataataata

SEQ ID NO: 307328 - DNA, 1461 bp, Cannabis indica
gacaatatatattaaataataaatatatatatttaataagattataactttaatatacacctattataaattattaattattaaattaattaaaataaaaaaaaattaggcttttctctctctctctctcgtccgcttgcagctcttgctggtgccataggaaaaatcgaggggaaggaggcgtgggaaggctattttgactaggaagaagaaatgaatttcacttgtaactgaagcgagatgaactgaatccattgaagaagccattggaatcgatccactggagttttcagaggaggagggaaatgacaatgacgacctaacagggagaaggagtgcttcgatgcaggattttttcaagcctccgctgtcttctagatcgtctttataggtgcctaaaagaatgaagagtgcacgacaaagactttcagatgttcatccatgccaatgagcaatgtaacagtgctcttgcccaaggtatgaatacaattccccctgttcttcattctgcttctgttgttcgtaatttggggaaggattttgattctccaagagatagcagtagagttaagattgaacctaaagatattgaagaggaggtgtgctactggaagccgtcaatagtctgttatgtcttgggttcaaaccctccattacaaatttcagagggctttgtaaagagaattcggaaagacagagttgacaaagtatgtttgctatcctatgggattttcatcattaggttcaatcaatgaaggatagggacactgtgttgaatggagggtacatattctttaatcagaggcctattatcatgaaaccatgggatccaaacaccaatttcaggaaagaatatgtgaagaacatcctgatttggattcaattggaggaactggaccttaaatactggggacagaagtctttgtttaaaattgtagggcagttgggtaaccccattatggtggatgagataacaaaagaaagggatcatctcaaatatcctagggtcctggtggaggttaaaatgaatcaagagctacttggtttactagagtttgatgatgaacatggtatgctaactcgagtaggggtcaaatacgaatggaagccaacatcatgtagtaattgcggtatggggcatggagctgctgattgtagaaagaattcaaaacctacgcaagaatgggttattaaagatgataaaaggaagaatattgaaaagattcaagttgatgatgagggttttcaaagagtgaccaaaagcaaaacagtgaatgaattggaggctccatcacaagtagttactcagaacacttttagtgtccttactcaaaataattctgctcaggatgtaatatccaaggaccagaatatggagaatgacaaagaagcaaagcaggatgtgcacaacaacaagtccaacacaagagagggggaggtccctctcttgttaatggataa

SEQ ID NO: 307329 - DNA, 3261 bp, Cannabis indica
gagggccaatgatagacactgaggccctagaaaagtgaattgtgtccaaggttgggaaagaggtagcgccctttgctgtagagcttttggatcaagaggcaggtagtgcaactgagctaacgtcgaaaaagtgggccatttgcagtagcggcgatgtactcactttggctcaagcctcaaaacaacaggcgattgggtaagtcttgacttctttgtcttagctcttgttgtcgtgcattgtcttcttatgctgctttgttgtatcagatggccttgattgtagagcgtacttcaaaggaagttggggcattggttatagagcttgagcaagccaacgccaggagccaaactttgcacactgacaacaggtgtcatcccttaatggcaagcttcttcaagtgacaaaggagatagataacaaggatggccaactcgtgatccaaagcaatgctctacaaaccacactctgagagatcaacaatttgaaaaataagatcgatgagaaaaatctggtgattaaaggtgcactgggtaatgttgaaggcctgaagaaggaggttgaggacctgaagaatgcgaaagactcattgagcgtcaaatatgatcaacaaactaccctcttgtagagtatccgcgcgactagcaacgcatgctttgacacgatcacgaagtcaattagggcttgacccttgatgacacccttggctggcattggatgtcaaactggctaaattccattgcccattttaacaacctgttggatgcctccaacttttgaagcacttggcggagagaaagattggtcagtaccttgatggtgtgggcttgaaagtagggtctgagctttctggaggcgactagtaagcaaaaggtcagcttttcgatcaagggatacctagattctccccacagcagggaaccaattgcaagtcccaattgtaaggccacaagttttatgtaatatgttacttttgtctttgtttcccccttcatcatgtgctgggtaaagttcttcaagctctctccggcttgttgcttgacattaatgatagagcccatatccatgtcatagtcgcgggcagcaatgaactgattccggaaggcagattcttccatgaatggattgatccgagagccaatctcttccaccaatcttctgcagatttggtaagggtcaaagagaagcacaagcacttggcatcttcactgactcttgccacttgcatcattttgttgtatttggctagatgagtctttggatcagtgagcccatcatacagctcgatttgggacatcttgaagttctccaggagcggagcttccatgatccttctgacgaaattggtccgaaaataaagtggatcaatttcgtcagtgcagcaatttgttcttccaatctcttggtgtcaatgtctgggagatctctcccacgaactttgtcgtttaagtggtttcttaggtcattaccacgtggccttgccttcttgccttttttgttttcgtacttggcgtctagacgccttttgagatccaccgtggaccaactgtcatcgaagtactgtccccctgtcccaccgtcctgaaatatggaatcactaaggcggtttttccatcccttgggctttggtactttcatacaagtcctttttggcgttacagggcctttctgggcagaagggcgtccgagcctcgatgcatcaatcaccttctagcctgagaaggctagttggccgaattcgtcttttctcgaggaggtataggagcatttgggttcttagggtcacttatctttgcttgcccttgtcctgtacaggagcagagtaccagcattggcagggtttttcccgttgtttcctccgacacattccaccgaggggtcattgtcagaatccccctcgtccagatctccaaacttggcttgaaggcgagccatcattttttccattctttgagaaaacttttcttgatgggctagctttcgtttggtctcgagcaactcgttagacactcgaactacctcgggatcttgctcataatggtagtcgtcttgtagtacacatcattgacatactctccatcgtcttcctcctcttcatcctcagcatctctctcatcattgatgctgtcatgcagattgtttaagtcgtcctctcgattgttcacgttagatgtatccccgcctctcacatcactcggcagggcgtgctctgttgagagggggtgtacttcctccatgacggtcttgaggcagccttgaagagtcttcttaagaaccatcttttgtgtgaaaaccatggtagtaataacactattagttttacgtctttcttcagctttcaatgaaagaaccaaaatgtttaccgagattttcgaaaactaaatattttagaactaaaaatataataaaatgcaaagataaagagatggagatttttacgtgattcaggtgttaattaacctaatccacgagccaatctatcagcctctaagagcgtatttgatgtgtttacatatttttgcaagaaaccctaactctatactctcagtttctcttgaagaagaagaagacgaaaagtaatattgacagatttttttctatgagaggtcctgacccccccccccccccccctttcgtatggaaagggtatttataggctaaatggtgggtcatggacatggatttctgttaaaagtccactaatggggtaaattacatgcaaaatgagagataactattgggtcccttggaaacaattgtgcccgtgtgtgctggagctagacaattggggaccatttgtactacgtggacacgtgtcgcttaaagatttaacctttaaaagtagaggccacgtgtcgccccaaagctttcacctttaaaagcagaggtctgtaatatccgtctagcaaaaaagtggtagaggtgtgcgcactaccatgcctggacataagagacaagatctaatcctgcgtcaaaaaaggcataatcgtcactgggccaatcgggttattccaaaggtagacgtttgcgacactcctggatggtcgacttccgcgttaggccctttgagtacccatccgaatatcagctgggcaggattccatattcggacccttccaggtccgggagggacaatatgtcttccacgtccaggaagccaagtacatgtttggcatcataacaaaaaaaatgttttttgtttttaaaaacagaaaattattttttgaaaacaattaagcatgtttggccttgttttttgaaaa

SEQ ID NO: 307330 - DNA, 910 bp, Cannabis indica
gtaaaaaaattaattttaagttttttttatgatcgcattagttatagttatttataattatttagaatatttaatagtttacaatttcgaaaataaggatcaaatattttatagcactctgtttgaactttattttttacattgtaaattattcataattttttgaatatttataaatgatattaaaaactataatatacaacattgtgaaaaaaaaaaaatgaactaatgtgtactaaataagctttttaaaagagttttactataggttttttttttcaaaactatatatttgttggattacaatctttttgcaccacatagttgtatacatacacatatatacaccaaagtgttaatttttcaatcaaacaacaaacaaataagtgtgaataaattatttattgtgatgacacatcccaattaatttacatcccaaataaataaaaggaactttttattgtactaatcttattctttttggctgatttcccttaaaatataatttacaaatatatggtgatttatatgttatatatatatatcaacagtggaaaaataatacaaattgttgttatttaaatcaaagagaaatagtagtcaaagtaattttgcagaagagagagagaatagtaatactatctattgtactcttttttacacattccttctttattaatgcataacacatagttattacaattatttttaagttaaattataaaaaaaatacgtattatttataaatttgagagaatacacaaaatatatatctattctatataaagtatgcttatataactaaattctttgtttatgagaaattcatgggtgtgactttttatttatatttaataaaataataaaatagtatttatatataataaaataataaaataaaaataaaaca

SEQ ID NO: 307331 - DNA, 2166 bp, Cannabis indica
attatatatgtatactgacaaatataaaactattgatattttcgttttcatacaagagaacataaaaatacaacattattattgtataataatgcctagtaccatgtaaatgtgtcactttataattggatagtgatactctttaaaattattacattaaataatatgagactcgatacataattacaccaataacaatattaacatataagatgacgttaagtaccaccagtacctttaacatttctcataaaagtaacacattttccttgtacatattcgcattatagaaataagggatgttggcggctaaattaaaccaccttaacttttaaatttgtaacagttaaccccaaaactgaaatttcgacggcataacccattgagctgtggttctgttttgctcagcactattttatcccccaggctccgttttagtgccaagttggcatacgtggcaggatccactagtaaataatgctactatggcattaatccccatataaacccctctctcttaaaaaaaaacctaaatttaattctaaaaataaaataaaataaaataaatcaaaatcactcaattaaatgaaaaacataaagatatacaaaatttaattaaaagaaaattgaaaaataaaatcaaaacaaaagagaagaaaacagtaggacttaaacatccgaaaccctaacacaaaaaaaccccatcgtctctccccccattcacttctgtaaacttgagaatgcaaacccagatgaactaaccccttcaggcgacgatttgaccttctgttgagtactcaacggtgtaaggaagcaaagcaatgacaatgaatatcaaaggcgcagttaacacgatcccccacttggtaagatttttaaacttttacatttctagggttttggttagtgttgatttgagtgtttctggttcaagtgggatagaacagggaaaatgactttttataatgggttgggattaaggggttaggtcaaatagttagatgaatattaaagtgggtttgattattgagtaaaaaaaaataaacttctgaggaaaagaagaatcatttctcattgtcaagggtatatgcttttgatatttcacatggtttaaagttgaccaaaatgagttagtttgcacatgtggggtgggttttgtttttttgtctttttgtgaatgggttatttgtttggggggttttgcctatcttgttcaacttaacttctagttttagttgcggctttgtattttaatttcactatagcttgttcttattctcccagggaatgaagagggtgaattcacaattaagcttaaacatggaggtacatggttttccccatttggaaataaaagatatgagggagggttctgagagtattttgatcattgtaaagttgaaggttttacaagacaggattcggaggacatggcaagaggccttcagtataggtttccttctaatttcctatacaagccttatgggaagcatttaaacatgagttttatggttgtaaacaatgcttcaattcagcttatgcttcaattttaaatttttttacatatgttagttgtttgttgtcataggttttatagttgtaacaaggctgtaattttttttacatagtatggttgttgttgtcctcatttggcaggtaaaaataatgcagagactaatgtgtatctggtgctaccagatccacaattagcattggaatggaaggaggatgctgaagttgtgaagatgcaaaaaccatagcaatcttcaaaactagagaagtgtaagattgaggagtttcctgaagggtgtactcttgttcctgatgttgttgtcaatgtggataataaattttacaatttctttctcaagtggggtaagtttatggctgtagttacaatagaagaggtgatgatattatttcctcatctgatttagaggttgcaacacaatttctcccagaaaaagtgaggattcaaatgaggttgaagaggaccttgattatttcattcctccaaagatggaggattacatggcttgggcagagaatttgtttggatatgaagacaatgacatccattatgcatctgatctcacaaatgagcatatagagtgttcaatataattaagagtacaattctaaatctatagtggcgcaaggaggaat

SEQ ID NO: 307332 - DNA, 1367 bp, Cannabis indica
agagagagagagagaagggtattacgcattactgctaaaaaaatcaataacaaccatcaattaaacgcgcgcacatagtgacattgaatagagaacagttcaatccaataaacaaaaaaaatcccaaataaagacattgaagaaaaacccatgaaaattttaatagtgaacgaaaaaaaaatggggagaccactgtaagcggaaaattagctctctgttgagagtaaaaagagtgttttataaggaaacaagggaagtaactgacccgaacccagatcagaggtagtagagacaggcccacgaccaccaccagaggaagcaccgaaagaagctgaagcggacggtgaaggctctgagagtctggcatcggctgctgattttgaagctgagcccaaaacgacaggagaatcgttaggcttcgtaccaaaaaagtcatgaaacatgggattagctagttggttttcctggttacgatggttgttggcattgttttctgcattgttaggcatactttgttgagccattatcatcgcgggtacagccatttcaaacccatatcacctcttttctcagctaattcactctcccagatagtaaaaagaaaaagaggtaagagagagagagcacagtaaagagagctcgattttcagaaaaaagatgaaagggaaagagagagagagaagagaagagatataaaaagcaaaaggttcttgcttggtctactctctctctctctctctgttatgttgtccgtttggttgggtttgagaataaatgtttggttttgtattaaagtgttatgatttgtgtcttttctgtaacattttggtgagtactaaaactcaactcagaaaggtgaacaaatatatacagtaagtaccacgattgcattcatttactttttttactctttattatttttattattattattttaataaataggagttttgttcagactttaacatttatatgattttttcattggattaaatgctttttaaattttaaaaataattgtaaatttatctatgtcacttcattattttttaagataatttacttatgtggtcacaatcacgtttataattacaatatgatattctatgggaaatttgattttctatatttagaaaatcttaaaaaattttctctaaatacatacttaataatattggtaatatatgaccacattcctaatatcccacaaatacccctctcatttgaaaaaaaaaaacaaaaactgaaatcatccatggctgcctcatcccgaaacctctctctcccatggctgcctcatcccgaccaccacgcccggccaccgacaactacccaccaccccgactacgcacgaccaccgtccgaac

SEQ ID NO: 307333 - DNA, 3272 bp, Cannabis indica
agtttcagatggctagttgtcctctcatggaagggagtccaggatagtcaactctagctgtctctattcctatttgggagatactttagcgtgtgcttcaattcatagtcccaaaagcgttcgcttcacctgagaccactataactagagctgatgtagagatattcataacaaacttaacaacttagcacttgcagctaccgactttaggatctatatcccggatatataaataccactaatacttatcattttttttgagaaggagaacgagatcagacgagtttccagaggtgatcttgagaggtaaagagaaaggtacagagaaaagagagtgattaggtttaggttttgtatgaagaatcttctgtagatgaagaagattcttgggtaagagtgtgagagataaacactttgtaagaatccaacagagaattgttctcgattgtattgtaccctgttcttgtcaatcaataaagaagattttggtggtgttccagaactagagtagagccatcgattacatcgatctataggacttgaaccaatatatatcttggtgttaattttattgctttattatttctggtttaatactttgtttatccttgttttttgatctcgtattattgtgtgtagtttgttaatcttgtcattattaattttttgttgattaagttttaattgatttgattatgtacattagttataattttctctcaatctctcaaacttctctttttccattgacatttaaagcaaatatgagagaaaaaaaaataggctaattaggattttcatctcctaaactttaacatatactaaatcatgcccccctgaacttttttgaccgttaaaaattccacctaaactattgagatggttagatttaaggatttttgtttatttcattcaatttactatttcagttattgtttatatactaaaacatgctctcaagactttaatatttaccaaatcatgtccctcgaactttgacatatattaaatcatgccctctgaactttcatccatgttaattattttttttattaaaattagacaaaagttcttaaatccaacaatctcaatagttcaggggcatttttaatgatcttaaaagtttagggagcatgatttattacatgtcaaagttcaggagtaaaaatttaattagccaaaaaaaaaaataatatataaaagaagactttaaattttgggtaagtattgcacatttatttttctttgaagaaattacatatagaaaactagaggctatccttctctttctctatctctctctcttatcctttttaaaggtcaaataatcctcaaaataagcaacctcaaaagcttcaaattttcgcacaaaaactgacaaagaaagttaatattacgatgaagaagccaacttttagtttggttttattagtcatacttgctatgaccttcacttggtgagcaacaatccacatgaagaacacaccaaaatattcataacacaagtggtgggggaattattaaatgagagtactagaaatgtatactaaaaagaaaaagtgaaaaaaaattggtgttgaaaactatcaaaaagagacaaaatacttaattttatggttgagagaatatgaagaaactgtaccgttaaatacacctataattgctttcaaaaaaataaataaataaaaagggaatacaacaataatatatatgtgttttagggatcattttcattagaatgatatatatatgatggaaatgttttggtaccacctttgaattttgatgaactttttggatccaatttcaagcacatgagttttgctcggtacaaaatgataaggacataaataatattgtagtttctaaaccttcacatactatataaatatatatatgtatatatatatatttatatcttttctcaaagattaaggaagataaagtaaatgtgaaaattgcattggattgtgtggcttatatatttttgtttttgttttcctcaacttaaactttattgttttgagattgagagaataataataatattaagtagtgttgaagtgagggttggtcttaaaatttagtaggctaaaagaaaaaaaaataaaatattttaggtctttatttaaaaaaaaattgtagtattttttaaaagaagaaaacaaaattagagaactttaagtgagccctaaacaaaagtttagtctgccaactagcttgattgaggtgtaagaggcttataaagaaaattcttgtaaaaaaaaaggtaaaggaaataagaaaaataattataactccatgttagagttttagtaggatggatattatgtgtgtttaaaattataagagaaaataatataaaagaatagaagtgaactagcattcattttttgccatgaaaataaaaatagtacgtatactctcaaatttgaaatttgatatttttttacttgaaaatattcttggtttttatttttttgaataaaaaaaatgtatttacatagttagaaaagaagaaagaagacccaataaagtttgacaattttttttagtggaagtttgacaaaattaacccaagcgacatattatttttatttgaccatttcattcaaaaagaagaaccttagtaaattttgacaaatttcttaagtttttttttcttttgaaatcaaattttgatacctatgaaaaaaaaagacagattcagcttacatgtgtggaaatttacgatatttcttatccacaaaaaaaaatctatgtataataattatatattgtggtaggcaatgaaaggaaaagaggagaggagaggagagaagagaagaaaatgccaaaaacttaggcagcagtccttgttggatatgagtcagcacacacatgacgtggcaagccaatccaaaaccaaaaccaaaactccacatccaatcattaaacctctgaaccataattacatattatattacgaggagaggaagaaggtcctactcctagtagtagtcctactcttacggcttttaaaggatcatccatttcaccctagtcaactctttttctactcattttcacttaggtttcaaaaatcacaaccataaaaaaaagtacaacactaatattttttaggaacttttttatttttatacgttaaaataattttttttacatttttatagaattttatataaaaattactattgcaacttaaatggcaacaaaaaatcatatagaaacttttattgcaactagcgttgcaattactttagaaactcaaa

SEQ ID NO: 307334 - DNA, 1804 bp, Cannabis indica
ttgttaagtcatcctgccaaaggtaagaaatttatgtcaacatatgatcaagcgtaaacactatcatctcgtctggacattgtcttaacatttttcaatcctgtttgaactgaatatgtccttgtgtacccaacacataataccaaaccggctttctttgccacccaataacaaggtcaggctaacaaaatcattgaatttgtgcatctatactacacagctacattaattttgctttagttgatagccaagcttggtatttcaattgaaagggataatagattagaatcagcacatccctgatcatggaagatataactatgggacagacaaaaaagtgaacaagaaaagagtaatacctgtagaacatcttgctgtggtgatgaggacaagactgtagaaagaagctcaatgctgtttctcgcaacatcaaatgcttcctttgtctgttcagctgtaaagctttggacagggggctcacgctgaatttgctgcaaaagactatcatctggttctggaggagctgaaactgaacgagggggagtaaaaataggtgccaggctctccatgtcgcgaccagggaaccgaattccccttgattttagactctgaaattgaaagggcacataaggttaacagcacacgtacgaagaatataaaaccacattgccttggtttagcaatttgaagtcaacaacagccagatgtaaaatgaaaacaataagaatgaaatcccataaggtacagtgctgatgaataaaactcctagtcaattactgtcatcttgatctagaccagtaggaatcaaaacaaaactgaaaaacaataaaaaagagcaccaatatccacacattgatggatagattaccttgtatgtttcttcaaaaactggcaaataacggagctcactagttgattccccccacgactcgatcaacatcaaagccttgttacgattgttaacaacagtctgaggatcatcaatgagcttcaccatctcatcaagaactctctcagccgccacttccgagaaagccttctcacagttcttgacacaagtttcaagtagcactaaacccaaatattgaaccctaggattcttcaaaacaattcgcctttttatcccacgaatcagttcaacactgttgagtttctcagtattgatcatgtcacaaatatcaagatttaaagcccagtcaggctcctccagggcctctgaagttgcatcgtcgacaagcttatccgcctggtttgggccttgaaagagttccttcatcttaaggctcatcgaactgattcccgcagtcatctttctacccacgtccgccccttcaatcttgagacgctctccaaaagcactcactttctccattatattgtcactcatctttcaaacttttttcactgaattattactgaaaacatgccatttatatagtattacaatcttaagcatgaaagaaactttgaaatttcaaccaaaaccatcttaccagtagaaaaaattcaaaacttttaacaaaattaaagacttttcctttttccttcaacaaacaaacagactaaaatagaaacacaaaactaaaaacaaaaacacaattcatagttaataataatgaaaaaaaaagcataaatcgtaagtagagaaggtgggcaaaaaatctcaacataaatcatcaaagtaaactcattcctttatacagaaaaaaaaatctacaaaaccctaataagtggagggttgattaccagtccagaatttatttttttttttaattatggtctcaattcctttaatgggtttctc

SEQ ID NO: 307335 - DNA, 1364 bp, Cannabis indica
gttcttagttttgtttttacttctttttcaagtctagaatttctaataatagacaaaaaaatcaagtgatagtacattgtttgcagtttttgcctgacaataaaagaaaaaaagcttgtctatttgttatgggatcattatccattgttgtattcaaataggaaaaaaaattatcaatacaattcacaaccaacatttgaagttgaatgatttcagtaaaatttacaaaagaagatgaaagaattagtgcttgctttgttcagtcttgtatattcatttctaaatcctactctaaaattaatggaagtcttcttcgcccatcatgccagcagcatatctgaaagtaaaatcatcacataaaaagtcaggcacgaaatagataaaaaaaaagatcttactttattgcagatcaatagtctaatacctatgaaatgaaatgaactcatccatcaccggatgtgttaaccccacgccatagaacaagcataattgacaactagtttactatcgaaattctgcaatatcaaagagaggatcataaacaaagtcacagaactgttgctaaattttataacacttttgaagtgaaattgctaaattttataaagcctattatttgtctagtaatgtaattgcattttgatcttatatatttcttgcaatgccataatgtacaatacatatattccaaacaaaattgttttcaatgtaaagtaacacactaaaatttcatatttagaaataagatatctaacaaaactaataaaagacaataaaaaacaaaacatatgtataagagtttgttgcttcccaatttgaatctggaagagtataaaattgatcccttttatgtcaaaaaggtcttccaccctcttgcatcatcttttctaactcttgtaattaagcctttcaatctccttgagaacttgagtttttagaaaaataataattaaaaaaatttccatcatctccattgatgcttgttaagcatgtccagtattaaaaaaaattgatttccttacctccgaagtcctgtccttcgtggtaaatgcatttacgtcatcatggcataacttagaggcaacttctattaaaccgtaatggattcttacactttgaaatatttctctattaaatcgtacctttttggaagaatattcacaaaaaccgatgactcttgcattatagaaaagaagaagatagcatgataaaaaatggagaacaaagaaaaatagagaaaaaagaaggagaaaacccacttaagcatctgaagatccgagatggtccttcccagctgttatattattttataatataataagtgtagattaaaatgtagtaatatatattattatgtgaataat

SEQ ID NO: 307336 - DNA, 1466 bp, Cannabis indica
taaaaatttaagccataaaattataaataaataataaaaaaaatgatataaatgaaaattccacataaatctttacattcttatttatttatttcatatttgtcaattttaactttttttagttgtctttgattttcttattctatacttttatttttatgagaatcttattctatacttactatgagttataaccatatctctaagttattttttttttttttttttattttataatgattaaagcattattacatgctccaattaatcatgcaaaacaacaatccccaagtccaaatattatcaaaacatgcaatggaccaatttgttgtttttgttaatcaaaagaaaaacaacctgaatatgcccatttagaaggtgaaagttgtttgtttgtttgttatatagatgacccactacatgaatacctttattttatttgcaaaatttatacttactctacgacaaaattaatcatacagcactttggccaaaacatatttaataattatatatcatgaataaatatataattagctaatcatatatatcaatcatatcacacgacaatatctataattattatattaattatgctcattaattctacatggaagagtattaattaataattagtggggagacatgcacgtcccacctcaaaattataaatttacaaaccaattttttatttagtaaaaacattagagttctatttgcctcgtctcaagttttttttctttaaattaagtttaatatgattaaaaatgatcattattaaaattcaagtttaacaatgtgtaatatgtttgtacgaaaagaaaaaagtaaattttattggagaatcattttatgtattattattatttttttcattttaatgatttggttgctctagtggttgttccagtaatttttaggtggattgctatataaatttgagttgcgatttaagttatttcgttagttgctatgtgaattgctatgtagatttctgtaagtgtaaaaaaaaaaaaaattgattgaaatataaaaataaaaaactctcaactttatttatcaaaaaaagtaaattagttactaatcaaataattaaagcttaattaacttaaaatacttaattaacaattcaaataaataaaatattttgaataataataattcaaataatccaaaatacataggactagtttttaatatcttctatttaattatgtggtaaaagcttagttaaaattgtatcataaaatatcttaaagtaacaatattctcattataattaatgagttgttttcatatagaaaatgattaggaagaaaaagtattaaaccactcatataatatgaacaattaaatatgattaagattcatgcttctagattaattaccatgcttaattaagaggacttgtggctcatcttagaatatctttatatattaaaagtgcctatctaacggcatttctt

SEQ ID NO: 307337 - DNA, 702 bp, Cannabis indica
ttttcatttccattcaagagtttttacatgtttccacaaccaacccaccctgaaaaattggcaaagttaaccaaagagatctttggtggttatacacagatccatctgtacaacatttaaacacaaacaacaatacattacgaaattgaaatcccacatttgctacactcaacttaccttagttttatatagcagtttcactctcatttctgtttttattttaaaaaagaatgtaaaaaataaacaggtcattttgtaagtgtaaactaatcatagtcaaattactgagtctttttcttaaattgtacgaaattgacatatctttttttcttatatatatgcagtattcatacatgaactaagagacaccaaaaatattgcagaacagagaaacaaacctccattttttattatgtactattttggatcagaaatattgcagattgttgcaaaaaaggtagtaaacctatcaatccatagaatgagtgaaacctattatcttacatacatgaattctagctttaattgtaattaaaagtttattctttctactgctgatgagattgaagtgcagcaagcttcccaacttgtaactcgtcctcgatggctcagagatcatggaagctcgactccttgtcgataattcttgtgccacaaaaatgcatagtaggtcgtgaagtctggtctacttctagtacatga

SEQ ID NO: 307338 - DNA, 1082 bp, Cannabis indica
atttttgcataaaagtacataaaattttaacaaagaaatactcctattcctattccttattaactacttataaacttattacattttctaagaaaagttcatagtcaaaactcaaagtctaaaaaataaagtccatacatataacatagttcaaagtccaaacaaaacacaattcataccatagtccataataggttagggcaaaaaaataaaaaaaaaaatatatatatataaaaattagtaatcgagttttaagtgggtttcgggttttgagttttaaaaattcttaaacccaaacccagcccggtgccgaaccgagttacacccgaatctgaccccttattttttaaacccattttttagggttttccaagtttcgggctgggtgggttttttgagtttttaggtataaatgtgatgccctaattcctattttcaaggacctccttcacctataaaaggagagctcctctagtttatttttcatattcagaaaagtacctgtaaggttagagcatctctctctctttaaaaatagccattttcctataattccatctcgtgagaataaagacttgaaatagacgtagctccattaccatcacgatacacggagtgagctactataaattgtcatgtctctctatttatacttaacatatatttcattcttgtcaatccagtgagcaagtgtggcttggaaatctttgtccaaatttttgagtcaacacttataatttaataaattgaaataatgaaattcataattttaaattagatatagttaaattatcattttattaataaataaaatgacaaacaaacaataaatttcgaaaattatgtaacttaattagaaatatctcgaattataagcattttttaaatcgagtgagttggcaaaataggctttatgaaaacttttattaggaaaatgacttttcaaatattttaattagcaaaatagccttcttttaaaattaatataataattaatataataaatacaattaatattaatttttctttatcattaaaaaaaatagatttgattggactcccatgacctctcttcatcttca

SEQ ID NO: 307339 - DNA, 1571 bp, Cannabis indica
atgaaaagattgatgcttatgagggaagcattaaaaaggtttgtcatttttttgtttattgtatactttttttatttagtttagtttatattatgaatcattttgtcatgtttaattatttttattttttgtttttaggataagtctttaaataaattaggggcaacaaatgttgatgttttatctacctatggtttagacaaggtttgtttacttttttgttattcttgtttatgttctgagtattgattttggtttactatgtttgaatataatttttttttttttgtcatgatatatattacaatttgatgtagaaaaaaaatatatagaaaagaagagtttatgagggaagaagagaaaggtcattgtcgttgagagctgcctaacttgggggcgtaaaataagactggtcttttgattctatatgtagatattgtgcgtgtgattctctcttgttgttcagatttcacaacagtggtagtagtagaattagtactttggtaaaactgttttcaacttttccttttattagactcactcttgttctttccctttctgtctctagctatatttttttttatttttatttttaaaacaatctttcagccagataaatttattgaaaatattgtttcactgcatcattactacaaatcaatattaactatcgacataatatttttctttttaatgtgtattttagaatcgactagaacatgaatagatagaacactcgttaattatataatcaattacaataacttggttgtattttatcatgttttattaataagcgacttgtcgtttgtcattacattttaggaactcatggttagagatacccgtacacgtgatacgtatatagacacaaattgattatcacaaactttatttggttggtttctttgaaagaagcaataatgtcaaagaattgggtaagtggataaaagtgtagctgattcattattatgttcttcaaaagattatgaatctcagttcagtcttcttttacattattatcatatctaataaccaaataatgatatgtgtcattttctcaaggccatataacccttcatttcttagtggaagacctaggtcttccactttgttaataaatttaactgctaagaattcacgaaacctgatctacaaattacaaaccatgtataataattaattagccttttacccataaattgtttaatatatatttcaataactgaacatatttttcaatgtatattttaccaaaaatattaagctttaattgtatatgataaatataaaataggataaattgcggcataaatacataatgttttagtcttttaaattttatataattaaatattttatttttatttttagaagtaagaatactcaatgttataattctcttacacccattaataacacttccgtttcctcataaatatggacacgtggaaggctcagatgcattacatttatttattttattttaaaatttaatttttgtaatatcagaaacaaaacgttacttgtttaaaaaaaaaactaaagatagatgcaatacaagattacca

SEQ ID NO: 307340 - DNA, 2335 bp, Cannabis indica
tattttaatttttaattattaaaattaggtggaccaataaaatttcactacgtgtacacttgtatacactgtggcagtctactttggcacttaacagaccaaagtagacgaaaggagtagagagcaaaatgattgcagaggttggggagtatagccataattttcccaacatggggttagatcataccaaacttaaaaatctagagagtttggttgcaaattgcccttttcaaaaacttgttttaaaaaatttgaccaaacaaacctctattagtttttaaaagttgtattctgtttttgtaaaaaattagaaaaaaaatttaagttttaaagccaaacaacccctaaactttcttctttaataaaaatgaaaaagaagccctaaactttctatataagcataaaataagaaaaaaaatgtgcataagcaaactttgattgagataataaagctttaaacttctctgggtgcttttggcaccccctaaaaaaaagctttaaacttcttcttcattttccaaatgctatctgtttatttttagctagtaaagttccatacataacgagtaacaagctatctaccttatttctgcatgttatggtttgttgtctatcaaaaaatcagatttggaaaaaaaaaaaaattattgtcgttgtggtttttaaattaaaaaaaaaaaaaggttaataggaaagtataagcaagagtctagttttaaactttctacatgattttctaacttttgataagataaaatactatgtagataaaatactatgtgggatatgcaagtactaaacatcacaattcactaacaagctcttcacttcatttgcacatgtgctgtttgcaagatatgagaaggccttcttgctctggtggcttgttcaaaaccatgagaaatctcaatcaacttaggctcggtaccctctaatcccctaaatataacccgaatggcatttcattgcttgattcgaacccagccggaacagaaattacagggtaacctccaattgccagtaccgtagaagcagcccagcctagtgtcaccatggcatccaactcactctccttcatcagtttctcaaatccatcttctgacagatgctttaaagcctctattgccttcaatgcatcttctcctaaggcgcttgtcatatctaccataacaaactgctcctgcccatatttcttagtcatttcctaatatgatcagcaagaagtgaaaaccatgtcaaacaattggaaatgaaacagaaaaaagaaagcctttgagagtgttacataagataaattaccaaatcaaggttgtctgaattaaaagcaataatgtctgcaagagatctcacaggagaatctattagctcctcgaggtattttttatctctagcttgaactcagttactagtgcaaatgcttcgccacttttgaaaggatccagaatgatatccttattcgctacttcaaaatgatcaattatggttgcacctccatgccttgaaattccatatcagatagctcatggtaagatagagatgaagtttattagcttaaacataattagttctttcttccccataccttaaagtgctaaggtgagtctcaaaaattgaaatagcagaagatccattataaaaggctaaaaatgcattccttacaactcccaatctctttccttttagcccatcattttttaagaactgtttgtaaccacctttgggaatgaacttagctgcagcttctattgcattatggtctctcgaatcatagcccacaattgcatcaaagacatagaccgcatcagatattgtcctgcccattggcctgcaatatcccggggacagactattatatgccaatgcaaattgcttgaaacagaattggcatgaaaatgaaaaaaggccaatagcagcatggactgaagtttgttacccaattgagtcctgacgtggggagattgggacaacaccgacgcgactagtgaggccaacggtgggtttgatttcgacgactgagttatgatcagcaaggcagattagggaaccatatgtctcggttccaagggacactgctaccatgtttgatgcaacggatatggcaggtccactgcttgatccacatgggtctcccgactcattgtatgggttctgtttacgatttctaaaataattaattaggccataattattgcaagttttcttaggatgaacttgattatacttatatgcattcatgtaaaaagttttttgacaaattgcttgagcgcagctgcatccaaatgaaaagttacgttttctgtaaaatgattgtgatctttatgggtgtttcaaataa

SEQ ID NO: 307341 - DNA, 3300 bp, Cannabis indica
ggtacctgatctggagcctctcatcataattcatacaaagatatcaaaagagagaagagagaagacctcgaataattatctttggtgagaaaacattaagttgagtttttattatagctaaccgagagagagagaaatcgtgtaaattaattagattaagtttagagtttatattatatatagtataatgtgagttttatttaaatacacggtttataggatgatatttttgtattttttttaaattgatattgcgttaaaaaattagaaagtaataatagagtatagagagattttagataaatgtatgattaatatttttttaaaaaaaaatcatctaataatatatatatttttttaaaaaaaaaaaaatcatccactaatttctcataaaccaagaatttagttatatagccacatatatttttttttaaaaaaaaatcacccactaatttctcataaaccaagaatttagttatatagccacattttatatagaatagatataattatcaaatcaacgaataaaacttgtgataatgagaatgtatatatatttataatattcaaggagaaatttagttataattaagatctaataaataggggttagcaaaactaactttgaaaaaaaaaaaacagagagattgatgcgattgcataactgcatctttaaattattaagggcaatacatatatttattttgaaaaatatgtgccataaaatttgacctttgtaaagccttataattaatgatgacttattgttagggttgacataatgagaactgtcaactataagtttttttttttaacgaagaaaggggaccaaagttcttttcatacataattttttttgaacaataattattcattgtattggttttttattatgtgtatatatatatatgtacatatacacacaatttctaggctttcatttcctttagtagccagctgtctattcttgggtcatatacttctctttagtgatacactaaactaataatcaatctcaatgaaacaaattattaatccatagtaattatttatagcaagacaataatcaatattttataccaatattatattaataatactcatcattcatataaaagaaaaatctataatattaagaattaaactagggtgagctatatcagcattaattagtattaatatataattaatattatttgaacaataataataataataaaatatttatatacaattcataatatctaactaccaagattccatgtattatatatagaatgtaatatataagaaatgcattatgggtcaatcttttttactttttataatttattttattgcatgcttttggttttagtggtaagatctttggctttattaaaatttgttattatgaaataaagagacgatgatctcatctagaagcatggcaaaatataaataaaactcatcatggctcacgtaaattccttgtttggcggcggctttgctttgtttgggttggtacttggtgcttaagaggaagtatttttattgggtactagtagtgtctagtatctctagatatgtccctttataattagttagtgataccttttaaaaattattgcattaatttatataaaatttgatacttaattaaactaataacgatattaatatataagaagattcacacttctattactttttaacatttttctaattcaaagccagccacccacacaacagcccatagaatagagtcctttgccttctttttgtttttgtctttttggatatttatatactaatatttataacgtggtttgacttttttttgaatctaattgaccccacttagctaattaataataaagtttttgtttaatttggctcggcttagaagccaattatgccagccaaagccacgctgtcattgggaattagggcatttatagtttatttatttatttattgttatttgcattttgaagtgtccttggattcatttgagttactttgctctctcaaggtcagaattattaaatttaatcattattatatggtggtaattatgtatttataatatattttagttattgttggccaattttgattcaatatatctaggttgtgattttaagttttataattattggcaatggtaggctaaacaattaattattattactattatagtatataaggtttggctttaatattagtgagtatttatagatgcatctcatattatttttagcaaattaaagttctcactgattggaatttggaagtgatatatagattgctggctagctaaaactaactacgtaccaagcacaaaaataacaataacatgcaataacatttttttttaattaataacaatatttactttaaatgagagactactcttataaacactattaccatatcccactgtagatagtatatattttgatacataattttgggtatatatatatatcattattttaaataatatacatattatttttttattatttaaacttgaagtgttactcgttaatattaatttgagcatgctattagacacggatgcggtgagcaaagatgtccaatatgttaaataggaatagtgttaatgattttttatgatatatagataaattaatgagtaaatatcattttggattttgtgtttcgtaaaagttattaattggactttctgttttgttaaatgacgaaatgaactttgtattttttaaaatggtacaaataggattctgaactaattttttgtaaaaataaaatttattaaaaattcgatctaaatgtattatgacaaaattgtttacattttctgtatatgcttgtgttaggaattgtctttaagttagttatattaaaaaaaattgtaaaaaattaagctcagggtcttaattttactattttggataatatagggtttattttgtcatttaacaaaatataaagttcaatctgtaacttttgcaaaatacagggttcaaaataatatttattctaagatataaattattatataaattaaaataaatgagatgatataattttaatatagatcaataacaaataacacctcaaagtgttgtgtaccctttctatcttcagctttattacttgttttctcaaaacgatattcaaatggttgaaatttgaatctaataataagtgtaatattggatgtatagtaatgaattgtatataaatataattagcatctaaattcaccgtggggaattttattaattattgaaaaaccgtgtttttgcaaatgtcagttgtatataagaa

SEQ ID NO: 307342 - DNA, 2597 bp, Cannabis indica
aatgtattcattcatatctttatttatctatctttactatctatatgagagtaaacatagtagaattttatttaggcgggccgaccctgaaaattgatgggtctaaggtaaattttgtttatctgcttgggtaaagtcataggtaggcaagtttggatattattgggcttaatggataatattttttttactacaaattgcatatatgtgtaagatttttgagttctgagtttgagtaggtcctaaacacaggtttagctcgccttagctcaagttcaagcctaaatatactctacatatagagtatgaatagcttcatgtgtaaggtatctgatcatcgatgaatggttaggaccgtaccctacatgtaaggtaccttaccacaactaatataggatgaagcccttaagaaacttatctctttgcatattataaacaatttcattcacattttgcatgtattgtgttgtaaaaatattgtattaagtattctattcatattgtgaaagagtaaattgtatcttaattctgcattttatatactagcattggagtaattggtaaaaatagatttttatgtctttatattacattgcaaaagaacatttcacaaatgattataaattattgtgcaaaatgattgaatgtttcttgtgtgacattaccaacattttcttatgcctttttaggtatagtgaacaccattcttgacacaagcaaaattgaagctggaatgatgcagctagaagaggttgaatttcaaatggctcaacttttggaagaggtagttgatctttaccactcttctggagctaaaagaaaagttgatttgattttggatccatgtgatgcttctgtgatcaagttttcacatgtcaaaggtgatagaataaagcttaaacaaattctaggcaatttgttaagcaatgctataaaatgtaccccggaacatggacatgtagttcttagagcttgggctaaaaaaaccaagttcaacaagctcaagtaccatcaattcctcctcctcgaatcgacaaagcctaatccgattgttgtcatgcttgtcttaagaacaaaaccgacgaggaagagtttgatcaagtcatgggcgatccacatgttatggagtttgtgtttgaagtggatgatacagggaaaggaattccaaaggaaaaacaaaaggatcttttcgaaaactatgttcaagacaaagaaacttatgtacttaaagaaggcactggtttaggacttggcattgtcaagtcattggtaagttggttattatagaacaaaacctttttgtcacaagaatattagcaaatatgttctgagtttatattccttttctgcattcaggtgcagttgatgcatggaaaaatcagtattgttgacaaggacattggcgaaaagggagcttgtttcaggttcaatattcttctatctgtttgtgaagatgtgtttgacagtaataaggatgaattggatagtaatgaattgttatctattgacattcgaactccgaattgtagtcctactttgagtgttcttactcatcaaactcccaaggcagatagatcttatgttatactaatgattcataaccatgaaagaagaagagtttcacataagtttatgaagagacttgggataaaagtttttgtagtggaagagtgggatcaacttgttagtactcttgagaaagtaaagtgcatcaagtatgggaacaacatcaattctgattcaagcaataactcatcatcaacaagccagagtccttatcttggtgttgaagcaacaaataaggatggaacaaactacatacgctctctcttcaaaaagactagtactaatcctcgtcttcttcagcgcaaaacaggcgggttggtagtgttggttatggatgttactactgctggaccgatttctcaactgtctaagatggttagtaagttcaaaaacagccttcgggacacttgttgctgcagagttgtttggctggtaaattcggtgtccagttacaaatctttctttgaacaagatgatattatcatgcacaagccttttcatgggactcggttgtatcaggtggtaaaacttcttcccgagtttggaggttctttgtcgtcgccaaaagctagtagtagtagcaatgctagtacaccaagtactactcatcaacaagtcagaaaagtttcaactaaggtttcttctagcagcaatgttgaatttggtagtacaagtaaagggttgtcatctttttttagatacaagactcaattccaaggtgaaataccagaagaaaaaagaaaattgaccaagactggtagcagtagcagtagtagtactcctagtaagaatcaactgctaccattgagtgagaagagaattttggttgttgatgacgatttcgttgctcgagcattggtgagtcggttgatcataatgcatggtggaactactagtctgtgttcagatggaaaagaagctttcaacttatttccaatgaactggccaatcactgcaacatggagattctatgatgacttttgccttatgattatatcctaatggattgtgaggtaataactatgcagtag

SEQ ID NO: 307343 - DNA, 1714 bp, Cannabis indica
ataaacatgatcaagtatgtgaaaagggtttaagatgaatttataaatcaaatagacaagcaattgataaagtgaaccaaaacatacacaaatgaatgaaaaatacttctgtttctttattgatgttgaataaaatagattacattgaaatggagttttatttagggcataaaacctaacaaaatatccttttatttccacacgcaagggggggattaaaaaaagatatagccgaagctcctccaaaatctatctaaactttctttttcttcaagagaaacctagagagtagggttaggattttactataaacaccatttgtaatacatttactagccttcaaggccaatatactgacccatggactaggaataattaatgtctgaaccacgtacaaatttccgtctactttatttatcacttttattatttcttaagctcttattcaattagtttgcaaaatacctcaagacagtacaaactatgaatgaaaactaaaaatacttcatctccgtgatgaacatagagttagtactaatcaaacattatttaactcaaaacaaactgaaaaaaccaaaaccacctagaaacaaaccaacaactctaactctcttgaaacccccaaaggcactaagtggaaccaattggagattttgtggtaggctctgatttgagtctatatgaacatcttgagaccaatcccaatgaggaattgacgataacaaccatggaagccgatcgaatctagtggatcttagtgtagagaaccctccatcgatccttagacaacctataatcccttcgtcgacctccatttttggtgactatgccaagcaagacgcgttgccaccgattgggaaaaaccaccttgttgtcgtcactaggaaggagcccaaaagtcgtgatgtgaaactatcatcagatgcctccccttggcgaggaacgctgcagatagctccttagccgagaggagaagtgagagagttaaaaactagaaaaaaaaagtaattattggcactttataattaattacttctcatgaaaaatcgtgtaccatatttctgtgattaacaataaacagttctactcaatttatcgtttaaaatatatcattaaatccttatattttttttttttaaaaaaaaaattcatgagtaatcactaggtcaaaaataaatccttatatatattttttaaaactacttaaatataatattttttgatattattttatttatataaacaaagttaatattttgaattcctcaaaaaaaaaaaagttttaaaatattttgaagaagatttagtgcttcttaaatgactattttaaatgtgccccctctaataatagttttaattattaactttttatttatttattcagatgttaaatcggccattaatttctattaaaattggaagtctaatataacaatgggccattaagtggtacaaaatgtgcacccttcattaaataatattgattaaaccaatttatttaatgctaaaataaagcatggctataaagaaagttaagtggccactctattatcttttattttattatatatatatataaatatatatttttggacttctttattcaaaagggaccactaatatattatctcaggaaaataatgacgaattagtcatttactaccaaaacacaaacaccacattcatcccttctaatctaataaataaacaaatg

SEQ ID NO: 307344 - DNA, 1835 bp, Cannabis indica
gaatttatacattaaacataatcatgaaataaatcatgtgaaccatgcaacataaaatgcgatttctgatatttattaattagtaaatatgattatattaaaatggattttatttagggcacaaaacccaatagatacaacacgtacaacacaacccttatttttctgtggtacggcatgacacgacctgttttttgaaaagcacgaaaaaatatagatcaggccagcacgacatgcatgaacttgcaccactagacaacaccggtacccaatatcaatgctctttatatatatatttaatttaaggaacaatttgcatatatgggactgtcatgtactactacaaaatgtcataatgtgatttttttttttgaatttaactcttttgtatttcatcaaattcaaccagtacatcctaacaaccccccaataataaggcctgagatttgttctatacatatatatttacaaatagttatcaaatcaatctctatcaactttagacaatcttttgggaaaaatacttgcactctacatttatcatcatactttactctacatataatgtgattattgtaattaaatattagaggtccatattttaattaaatgaatataaaaaatcactaaccataaaatactattgtgatgatgttaagctacaaataataagagaaatgcaaaatggcacgttaagatgtcaaacaacagaaaaggtagtgtattgcaatttgtataaattttaatatcaagtcttacagtttttaatttaataatattgaaaattattaaccaattataaagtgtcaacataggtgtagtgttagataacttaagatgtgcaatagcaatgctctaagggcctgtttaacacgcatgattagattagattagatttagaaagattaaattagattggattggattgaattgtgtttaattttagaatggactgtatttgttttactttctaaaaaaataaaactaatagaatttaaaatacattttaagtataagtaattataacataaatttaaatttaaatcataaaagtaattaacaagtttttgtgaaaaaaaatatatttatatatcatatgtacataaatatgtatgatagctaaattaaataatgtatcatgctttaatataataaaaaaaaagaaataatgaaataaaaatattttaataataaaaagaaatatttatatcaagtaattattatgctgatatttcaagcattaaatatggacacgacatgtagatataagtctcaaagattgagaaaaactataaacgtgaagaataaaataagtgtctcacctcaggatatgctacaattaaatgatatattggtctcgtattgtattataaaatagttgtctaataaaagtgataaaattataaatataacggttagcgagaacacaacatcataaggtcatcacggacttgaccgagatagacaagacataaatagagtacaaaggaatgaatagctagaaagggttgataacgagttttttaagagcttgcagctcattaatctgcatactcacgagtatgttgaaagactaaaataaatgagcaaaatacgatctatctcagaatgctcatagaccacgcgaaagaattaactcaaatggataatagaggatacaatcttaaaggttatctcaagattagtcataaataacaaaagtgaggaaaacacctcaactagcgtctcacaaaatacgtccaatcattcctaaacattgttgaagagtgtgaggaaaattttgggtattgattattcacatttcataaacaattatctagataagataaaaaagg

SEQ ID NO: 307345 - DNA, 1544 bp, Cannabis indica
ataaaatagattacattgaaatggagttttatttagggcataaaacccaacactagttacaatccccgagttttacaaactagggttaattcctcaaaaatcacatacataaatttccacatataagactacaacactggaccatatcaaaaaataattgaattgtcactatcatctagtcgcgaccagactaaagcccgtctcgaccagagcctagataacggctacccctctctggttttgagcctggtcgcgaccaccaggttcgaaacccaaaaaatgcccaaaagtctagatttacctaatccgaacattaacaaattaaacccaagattgctacaacctaagcaattaatttttacaccaaatcaaattgtttctaggcatcacaaacatcaaaatacatgcttaaatactttaaacaaataaaattcaattacacaatcatatttttataaactcaagaacaccataaaaatactctcatgctcactcaataaactaccaaaactacaacaacaagaacaagttacctgaaatttactatcgagtccaaaagttgcataacctagacatgaacacaatcaacatccaattccaaactcagattcataactataaggcataaaatcacaaagaaaaccttatctttctcttgtgaacatcatccacacaaacaacatgcaaactcagctcatatacacattcagatattctcaattacatttgttataacacaatcacacaataaaataattttagaccctgaacctgattcgggccaaaatatcagattgtgactatatcgtgccaaattatcaaaaattacctgcagtaagagaatatgaacatgctatataataatatagtctattagcaaaatatatatcaaaattataattttaccattctcgtgtcaaaattgcaaaaatatccttaactcataaatggggtctaaaatgcaataattctcaaataatttcatataattaataatataataatatatttattaaattatagtcaattcatgagaaaattaaagaagtaattggtgatgcctagtgctgactgtgaacgcccatttgcacaagaattcagaggtggtagcatgcaccgtggcgtgcatcaaggaacacaatctccaaagcatgaacaatgctttgatgcctattcgatacgaaggctaagttctcaatatcaccaattgtttctttcaattttctcataatataggtcaaagaattgtggttttcgctgtcaactacaacgaaagctatcaaaaaaatatggctgtgtgcatccagtgccactgcacacaacatttacccactatacctagtcttcaagaaagacccatcaacacatacaataggtcggcaaaaactaaacccacggatacaaggacctagagagaagaaacaatacttgaaacgaccatcctatactacaaaatatgtgatggtacctggatttctcaactttagtgtaacattcccgcttcaagcctccattagggcccttacacccacaaaataatgact

SEQ ID NO: 307346 - DNA, 1428 bp, Cannabis indica
aaacccatacccgcccccccctcccccgaaagtcaacccccgtacctgcaggtacccgaacccgcgagtataattgccattcctaccaccaaacaaaaatttggacatatttgaccccaaaatcttcacccccaacccctcaaacttcagcccgacttccataaaatcatatgttacatatacccaaccctaataatataatcctcagccaaaagtatttttgacactcttgtcatgtcatgttaatctctcggtaatcctttaattatttttaaacatttttatgtaaaaataagtgcaaatttttttaaaacattacgattcaaatttaaacttaccacatatctaaaaatgtatttttattataatttctttaaatttataataaatagaaatccataacaaaactcatatataataattttattattgtattaaagttacaataaaaacatctttttattaatttattattgcttctattattatgttattattctattattgcttatattattatattacgagatattagtggttaaattttccaaactacatatttagttacacttaatcctacaaatccaatttttagtggtaaaatcctaaactcgcattttgttgtggtctttatcctttccttaaatttccaaagttaagtgccaaaatagtaggtctatgtgtacacaattatacacatattatgttttaatttgtccacataattttaattatttttattattataaaaaaatctattttctttctttttttccatttctttttttttcttcttcctcccctgtgtcttctccttctccaaaatcctagtcgcctctacccctaacctccctctgcctaagtttatgtccagccattgcccaggccaccacccctatgtctttctcgttaacccctcaacaacaattgaaagaaaaaaaaacataattctttatctacctctttccttctatctctctcgcatctgccctatcactttctcaatgcccaaattgtgtcgccgcctctcttcactggcgataaaaatgaagaacgccattttgttgatttgagaaagagagatagaagaagggaaaatttcatttacactgaatagtgaatggtttatctgtagtgcctattctatttctcattgatcactctttttatcgattgggctcgtaattctattgcctaatgtaagctctcttgtttctcatttagtggatagggttttcaactttctaacttgttcataatagctctggattaagttcacttggatctctttcttcacttgtgtcacctcttttttaagtattttgtaaatctgaaattttttatttttccataatattgagagtgcatgtcacgacccgagccctaaaccatagcagatatgttgtaacaccctaactaccttaggcg

SEQ ID NO: 307347 - DNA, 2274 bp, Cannabis indica
gggcataaaacccaacaagatgaaccacggactataactggaccttccaacatatacaattttggtttgtcatgaataagtaggaagtgtttaattttctaggatctctgtacgacgcatagtcagggttcacgaacgcttcaacttcaattctcctttttctttctcataagtcagaccataatcccaagtgccctttaagtaccttaataaccatttaagggccttctaatattcaatacccaaattggacatgaactgacttagaatgcttagagcatgagctatgttcggtctggtgctcaccataccatatattagacatcctaaaaccactgcatagggtacatccttcattttctccaactctttcgcactgttcggacattgttccttcgacaggacaaactgtctgcctaatggtacaaaagtactctttgcatcttccatgttgaacttctgaataactttcttgatgtacctagactgcttcaagctcgttgtctcttccttcttgttccttaaaacttcaataccaaatatatatcttttgaactcatccaagctccttcatctcaaattctctcttgagcttggctttgatactcttcatcactgattggtctttgatcattatgagcatgtcatccacataaagcaaaagaacacaactatagaatgtaccaaattcttaaaatataagcagtgatcatattatgattgtttgaactcaaattgttggatataagtatcaatatgttgttccattgtcttagagactgtttcaaactatataaggagttggtgagcttgcatactaattcaactcccttaccttccacctaaaactcaggtggttgcttcatgtagatctcttcatccaagaatccattcaaaaatcagtcttaaattaagttgttcaacttcaaactccatttgagctgccaaagatagcatcaatcttatcatcttatactttactacatgtgagaagatttttatgtagtcaattccttccacctgagtaaaatccttagccactaacctggctttgaaccatactggtttattctcattgattccctctttcaccttgcaaattcatttgcactccacaatcttttgttctccgactttggtacaactatccaagtcttgttcttccagcactaatccatctcctcatccatggcctagagccattttgatttgtttccacctaaaattgcctcttcgtagcttctgggctcttcaatttcagtttgttgtactgttgtcagtgcaaatgctattaagtctacttctgcaaaccttttcgtgcccatatgtgagtgtcatgagaaataccttggattgctttcataattatcagcagtattaaagagaaaatatggagacttatgcacactaggagtaaaaaattattctcgacaagggaaaaaagtgctccttaaagcagtggttcaacccattccaacttatgacatgagttatttatgattaccaatcttcgtttgcaaccagctagagtccatgatgtccaacttttggtgaggattagatgaaaaaggtaaaaaaaaaaaaaaatacactggcgtagtttgaatttgctttgtaagactaaagcagatgggggtataggatttcactcatttgtgcactttaatcaagctctgttagccaaaaaaaatatagagaatattagagaaccatcactctctattaagcaggttactaaagagtcgctatttctcaaattatttgttttttgaagcacattatggtcactctcctttgatgacttgggaagggattgtttggagaatggaacttttatttactggtttgcaatgaaaaattggtgaagataggtggattagatgtggcattgacccttggatttttggtcacaatactttttgttccaatctgctatattgttcctcacaacagggttgtggctaaccttatcacgaaggaaagataatgggatactggcttgttgaatcggtatttctcttccgcaggatgtggaaagaattctaactctgtctttgagtttttctcccaataaagacactcttatttggcaacatcatcactcaagcctctacagagttaaattaggttaccacatagttgcctctctagatgaattagattagtcttctgttggaaattattttaccaggatcttagatctactcacaagtatgttgattaacaccctagatatgaacttctaaaacgattataaataaacacatataaagt

SEQ ID NO: 307348 - DNA, 2431 bp, Cannabis indica
atatcagataaaattttccaattgagcaatttgaacgagggtgaagactcagcttccatagcctaacacaactctcttggaattttaaaacgatgttgttgacttacccaataagcacctttaaccgagaaaatgcccaaattttatagccttccaaaataaatatttgtaccccaagcaaaggtttgatccttaaatatcattcactatctcctcgttaaaacactctcgaatcaaccattcattccaaacccgagtttgatccacaaacaaatctttaaccttccagaaagcatgatttcgtttaaactggaagtttgctttaatattatctatttgtctccaagggatccaaggtcttttccaaagctaacaactgccatcagctatcaagatacccgtaccctccaaacacacttttctagcttccaacaagctcttcccacatcaagagtcgcttccatgcttctccactgtccaagcattgctgttttgacaatatttatcctaaaaaaccctaacccagactttatcatcctccctcatcaccatccaaaatagcttggcgaagagagccaagttcatatctttgaaccttcaaatgcctaatccaccaaacctttttggtggacatatatcattccagcttttcaaagcacagtaatgtctttttcccaaattaccaacccaccaaaatctagctaacaaacgatctagctcatcacataaagtgctaagaacttgaactgcagacataaagtagtttggtatgctttggagaactgaaataaccaatcttgttctacctgcttgagacaaatgtctggcttttcaaccctccaacctgcccagaattttttccttcagaaaatggtagtcttcccttttctctgcagtaaagaacaaaagattaccaaggtacttttccttagaatttacacagttgataccaagcagcctctttaattcttcacgacacctccgagtagtattaggagagaagatcacaccacttttctgcttactaaccctttgacctgaccaaacttcatatttttggagaccaaattcgtgagtgttttagcattctttgccgaggcttgacaaaagaaaagagaatcatcagcataaaaagatgagtaatagaattagcattccttgaaacacgaccaccaacaatatcaccttccctttcaactctgaaaatgagtttagaaagtacctcactgcaaaggatgaagaggaaatgtgagagcggatctccttgtcgaagtccacgtttaggattgaagggagccaaaggagcaccactaagcaaggtggagaaattaactgtcgaaacacattgcataatgagcttacaaacatgggagctgaatccatttgctcgaagaactcgaaagaggaagccccattctaaacgatcatatgccttgttcatgttcgtcttgattgccataacccctacctttcctctcttattttttatcgtgtgaagcacttcttgggccaaaagagaatacttagctatctaatgccccgggataaaggcagattggaacagtgagaccaaacgatcaatcactccttttaatcgatccgtcaagatgcgagatatgatcttatactcaaaattatacaggctagtatgtcgaaattgctcaaaacaagcagcattagagactgggaattaaacagataaaagtatggttcaactacttattaagaaccccataagagaaaaatgccttaattccataacataaacttgctcaccaactatgctccagtatttccttaaaaaaaatagttggaaatccatcaagaccatgtgccttaaagggatgtaatttgaaaaccacaatctctgatctcacagtcatcaaggaccctgctaatgctttcattttccattgaagttaccttttcgacaaaaagtgattcgaactcctactcaatacatgtcccagttgactcatagattgactgaaaatgttccaggatgtaatccccaatttcttcatgttgtctcaaccaattaccagaatcgtcttccacgatcccaataaaattgcatcttctacggattaatgttgaagcatggaagaatttcgtattatcatcgccaaatctgagctaactttctcgtatttttgtttccaaatcctatccatccttccttctaactccaaaattttcaactgaatttttgcttctttttcaacattaaacaaagaaattggttcattttggatgcgtcctagttgactttgaaaactctttataattgaccctagtctcatcacaactataatatatataatatttatacttataaaattacatatgaaactatcaaaatatggtcagtgccatatataacatattaaaattaagagaaaacctcacatactattttttaacttttttt

SEQ ID NO: 307349 - DNA, 1181 bp, Cannabis indica
tttgcgagacacacacacacaaaaaaaaataaaaaaaaaaaaaaagggcagtataatattttaagcgaaataggaggactaaaatgatatattggattaatttaaacagagtcgtttgggaatcggaaacggtggtttcattcattgcgttgagtccttggttgttgtggcggctgaggctgagcctgaaactcaagcatcactgcatctatacagtatacctgtattacccaattctctaaaactatattgcagctctttatctttccaattcttcttcctctccctttgtttgctacagctcccagtttcttctacatcttcgcgcttcctattttatccatttccatagaggttcgttcttcaatagctttttgcttttgtttttttttttttcttgaaattaggttttcgtgttcttatgtatatcaatcttgtatgtttttcattaatttgttctgctttatggatttttctgggttgctgctggataagatagagtttcgaaaattgagtttcatgctgttgtttttgtttccacttgattatcttcaatttgtgtagctgctgtatactttgatttccatgctttgcattttttttagcttaaaaaatttgtcatacgaggggtaattgatatgttttcacgttgggatttatctaaaaaattttgtattggattcatgtttacctgtattgaactttagcagacgttgaatgagcatgttggtatcttttttcgccagttatttactttgttttgtatattttacattactaggcttagattgtggacttgggtttgtcactataagaaccattttttttttataaaagaaattactgtataataagacaatcctgaagtggtgattcttgggtttcaagtttaatttgtcttgtgttttggtgatacttgttgttgatagatatggacgatgatttacctgctggaatagaaagtagtggccgaagaaagaacagaaaaaagaggaaaactggtagtacattgggcactagggaggaggctacaccaatagagaccgcggtcaatgttgatacaaaggaggcagcggagatcgatgttaaagcagaggaggctaccgaggtcattaatgacacaaaggaggggatgactgaggccaaagttaatacagagttggtgccaacttcaacaaaaa

SEQ ID NO: 307350 - DNA, 1114 bp, Cannabis indica
tttttgctaaatgagctatatattttagtttttcactatttatttacatttctattagaaatgctcttagttaaccaatctctacttttgtgtctttattatggaatgaataaattaatcatcatcctcttagttaacataactaatttttgttaaatactttcttaaattttgaataaatacgatttagttatatctatagtttaacagaatagttaaattagatacaagtaaaagaagcaatcaaagttcatagtcatctatatatcaacaagtggagtcagttagaagaattagcttaactagcaaattgccagcttagatgggaaacagattggccatgatcctattcctaactcatttctccggtagagatcttgatggaaggtctcacctagataaatatagagtctcggtcccgagctcatcactcattccgtaaaaacaataaatatatctaaaaagagtagagagagcttggaagctcaattacccacataaattaattttctttacaatcaaaacttatgtgggattgaagctcaaagaatcaatggttagaagtattttaatcctacaattatatagtatatatattcatttaattctgccttatatatatttatatatttatttatttccccagagggccttagtaatttaaagtttgtattttcgtacttagtaatttaaaatttgcattttaacttagtaattcaaagtttgcatttcttgttagtaattcaaagtttgcattttactttttgaatcaaaatttgtgtctttaatcatttactaattgaaagtttgtagttttactaattgactgaaaggtagtgtctttatttacttagtaattgaaagtttgtgttttgtatctttgaagtatttttatactaataattaggctataaaggagcccatttatatatgagatgtttgcatcccttaatttcttaagatttcaaattctctgcttaaaatatctgaaaaagaactgcaacatcaatggcctcacaaaaagctatgaacagtaattctaatacacattactaatgttttgtttttcataagttgaatagtagatcaaatatatatcatcatcatcatcacc

SEQ ID NO: 307351 - DNA, 1458 bp, Cannabis indica
taatattatttatttattttaaattagtcatcgtaatattattttttggttagctatattaataagaaaaattacttcatatattatttttttaactaatttttttttaaatttacggtttggatttctaaagtggttgcagcgctagttgcaataggagtttctatgtagaattccataaaaataaaaaaaaaaaaaaaaactgttttaaaatgtaaaaataaaaaaactcctattaagtataaataaactgttttgttatttatttatatgttttagtaattttaattttattgactttttttgttatttagatttttgggaagattagattgaagaaaataattagaggtgtgggtcagaaaaagcataaagtatatgtaaggaaaagaaaaaggttcattttctgataagaagcatatggcagcacatacttaaaacaaaatagagagaaaagaaaaagtagtatgattgaagatagaaccttttgacctgagaaattttcatagtgaaaaactggtttgattcctccttgtgggattgggtgtgacagcacataatacattgttttcacatgctttttgaaaagttgttgtatataatgcaatcaattccaaaaccctacaccatcactgcctcaatcacacacattgcttacctttttattgcttgttacggtagctctaatcataaatattaaatttggtgttcaacataaaaattaaaaaaaattgtggtaaaagtttttataaagttcaatttaatacagataagtctctaaggtcgaaaaaatagcggcaataatccttaaggtaatatttttcgtaagtccgttagtctttttttttaacagagccgttaatcatttaaaaataccacgtgttgaaattttattggtccaaattatattttaattaaaataattttaaaaaacaaaatatattaatttaaaaaaattaatttttttatcttttctttttctttttttttcctttcccttttctctttcctctccttcttcgtgtcttctagctgcccagaaaaatcataaacccaaaaacactaccatctctcccaatttcaacaaaacccctgcacttccatttcattcctactgccaagcaaatcccatctctttatccgagcaaaacccaagaaactcccataataagaaaccttgaacacaagaaaaagaaaaaaaaaaccagaaaaccataatagttgcactgtgatttcgctccatatcaagtcatcccacacattccaactatcattgacgaccctaaccacaaccaaatcgccgccattaacccgcaaaaaaagaaaaagaagacctagagaaggataaaaaaagatgaacatatgccctgttcgactttttatttgggcttacattaacttttattggttttattaaaacttgggttgattggatagttctttgctgtgttagctcat

SEQ ID NO: 307352 - DNA, 2673 bp, Cannabis indica
ttttatttatttaggggtaaaattggatgaaaaatgttatccaagcatattttgcatgatgcaaaatagggtagcatatttttagtgggtaaatttattttaatcatataatggtaattttccctttgtttttcgccaacttcccaaaagatctcataacaatatatatatttttcatttatatatctatgatcttttgtatttttttgccaatttagaattttagttgcacactcaataataataataaattaatagataatcggaattaatgagatgcgccctatatgggctggggttgttccatcgtatttaccgaggtttttggaacctaaaatatttaggagctaaaaaaataacaaaataaaaaaaataatgagatggtgatatttggtttaggtgttaattaaccttagtccacgagtcagtctattagcctctaaagacatatttaatgagtttacagtattttgcatgaaatcctaactctatactcttagtttctcttagagaagaagaatacttagagcaatattggcaaagcttcgactatttaggtggtaatccccccattcatatagaaatagaagggtatataggctgtgtggcgggtatggacatgcccatgacccgcctagggtttttgcgaaaagcctactaatggagtaaattacatgcaaaaagagctaaccatagggccccttggaaataattgtgctcatgcgtgcatcagctggacgattaggtaccattgtacttggtgggcacatgtcaccaaaaggtttaacctttaaaagtggaggcatagaataaatgtttggaaaaaaggtggatgaggtacgcacactaccatatctggacaaaggggacaggatctgatcctgtgtccgaaaaagtataaccgttgctgggcaattcgggttattccaaaggtagacgtcttcgacactcttgggcggtcaatgtccatgattggccttttgagtatccatttgagtatcgattggccagattctaggtttggacctctttgtatcctggagagacaatatgtcttctgcatccgagaagcaaagatgaagcgaggtagacatccccttatctcttggtcttgacttgttcccagttccgtgaagcttctctgcaacaagactattatgggagatttcaattagggagattacgagattatctcttcctttttatgctacatgtcactcattgagaaacacatataatattgagtcccaagtttctgggactcttcgagatctaggagctttcagtcttcttccgcttcttaaaaataagtcttttgacacgtggtgattgttagggttacgaacgtggcactcatgcggcgcctttaatgtatctgtggctagcatgcacatgcaaggtgtgtgtgctttcaagagagttgcaatactcgaggagtgcaatgataaaaaaaaatgccctgagcctgttttaattgccatattttcaactttccatccattggatcaaattatgatttttttagagaaaagatctgggccattcatttcgaattgcatgttttggtcgaagtacaaatttattccttcaatccatcttgccatttttcatcactttaagccttcagaacccccattttagacttccaaaccaaagctttttgctttccagaaaacttccatcttgcaatcgtctcttgtggtgaatgcaagaagtctttaagtgcctcatccaatatttcttcacacagctcggtttccagatgcaaagctgataaaccccgaccttctccaccctcggccagacgagaacttcgacactcaagctggttacgatcgcgtgattgactaggtctgacactcttggcagatttccgcaacaacctttcattccccactcaaataccaagtaagtatcccgatgctttgttcattttttgctatttcatatctaggatagaattgcttagttcaagctaggtctaggttatctggtatgtttgaatggtggaatgttgcccgtggaaatatagttccagagtaagattgtgtgggaagttttgcaccatgagagtgtcaatattgtgtggacagtttgggtatggccattcatactgcataaacacttgcatgcttctatgattttgaaattagggtttgaaccaagcatgatgaacttttaggtaaatacgaggtccgtccatcttctatgcatcgatttggaattttcaagactccaaatggacttaattttttgaaatatttctttagatttcattttggtaacttttccctgggttcccaatctatcacttcaggttgtctggtgaagacaagcttttaggagtgatgggtccagcagggaccactccgagcaatttttaggcgaggcctttcccaatgcccattttgtcatttggatagtgggtgtctaattccttggctcttgttttcctttcatttctccagtgatggatttgaaccaggagttccatcttgaggcggtggaaattaaagaaaacaccacagttgcctatgttgagggaatggccactaagggaactcaggcagaacttcctgcaggggaacttcatttgggtgttgtgttggaaatattttgccaggatctagatttactaccatgtatgttttattaacaacctaatatgaattc

SEQ ID NO: 307353 - DNA, 1732 bp, Cannabis indica
atactttaaatgactatttaaaaaggtcgagaaaatccatttttgtagtagtgagaaaaaatagaatcttattgaatgaatacaagtacacagtatatataaaatgtgaagcacataacaactaagtgaaataaccgaaaaggactaactaagaattccattataacaaacaactaactaactgtcttaatcctcaagctcataattgaatgatcttcaattttgagtttgttcctaaagacagaaaacctttgaatagaaatagccttggttagaccatctcccagttggtcgaaagcagcaacatgtttgatgtgtactattttgttcaaaaccttttctcggacaaagtacaggtctcgctcaatatgcttcgttcgagcgtgcaacacatggttctgagtgagcataattgtgttaagattgtcgcaccatatagtaggtggttgagggagcttgatatgcagtttagaaaatagataatgcagccaggtgagttttgcaatgacattagcaacactcttgcattcagcttctgtgctggattgagaaatagtctgttgcttcttgcttttccatgctatcaaatttgaaccaaaaaaggtagcatagcgagaggtagattttttttatcatctggattggatgcccagtcagcatcgcagaatgccacaagatcatgagattctggtttggtgaagtgaaggtcgcagtgcattgtactacttatgtatctcagaatacgtttcactgcttgccaatatgtggacagaggtctttgcataaattgacacaccttgttcacactaaaggacaagtctggtcttgtgatggtgaggtactgtaaaacacctacaatggacctgtattgttgaatgtctgcaagtggttcttgctagtgagctgataagcgaagtctacttgtcattggtgttggagaaggtttggaacctaaacatctgagctttaattagaaggtcttgaacatattgttttgataaagatgaatactgtcatctgtgtagataacctatatactaaggaaatacttgaggagtcaaagatccttcagagagaactgagtgttcaaatcagccataagatcaacagcaacaactgaatcactacttgttatcaaaatatcatcaacatacacttggacaagtgttgttgactgagatgaatgattgatgaacagggggtgatcagatttagaaggaatgaacccaagtgaggtcaagctatgttgtaacttatcaaaccaagctctaggagcttgtttaagaccatatagatattttttttaatttgcacaataagtgttcctggccagggatttcaaaacctggtggctgggtcatgtagacttcttgtaagtcaccattcaaaaaggcatttttgacatcaagttgtctcacatcccaacctttggacaatgctagagttaacacaactcgtatggtgactggtttgacaacagggctaaaggtttctgtgaagtcgaagcctgcttgttggtgaaaccctttggcaactaatcgagctttgtacttgagaacactaccatcatggtttttctttttcttgtaagcccatttgcagcctatggcctgtctcccttcaagaagtctcactaaaatccatgtcctgtttctggccaaggctaggatctcatcactcatagaattattccaatgctcttattgaagtgcctgttggaaatattttacca

SEQ ID NO: 307354 - DNA, 1806 bp, Cannabis indica
aacttcactgaaaatagatttagactaaatagtagtagtagtggaggcgttcaagaaaagtgactcacttttgtatgcttgtcacatgtctagttttagcatttctctaaagaattgtgtagaattatctgctaaaagtttgataccaaaaacaaagtaaagttgttgattttttacctgttgttttccctagtctgtccttatgtcttaaagtcacaccagtgcacaactgcacatgccccacgggaccagccaaaaactaaagttatggccataaatagcccaacccaagtgaagggcaaaaaagaaaaacgctacggtccaaagagaggaaaatagcaagtaattactagcgccattcaaaacccaaaatgttgttcaactcaccggattagaaattccacaatcaacttttcaacccatgcgtattacctgtatttgcacaagatattaataatgatatattatcatgtccattgtccagtccactgcggacaaaaaaaaaaataatatatatattaacatgtggttacctgagcttatttgtagttggaggtagactttgaacaattgacttgggaagacttaaggagaaaagtatacttgtttttgttggaagaaggttctcggttgcctttgaatttaggaagttggttgtgcaactcattttagctttcatgaccgtcttcactctgcagtacagtgggggcttcaagctttttctgctctgagtaataaacatttccaacaacaataaaaatatatctcaagctttttctgctctgagtaataaacatttccaacaacaataaaaatatatctcaaggttctttttctgcttattctatatattattttatttaccgttagttttctctctttattatttgttatttcctgtcctttttttcattccgtcatgaactctggtgagtgttttgtaaaaataacttttatgaaattttttattagtaaattaattttttatggtcgtaaaaagaactatgaattacagggcgggaccataaataattattatagtcgcaaaaccatcatgtgatggtcgcgtagattattttacaaattttaatatttcaaagggttagtttggcaaatttcacagctctggtttgtgcgtatatacgaaatgtacgaatcctgaattgtatcattttaacttgagtttttttatttgttttgacaatcatcttagcttaagttaattctaaatagttttgtctttgtagacattatttccattagtaacatggtaggagtgattgtttttcccgtttacgattatcaaataatttgattctttttgtttccttcattgtatataatactagtaaaaagaatatattaccctgagattctttaaaggtgatttctgtcaatagaaattttacttggatattctgtgttttttcgcccctatccatttaaccatttgtcgtggttcatatttataaaaatctagtctcaatgcttgttttagtgatggaaactaagtcaagtagaaattggaatgatctgatacctgtttctttgctcttctgatatgtaattcgcactagaaagaacttgactttttctcttctagatttttttttgtcacgctatcaaaatattaacgaaaacaatttcgtgccagacaattacaatggacttaggggacagtgaacaaagctaaaaaggatgtggtgaatcttcaccctcaaaacaagttgttacagcagtaacaatattcaagaaacacaaatcaaaactaaaaccaatcacaaaccaaaacttgaacttaattga

SEQ ID NO: 307355 - DNA, 1991 bp, Cannabis indica
aaatgtaagaagagtgattatagtatataaatatttttttttaagataaataagttattacaaagtaaaaattctaaatctgttattggccctaaacacctatagcctatttatacttagggtcaagcctgtgtgtacacatgcacatgcacgtacacatacataaacatgcacatgcacatgcacgtacgtactacgtaattaagaaatcacttatatatatattatatatataaaaaaatgtttaccatgttggcaataacttgcataagtggcattgtttacgacaccatagtgatcaagctcataatcacgaactttgagctcaatttcaatattattattattattattattattattattattattattatggcatttataatggggaaaaacaaagaccgaagacgacgttgatgagtaatagtaactggaaaagctactaatgatggcgatgaacggtgaagatcgtgacacgtggacacatgtcctagtggcctattattgtaggtaggagttggcaatattgaaatggtgtgcaacatattgtttgctaattctatatagctttatcgaatactcatatggggactttgtttatatatatatatagtagaaaatataaaaggattggcaaattattgattataattaggcaaacctaaaggccggcctagaatatattaaatacccaataattaactattatgctggcccaataatattatagactagctagttaactatgagtcgatataaggctgaattgaagacaattaggatagggagagagaaatggttgttggattaaaattttattgtaggtacatatgtataatgtatatgttattataaagtgtgatataaaattaagtgaccattgttgattgttcatcatggccatctcttctaagagctcatgggcttcattaacgctttttcacataaaggccccaccagaagcgatatctatgagtgtgtgggtattactagtcaaaccattgtagaagttatggaccagcatccactttgccatcccgtgatgggggacactttctaataagatccttgaacctctcccaaacatcataaagagactcacggtcgagctggtagaaattattgatctcccttctcagcctgatagctttagttggaggaaagaacttggaaagaaacttaatttaaggccaattcatcccaagtgttgattgagttaggtgataaagacaacaactaactcttcgttcgttccctcagtgagaatgggaacaatctcaagtgaataatatcgtcactaactccattcatcttgaatatttgacaaagctaaacgaagttagctaaatgcatgtttagatcttctgacggaagtctcccaaactggattgtggattgaaccatttgaagaatggctggtttgattttgaaattatttgcttcaatggcaggtggccttatacaagactggatccctggtgggtagcacataatccctcaatcttctgtcaggtagattgtggccattatcctgatccacaacaccattatgcccattatgagccatgacttcttctaattcaacccttgtagcaactttttctaaccacttgttttttctattttgtgtgcaggttaatctcaagatcaacaggtactcttgcagttggtttttgacgacgcataaactacttattcttgagaaaagagaaaaatcgacacaaacatgttagcaaaaaaatagaaagagagaaccaaattagaataaaatttaattgatttaatattaactaaaatagtccctggcaacggcgctaaaaacttgtaataaattttccaacacgtaagtatacgtaccttttacaagtaatagactcacaagagtgaggtcaatcccacaaggaccatagttaattaccaaacaattaaatttctaattctatttggtgacaataaaaataagataatatatttaatttctactaaaa

SEQ ID NO: 307356 - DNA, 1189 bp, Cannabis indica
aaaaaaaacatacaaattcaattaataaactatataatatgatatttcaaatttaataataaataaactattaaacatacaattataatcatatactataaaacaatatggtacctaaaacctctatttaaaaaaaaattataacttttaagtttttaacaaatttctcatcagaaaatctcctaaaaaaagtaatcatcctcttacacaaaaagcatatataatccacaacaatatataataaaaaccattataaacttcattaatcataccataacctaatatttaaagctttaaaatatcatatatttttgaaaatatagagaaatatatttagctcaaaacgcacaccttcgttgctctccattcgtcttaagtattgaaatttcgcaaattaatgagaaaaagaaagatgagcttgctagggcaaagcttataatatgcgcttcacatcttccatcgataaatgccaacggtttagtgcctagctaggcatttgacctctttcgaggaaaaacgtgaaaagtttaattattatacgacttctccaaagtaaatgtaacaagtcaacccgacatattttacatctaacaatgttaaacatagaaatattacttttttctcagaagtgacataatcgacacttattattagttgttgtaataagctttgtgagattatttatgggtgcaaatgcatgacataagataagatagggtcatattaatgtgtgcatattgttgtagtgaaagttcacttatatatatgtgtaacccaaatgtatagaaatcacaaaactgaaaaccaacttcttaagcttcatcaaagaaagtcaacttgattaatatattgttaaataataagtttaatttggccactaagagagtagacatacacaacaatatatagattttgtaatattttaaaaagtagaaggtttagtttatcatttaataaaaataaaatgtttaatcaataacttttataaaacacacaatatctaaaatgcactataaaaaacagttacttttagtgataattttttagtcacaacataatttttttgtgactaaatatgagttttagtcacaataaaaagttacttgtagctaaaatataatatttagctacaaattgtcactgatttagttttagtcacaataatcacaggtattgtgactaaaaatac

SEQ ID NO: 307357 - DNA, 2062 bp, Cannabis indica
gaagcaatgtgagatggcccccacacatctgtgtgaatgagttctaatggttgactagctcttgaagtggacaatggaaaaggaagtctatgactcttccctaattgacaggcattacaaaactttaggtttttgagagagtggggaatattagcttgagtcaaaattttagtaagtatggccggggatggatgccctaatttagagtgccacaagttgatatcatgagaaagtgtagaactatagacaacagcattggaatttgaaggaaaagaaagcaattctttattgatatctgtagagttacaatcagttgaaccatactgtgaaagacaacattgggaattacattgattcggtactaaagtactatttgactcaattagatgacattgcacagacgtgtgagagaggttggagccatcatcaccaagaaggtaaagaccatctttaagcttccctttgaccaagacagcccctgtttgtttgtccttgacaaacaagttttatggaattcaagaaaaacatggttatcattagtaagcttagaaacactaatgagatttttggtaatagaagccacttgcaaaacagaatttagatgtaaagaagatgattgtttggcaggtaagaaagttttaccaatgtgggaaatgaggagtttcttaccatctcctacagccacagtttcttgaccagcataaggaactgcattatcaaggggagcttcactgtaagagatgtggtgagtggctcctgtgtcaacaaaccatccttggtcatcaccaaagtcaggaacagtgttggccacaaaggcagtaggctcatactcagtgatctgttcagtgagatgaacttgaggttgggaatttccagtaggggctttgggagtgacccaacttttgtcaaaccggtagtggcatgttggggctgtatggccatatctcatacacacttgacacagggggcgattggagtttgcaggtctggaattgtaatattgttgggtgctacgagtgggaaatcttgatgagaaatcagcaccagaccctctgccattattaccattggatctgaagttgccatttcttgatccaaatgtgagattggcaaccattttagtcgatagatccatcatagtgttgtgccgttcgagtctggtttcatgagccaataacagggcttgaacttcttcaagggacagattatcactacgcgaagtgataccagataccacagagtcgaatcgggtccaagaccatttaggagatgaagaaccaaatcgagatcagatatagagtgacccgcaacagcaagggaatcacagataactttcagtttatcaatatagtcagagatagactggttacctttgtgggcattagacaattggcttttgagttgtagtaatctggcctttaattgactcgaaaacttttgtgcaagggctgtccaaaccgcattcgatgtagtgtagctagccaccgttccaagaacgccttcagtcattgaagatcgaatccaagaaagaagaagctgatctttcttgcgccattgttgaaaggatgggttcggatcaccattaaccaagtgtcgtggtggagactggtcagtgagcaagatttcatcgagctcaaggccaatcaccgtgggaagaacttgagacttccatgccaggaagttgtttcgatcaagcttgatcgtgagagaagatgtcagggaatgagaaaagggattccaggtagtagcagagggtgcagctggatcggagatgcttgcaggagacgagttgtcgcctgaggaagccattgacagaggtcaaaggctctgataccatgaaacaaatagaacagaggagaacagagaggaaattgagaagcaaagcttgtctcttacacgagactttattgatgtttatatagcccaattaggcagcaaactaatacaaagcaattagttataacagaattgctagaaagattacaagtggcttttaacagaatctgaacagaaaataacagacccaagacacaaaaccaactaatcttgactttggttatca

SEQ ID NO: 307358 - DNA, 2363 bp, Cannabis indica
agccaccagattcatgtcctttaccaataatcttcttcgtcataagatcttaaaacaaataatgatcgcgaaagaatgagatgcaacagtttagattacaagtgagttgactaacaaaaagaaaattaaaggataaattaggtaaatgtaagactgatgacaaagtgagctgaggtgtaggaataacagtgccagatctaagaataggagatggtgatccatcaacttacgtaataatcaaagtgggactatgaggctgaaaagtaaaaaagagattgaaattacctctcatatgatctgtgacaccagaatcaatgacctattttgagaatttgaaaagagggatgcattagagttacctaaattaataacaattgttgtgattgaagaagatgaagacttaagtatttcctaatacctcaagaatttggcaaatttatcaatagaaataaggaccgattttcagatacatcactcgtggttgtaatattagcagtgtgtttttgctaatgtttgaattgtcacttcctagacacaaacttagtgtagcctgatttcttacaatattattcccaaattaatattataactcatggcatcatgtgatgtgagtagagtagtattcctatgtccatgatcacctacctacttgactacttccagtccatcagtttagtatactatattatatttatggtattatataatggttaagttgattatacaggagtagtgtatattaacaacagtatatatatttatattcgtgtgaccaaccaaaccaaaccatgaacatgcagtgaaagtgaaactccaaactcgtggtgtgtctagggcagggtgaagtggagcccacaaaccaattatgtcctaaccttgcggggttctggtcacgtgaggaactggactgaaagaaacaattctctcactctcattgggtagtaataatagtattggtctaaaggtcaattagttaagttgggtcaacaaaatgaagatattaattgtcacactcttcttcgttggcaacgtcagaagaaattagccaccttcctttaattatttccatgacacgtgcccatcaaagctgtcaatttctcattgtttttgttgattaaaagtcataaataatagtggtatgatatcatcacaattgttccaagctagattgcttaatcatatcatctactaaggtgaaaatcattaattcattatctatatattacatatgccttgcctgtggtttgtggagtatactccaagtttggcattttctgaaaataatttattaaacaaaacctccattccatgacaaatggtttttggcctgcagtttaactttccagcgaaaagtttgtctacaatgaaagattacaatttacaagtttaatttgaaatatataaatagtggccgaaaacatggtagtgacatagcagccacactctattattgtgatccggctagaagaattagacatgttcagaatttgtttgttcttattttattcttatgttgtttgagtactaataaatactatgttaaagaaattgaatatgctaatgctgacgtggacagaaatgccactgttgacatgcagagttctgatgtgtgaaataatagaccaacgtgtacatagagataatgttacagaaattaatgtaacaaaattgggaacaattacaacaataaaatcttttgagtttaggcacttgttcaattttttatcctcattttttaaataaagaaattgaagtaaaatgttaccaaaataacatcttttgtgtaaatttatttattttgagatactaaaatgcatctattttttgtttatgcacatgctcatgggagaatgaataaatataaactataaaattttgatttctacgttgagagtaccacttacaagttgatgtttctgtccaaggactcactacaaaaatcttacttttagtcacaacaaaacttgtgattaaaagtaagaacttcatatgcattaataattatagatatatgatcatttaatatagaaattaagatcatacaataagaatggaacaaatatatgatcttggagtaccattattatcataaataaaaatttatattattattaatgtgttatgttcatatttacttgaaattttaaattttagtatgaacaaagttgtacacacacatgattcaatccataatttagaagtccacacatactctgaaagagttataaaaaatatatcatcacagataatatacgatgatactttaaaaatgataacaataatcttatgagatatattatcaccaaaagaattatggatcatatgtgcatgagagggagacataattatgtgtcactcttttt

SEQ ID NO: 307359 - DNA, 572 bp, Cannabis indica
gaaacatgtgatttattttttgttggaagtatgtatatgtttttctacattgtcctcgtgatatgttcctactttgttccctaggaaattaagtggagagtagcaactttaagttactagttacatttatagtaaatttttaatgttgttttatttttaacaacttttatgcttgaaatgcaacagtcgttccaaaatgaaaactactagtcttgaaatgtaaatcatttttaccaaaataaaaattacaagccttcatatacaaactacaacctcaaaataaatgtgaatcatttatttattttaactaaataaatttgcatggtaacttgataattaacacttaaactaagtgttaattatcaaattattctatttttgcttcctcgttcctaagtactcatgtagagtgaacaaatattgcactgaggagttctaatagtcttagtggtgtatatgtattttttagtatatattcataaaattaaattacaattgtgatgtataatatagtctaaattaattatgctaaaattaacacaaaatatagtatgcgtcaaattttacactac

SEQ ID NO: 307360 - DNA, 1493 bp, Cannabis indica
tacttgtgagtaaatctaagatcctggtaaaataattcctaatagtgatggtattaggctcgacaatgcaaaatcattatgaatttttttaaagaaaacaataattaacttgttatcctattttttgcactatgacgggatatttagctagatgacttttacattttaaagagagaataactctgctatattaaaatggaataaccgaatattacttggcttgattaggttattagaacaaataagatgtatatatatacaataagtaggggctaaacaaatcctaatacccctctttcaagatgaaatgcgtaagtttcttagattcatcgtggttacaagtatatggaaataagtaggaaatagaggctttttaaaaatatctactatgtttttttggtggtgacttgaattagcttcagtgtgccttcttggaccttctctcgggcaacatgacagttaatctcaatatgctttgttcgttcatggaatacagggttgtcaaaaatgtggattgtggttgcattatcgcaataaagaatgtcgagatctttgtgtggtggatgccaaagtcccaaagaagggctaatagccaggtaatctcacatgtggcattggccatagcccgatattctgcttcactggaagaacaatagattgtcgaaagatttttcaatttccaagagattaaggatctgccaaggaagatacagtagtaaaaaatattcattggagtgtcactacaaaaagcccaatcagcatctaaaaaaatctttagatgaaagtctgtattggaaatattagtttcagcataagtagataagttaatagaagatgatgagtgaaaagaaagccctaggcaagaagtgttgtaaggatattttaaaattctatgagctggaacaagatggggagttcttggattagataaacactgacttattttattaatagcaaaagaaatatcaaggcgagtaatatgagtttaccaatgatgttgcgatatatttttgggttttttattggttcccaacatcggaggagagatcaatgctgggttccattggtgtagaagcagtggaagctcctgaagaacatgtgtcagtcaaaagttgtagggtgaatggtcgttgggatacgagaatttcgaagggagggtgaccaatttccaagcctaggaaaaaccattaaaggccaagatccttaaactggaaaattgaattatattgttgtttaaatgaaataatagcaacatcattatttgaagtaaccacaatgtcatgacatataataaaaggtcaagaaaaatacctttgttgtttttagtgaacaatgtgggataatcagaaagagatagtaaaaccattgaataaaaggtagttgctgagttcggtaaaccattttctaaaggcttatttcaagccatagagacttttgtatagtttacatatagtatttggaggaatattgtaacaccctaactatcttaggcg

SEQ ID NO: 307361 - DNA, 3399 bp, Cannabis indica
tttttttttttttgaaattgattggagtgtgttcgtgggggattttgggtttattattatgaatttaaggtttttgttggataacacgggaagtttagaaattcgggattttttttttctgtatttaatttcatagatatatgagcagaagaatttaagagaagttatgattttactcaaagttaatgtatcttcataattgaacatagtgctatacaaatatattggtagctttatcacagaagagttaggatttggtagttttgtttataattggtatcatctctctattgcatgaaaattttacagggctttttcataatttactatcttgagtaaagtttcatttttgatttggtttataagctcacctttgttttagcaaaattaagtagtgtggtacttatgaattgacactgtgataggttgttgaagaatatacacttgagaaggttttgaaggatgcttctatggatgataatactgtaattttaacaacattaaatgaagcttgggctgccccaaattcgactatcgatctatttcttgagagtttcaggattggaaatggtacccttaagctgttgaaccatttggtgattatagctatggatcgaacagcattcgcacgatgtttggaactccatagatattgtttttctcttgttagtgaaggatttgattttcatcaggaggcatattttatgactcaagattacttgaacatgatgtggagaaggattgatttcctccgctcggttttagagttgggatacaactttgttttcacggtaatttcttgctctctatgcttacatttacatctaacacaaactctaaagtacttgttgaactaatggcactcacttgttgttcattaaaagaactcaattgtcttagtgcaacaaaattttatgttgctcatcttgtttctactttcgattctgaatcacttccccgttacaatgggaaagaattactgaaataaaaaagaatcaagtagagaatttatgtaggagtgaattagacaaatgtaagaatcattcttgattgaaaatacttttcgtcggtatatcactctttgtcgtctgtcaaataatctatatacttactggagtgaccgaaatgcttcttgggagaggtttagccttgatgctaatttagaaaataataacactataggctgcaaaagcatgagaactttatatatagtcagttttcttgttacattttaaagaagtatgattaacccttttgctaatatagttatatacctttgtgtatatgaacccttctggttgttttctactgcaggatgcagatatcatgtggttcagggatccatttccttatttttattcacgcgcagattttcagattgcatgtgaccatttctttggaagctcttcaaatcttcacaacaggcccaatggagggtttacatatgtaaaggcgaataataggactaaagaattctacaaattttggtactcttcgcgggaaacttatccgggataccatgatcaagatgtcttcaacataataaagtttgatcctttcgtctttaatcttggactgaagatgagatttttggatacggctaactttggcgggctttgtgaacccagcaaagatttgaatcaagtttgtacaatgcatgcaaattgttgtttgggtttggagaacaagcttcatgacctgagaattatgcttgaagattggaaagtatttgttactttaccgccgagttggaagaagtctccattcgtaacctggagggttcccgaaaaatgcaggtaagctaagccttggcctataaactcttacaatttagttacattttgtcttaataaatataataaattcattaatgacattttcaacttgtgcaacttcatttcagcattgaggctcttcgtcattccggtgctccaatgagcgattgacatggagactaatctatatggtctgaagatttattttccaaacagctatggggagcatgccagtattaaatcctcccaaatggttgagatttttcattgccaagatcccttctggaaaaaataaaggatgggtgattttggaagaaaacactgaagattccttggtgacctttgttaaggctcaaatgggctttggtcaattcaattaatcatgttgaattttctatacagaaatctttggtaggaaattgtttgatgtcccacttttgtaaagtcctcctccattgctccagaaagtagcatttagtacttagcaacattgtggaaaaacattattagctatgtgaaaagtaattaaatttctatattcacttgaatttgctttgcttattggggaaaatcacacacacacgagaaatacaatattattatcacattattattgttattattatttgaataccacaataatttttaagataactaattaacagtatcaaattagttatttaaaaaattgataatgataactacttactgttctctattaatttttaaattatcgtgtaatctctaagaacacgtttttttggtcaaattttagttaaaattttaaaataaaaagctattttttatccaatcgctacttaatttagttagtatttaattattataataatattttataatttgaatttgttaaatataaattaatttgataaaataataaaaaaataatagtgtttttgattaaaataatattaaaaatattagcaaaaaagtaggggctttcacatttagggctcgttttgtacactttgttgcattgtattgtatttgtattatttaatacaataatatatttgatattgacttgtattaataagttgtgtacaattataccatctttactataaactcgaccccagacccatcccctgacttcgaacccggaccttcgaccttcgactcggattccaatctggggtccaaggtccagggcttgattcagagttcgagtcaggtctgggatttgaggctgaggtcaggggctaggttcagagttcgaggtctgagtctagagttcagagtcctagtcttggtccgactctaggaaagaagacttagtccgagttcgaagttcgaggtcctagtccgatttcaggaacaaagactaggttaaagtccaagttcgggatccaagtctgactcctagtccaaggttggatctggattcgagacgggatccaattccaagaacaaagactaaatcaagggtctgagtcccctacgccataccctaaatatcctaatactaactaatacgaatcatttgttatgtattgaataatacaattcgaattgcatttaaaaaattttatcgtaataattaatacaatacaaaattttaaccaaatataatttttctaattatttaatataatacaatcct

SEQ ID NO: 307362 - DNA, 2077 bp, Cannabis indica
taattttaatttatattattttaatttaaattatatttttaattattcatttctaaacccaaagtcttgcatatgatctgtctaaattaactgtgattgattaaacaagagatcaaatatgaaactaattgttcagatgacaccttggagtaaattaataatcctcagtgatttggcattctttcagttaacgacatgcctttttattttatttttaaaaaaaacaaaatgatgatatgaaaattgtttaaaaggatgccaaatggatgtcaatttctcttttttttttttaggaaaaaggatgtcaatttcttgaaaaaaaatcaaactaatgtagaaatgagttaacaaaacatatttcatatgttcagctaacctcctatcaatgttttaagcatttgatcataaattctaaaattacttcaagtaagatgctaagctttcaaattttcttccttgcaatataaaatgaatttattttcctataaaaagctatatcatcccaattaaataatgcatataatatatttttctttccttttttattttttatacatatttatatcataatttgttctctttctcttcccatgagctacctaaatcacaaaatccaaccctccaaaaacctaattcttgtaaccatatagccatgccatctttacatgttagtccactagtttgtgttattatttatacaaacaccaccttttcatttcccccatcaataaaagaaaagaaaagaacaaaaaacaaagacacataccaaaaaaaaacaccacataacatattaacatgacaaggttcgtatatgcccttttcatttcttgtttaaccaagattgatcaacatgcatttttacttacttgcatatatagtacttacttttcatttttatttcttttagttactttggttttatacttgactaaattaaacataatatttattataaggatgcaaagaaatgcaacaactacaactagtgttgggaccatagcaggatcaggatcaactcaaccagcatgcgcagcttgcaaacatcaaaggaaaaaatgccatgaaggctgcacattggcgccttatttcccggccgaaaggagccgagaattccaagccgtgcacaaagtttttggtgtaagtaatgtgacaaagatggtaaaaaacatagtcgaagatgaggatcgacgaaaagctgtggattctttggtatgggaagcatgttgtaggcaaaaggacccggttttggggccttatgctgagtatagaaaggtctatgatgagcttaagatatacaaaagccaagaaataaaccaaagaactactgcctcagcttacaagtccttatctggtttggtaggttggaatagtactagtagtgttagtactaataatggaaacaataatataaatggtcaaaatggtatggttagtggtatagttaatagtagtaactctttgagttataattttcatgataacggaaatgctgttgtggatcaaagcccatttagttgttactcctcctcaaattatggtcaaagtactcatgagaaaataaggcagcaggagaagaatagtactactactgttgactctgttgttccaatagtactacaacaacaccagcaacaatattccttgggtggttttaatcaacagtactatctctcaggtaatttcaactacttgatcaagaatatagagggtttgttaccttaattgattaattagattgaacctatattattattgttaatttatacctatactaatttcttaattacatatatactttagggataacattaataagtttttctaattgttttcttatatttattgtgcagggcaattcaatcaagtgaataccaagacaattgaaagcacaatatgggaaggtggatcttgagaatatattttgttttatattcttccttttttgttactttgtcttcctattgggttttgtttttgtttttatatatgacattatgttgatgaaggcaggaactataaatgttaatgttgttcttatattctcttctttctttttttttttttttttttacggttt

SEQ ID NO: 307363 - DNA, 3036 bp, Cannabis indica
ggaaacttgactttccctttctaattcatgatttcaatttttattttattagcacaaatcaaataaattttatttggcaggtttgaagtccaaattcgtgatcttggtttaattttgaaagtttcctttcttgtcctgatctactgctaccaaagcggattctgatgctggaaatgagggtattttaagaaagttttgtattgttgggaaattatttttgtggctttctctagggttgttatgttctataaatagggccaagagagtatccaaacgattatatctcttctagtctcatatttacatatctttttttgtgagaagagtgtttcttttgtagaaacctggagtgttcaactaggttttggttttcttattatgatctcatactattcatagaataggttgaagagaatcttggaaaaagtgtgggtctttgggagaagacttttccaagtctcattttgggaggaagtgagcatatatcttctggagaagatttatttaagccttactttgggaggaagtaagcacacataaatagttgcagggagttcactacttggtgtgttttagagatcagattagcaaggtggattaccaaggattgcggtaaatcactagagggagtctaaatttgtttaaatcaattgattttgtaatctttgatatattactaattgatttcattctctgggcggggccccatggacaagtagtgtttgaaagaacaccgataccgcgtacagttcttttgtctcaagttcttaaattctacactatttattaatggtttgtttctacaaaattgtgttctgcagtgatagaattacattttgttgttgcagactgttacaaagtgtttttactaaaatttagtacatttattggcatttacaaaaactcagttttccaagaagggtccaacatgttgaggaggctgaacaacctcaagttgtacagctgtggccagccaagttgaggaccctttggccgagcaacctatggaaactagggtgaggggccctcggccggtcaggttggtgagcttgaggtcgatgaagctgaatttgttacttggcctagtactactgagtggatgtataagacttgtacggtgatcctggacaatcccttgggtacttatgattaggctagatagcatttaaatgctaggggtcaactgtcaaaggttagggttgtccatgttgaggaagaggctcccaagccatgggcctcgagtacgaagatcaacaatgctggatatctactccattttccctatcatctatcaagcttgaaaaaatcaaggaaagaggactcgtgggaagagtccagtgtggtattcccactagagctcagttagcacatcgtcagccatctagctagatggcatgtccaggtcctcacgctgagcaagggacattcttgcccttgcatccatatttcaaggacatagctaacttcttcaggctatttccaactcaaattaccctaaaaggcattaaatacctttcgatgctctttattaaccctcaccttaagaggtgagttactactttcaggtgaaatccactttaaagtagggcaggtcttgatacttctactttagtcagttaggctatcaatggcttggaggtactaatgacaaagccatgtcaaaaattgggaagtactccaagagctacttcatcacttgggatgtcagatatttccatcataacatccaaagggtcccgacatacatttactcaatccccactctcaagttgagggacagagccaaccatatcctgtatctccctattgaaaggtgcaacttctgtaggttggcccgtgaagagaattttatgaagtgtggcctctaccctattggataggatattgagggcattggaatccctcttgaagatccaaatgacactcccgtgaggaagaggttagctaaaaggaaaggcttgctcccgagcacaaaaagggtgagtctaatgaggacgtctctctaacaagaattgccaaaatagtagccaggagggaacatgccctttaacaatgtttggcatagggaggaatggttgatgatgcccccgtgttgatcaggccttaagcacaggagtctgtcagtcctgtccaaccaccacctgcgtctagagacaaaggcaaggctactacttttgaggataggtcctatgattcctcctcttgggatgagaggctcccaaacagccctccaaacaatagtaacttttttacattcacttgcatttagtacttatacttgtattataaatatgttattttccttttttcaaatatggcgtccatgatgaaaaacttggtaaggggatctttaggtgtctctttttctagtcggcctcaagctaaggtggcaaggactgtcgagtcttacaatgtgaccaagtccagcttgcctcctcctccaggtcctccaccggccaaccaactcgtggttatagatcttcctccaagtagtactcctcctacttctcctcctcagagaccatcaggtatggcagcctagaagcacagtcaggcaacctactcgactaagggtaagagggagaaagaggttgcccgcaactatattggaaaatgcctaccaagggtagatgagcaagtccaagagctagatgctgacaccttggattacttgacaacaagcactctcaaagatgctacctccgtaagttgtttacttgtctaactttgtgtatgcaagactttatgaacaactttttgttgggtattattttaccaagatctagatttactaccatatatgttgtttaacatcccaaatatgaattatctaaaatagtggaatttaaacacatataacgttaagaacccatacattgactgtagtagaattaagtgtctccttccacttagatcactaacccttgttcctttcagtcgcagagtattatcaagatcagagcctgattctccttcaggtgttggattcttcatggtcttacatactataattgagtacttgacttgctattgtta

SEQ ID NO: 307364 - DNA, 1167 bp, Cannabis indica
atggctgaaaaaaatgtaaccatgatggttacaataaaaatgtaaccattggaacctcctccttatatatacatatataaataaatacaaataataaaaaatattaaataaactttatcagatttatataacaaaactatggataaaactcaataagattcaataggaaaatatataaaaattcgaaatgtcggtatcaatactcaaaatcttaaatataccaaatacgatattgaaactaaatttgacacccttagaaaatattaacacccttagaaattaaaattaaaagtaaaagttgacctttacatcataaacttcacacctaaaatatacgcacagactatatttattataataaaaaactatttataataattacgaattaaattaatataaataaagtaatactattaaaagataattgactaaaaaattattaagttatatcaaaccgtaataaataaaaataaaagattataaacatcttaaaacaaataaatattaatagacaaaataaagttgactaaaataatgcaataaatgaaaagagcccaaaattaaaatttacattaaaataaagtaatataaagatataaactcgcttagagaacctaaatcaatacaaaaaacttgcaaaaataaatattaattaagaaataaaatattgcaaaaaacctaatataaagttgtaaccataatataaatgctaataaaagtaccaaaacaaaaggataataaaacctaattttactaccaaagttaaagcaattagaagaaacaaaaaagtcaaaaaatatttaaaataaattaaaataataaaaaagacaaaaacatagttattaacgacatcaatcacgtcccatgtaatgttatcaccggtgaactcagccttgataatagaaaacgaacaacccatggctgccgaatatcgtaaagcaagcaccaagatcttaccgatcattgaaagttgcaaagaatctcaaaagctcctcccccaactctaatggaaactaaaaaaagaacctcttataccaacaaatactaccttagcaacttaaacaaaacacatgataactattaaactaataacactacaaaaaatttcacttttactcacaacaaaatttgtgaataaagataaaaaagttgtgactaattaaaaat

SEQ ID NO: 307365 - DNA, 1508 bp, Cannabis indica
attattgtatatacattttaaattacaacaagcaattaactaattatattttttacggcgctaagtatactatcgacccccctcaacttaaattctggatatgtcatactttcaagtaatattttattcttctcttatctttattcaatactacgtatataacaaaacaattatatcaaatattagaggttcactggctttctatagattagtgttgcgtaaataatcttacatgcatatttcagttattttttcttttcgaaatcgatccttcagaatgtgaaattcgaatggattcaattaagacaaggaaaaatataaaggaaaaaaggaaaaattaacctcaaagtaggaatataaacaaggattatagttaataatcttcttcttctccactttatactctattggttgataaatgaaattttttatttatgattaccaagtgaatacaaacaatttgaataatgcataattatttgatcagaattgaatctgctctgttagaaaccaaacctgatagatcataaaaatattagaaaaacgaaaactcacacacaaaattttcgtacgtgatttcaacaatctttttgattttaccagttcatatggagcacattcaaagataagattaaccagtaaagtcacaagagtacaaaagcaattgacataaacaaatttaaactcctaataatttgtcgcaaccttcttgaactctattttgttgattcaatagtgatcatgaaacaccaacaacaagaactatcttctaatcttcatgagtgattgcttcctctagacttgtggaaatcttctctagaaaatagtatgttacatttaatgaccttttcaacttgataattacataccaataaaagacaatacaataacaaagtaatagttgaacaaaactatgttttacacaacaaaggactattgaaaatgtggaaaatatattagctcatggaagatgtaaaattatgttgttggtttatgtgctatttacaaggataaggactcttcaaaatagaattgctcgatcgagttcctactttcaaattccatctgaggtgttaaggttttgaagcttactcatttatattttgctgatgacctccttctttttttgtaaaggtgactacatcgctgccactttactcttacgggatttcaagctcttctccaattcatctgggctacaagacaatgtatgagcaaatcaacagtttatggggctggtatggatccactaacttttgatagaattgtgagcatctttggtttccaaagaagttctctcccttttaagtaccttggcttgaaaatcgaatcaaaaagaatttctcctattgattatgagtgtctagttgacaaaataactagctaaatttttctgctattaattgcagaaaaatctgtatttttttcctttcttttacattcccgacggtttaaaaccatcgcctataacagtacaggcgacagttttaaacagtgtcctatactat

SEQ ID NO: 307366 - DNA, 1382 bp, Cannabis indica
atcggaacgacgccgtatcgttcagcttcgatttcaacttccgtacgtttcgcgaaccttcctttgattctgggccttgtttcggcataagcctttctagaagcatatcgaatcgtcttctcaaatttcctattctttcttttctctctgtaccttaaaactctcgcttctctatccgccgacgagaattgggccgcctgaggcccatttgagcccatgggcttattattctcacatatttcaacaccattcggcccatctggtactactcctacgtctagagaagaagacgatacctgagaaaattaaaaaaaaaacaatgaatacgaattttctttctcattttctcggtaaccgaaaagtaaaagaaaacataaaacttacactgtggcttagattgtagaggaagtgtttattagatccggagaaatcgatttcgtaacactgttcgttcgccatgggaggttgagattgagagcttttattactgtgtacgggtacaactccatcggtacctgaactgttttgttcttgagcttcaagtttcggatctagatgaccgtaatccagatctagatacggaaccatatcggggaagacgtactgacctgagttcagatctggactttccatggctttagggttaggaagaagccatgaagcagcttcagcctcttcggtactaacttcggctgtggtttgattaggttcagctgcgtcttcggggaagtaacggtcgttaaggaagttaacggcaccgccatcaccgccaccaccgccgttagattttgccgtgttgagggattcgtataggggcgtgatgggaacgcgctcgtgacgacgggcgagtgggttagcagagtgaatatcacgatcgcacgtgacgcagagtgcggcggcgtcggctttgcacgtaacgtgagccggagcttgttcgcatacttcgcaaacccagacgcgcgcgtggagagaagccagtttgttagcggcgtggacgtttgagtcacacgttacgcagagaaacgccgcgtctgctcggcagtagagtgtggctgtagccgatttgcacgagtcgcatagcttcgacgccatagctgatttcttttctctctgaagctttttttttttttttggaacactttgtttagtgtttctctctctcttttctttcttctctctctgattttgattaagtgcacgcgttttatctggtggggtcgaggagatccagggattagccaatgaaagagtaacacgtaggataggcttagccagaatcagaggcttggagcatgtttggtattgttttctgttttttgttttaaaaaattgtttttagaaatgagaacaaaaaattagtttttgaagtttttaaaacacaa

SEQ ID NO: 307367 - DNA, 2546 bp, Cannabis indica
tattattttgtcaaatattcaaatattatttgttttgaaagcaaatatttaaatattattagttaacttataatgtagtatatatatatatatatatttgtctattatagctataataatttgttattaaaataaatttcattcttaattaattaaattttattgatttttaatttccatttgatttcaaccactacttttagaattacactaaataataacattttctaaatttattaaaaattatagtaaagaaatattagaataagctaatatatcataaaccttaatatatttacaaattatattaatttaagggagtatctaattcaatgaagataaaaatctccaaatattattaattggatgtaatttattaatattgttaagttaaatatattttctaaggggtatgtatataatttaatgataaaaaactcaaaatattgtgattttatttaagttatagataaatccttggcctaattaatctaaggggattagtctaggccaaattattcttagggttggttggtgctttttgaatgtagttaatagcaatgttaaagagtatttatggtgcgtaatactcttatcatcaggtgtaatatcgctattgatataatttaatatcgggttttacttattttaatttaataaaaatatagagaactgctaaccaattataagacgttatgttatagatatgctaaatactttagttataataaagcacattttaattaaaatccgtttcaaaccaatcaactaaaaaaattgcaactgtatgaaaaaattaaaaaaaaaaatccaatatttttatatataatttggatttataaaaaatatcaaatatggtgcaaataatttaaatcatcccattattaacttcattagaaaaagaatatataaacattaaaaataaccttagccaaaaataaatttcgccaaaataacattaaaataaataaacaaaataacttaaccaaaaatgaacattttttttatatgagaaatgttaaagaacattcatggtgtctatcatttttgtgaggtgtaataccactattgatataacttaatatcagattccacttattttacttcaataaatattataaaaaatcactaactaattataaagcgacactttatcatggtgctagacagtgtaaaatgcctcatagcaataccctttctatatataattagttacaagtgttttttttttttgctaagagttctagtaaaagaaaaaaaaaatcccaagactagatattttttgcaactgcatattttactactcatcattttttttttctcatcaactaatctcattcattccctccgttataaccaatgccaacaacctatattcactatgaatttgtagatgttaatggagttcacaaacaaaacaagagaaaaagaagagtaatgaaaagcatacttggcaagctttagaccacctatatctaaccaaccttgtcttgttttggtcccatattagcctcaagctactcaaagtgtggctcatcttaatcttatataacaccccaaaaacagtcccattaaatctcttctcccaaaaaccaaaccaaactcacaccagtcactcttactctcatctcctctcttctttcattcttcactcttcaaagtctcatcaccagaacttttacaccaaaaacaaaactgggttgttttcattttagtttgtgaaggaagaaaaattctgtcttttcttgtttttttggttgagaaattatggctgggactggagtttttgcagatgtaattgagggagatgtgtacaagtactactgtgatggagagtggaaaaaatcttcttctactaaaagtgttgctattattaaccccactactagaaagacccaatacaaggttcaaggtgataagatattatcataatcactaagtttgattgtttagatttctttggtttttttaatgcatatatataatctgtatgcatatggttgtttataatagcttgtacacaagaggaagtgaacaaggttatggagatagcaaaatcagctcaaaaatcatgggcaaagactcctctttggaaacgagctgagcttcttcataaagcggctgctattctcaaggaacacaaagctccaattgcagagtgtcttgttaaggaaattgctaaaccagccaaagatgctgtcactgaggtgtgtactatgtgtgtgtgtgtgtttttaaactattactatttatttattaataatttttataatattattaaaataaaataagtacaatctaatattaaattatatcaatagcaatattatatttaatatttttctttatttagtgcaagtaatgttattctgttatagcacttcttggaagacataagaagatggacccatatgatgtgtgtatttatatatttatttgagctcggtgcagactcaaaaattttgttcagaaggagcgaaaaaaaattagtactacaaaattttttatttttagtcacaataaaattgtaattaaagtaaaaaaaa

SEQ ID NO: 307368 - DNA, 1129 bp, Cannabis indica
attaagttgttaatgtttggtattgagtttaataaaatagataaaaagaaaaattgtaaatttatattatttattattttaaccatattcttaattttattttaaatgaataatattttaataaatttctataatcacttttaaaaatatatttttgttaacttgtgtttgtctaatttagtggagaaaatttttgagtagggcccaccaatatttttctccctatttttcattttcttttatctttttttgttttaccaaacaatctaaaattttgattacatccattttttttcctctcaccttcattctctaccaaacataaggtaaagtttgaatattctttaagcttaagttttaacattaggatgaaatatgaagcatcatgtttgcacgttgaaaaaaacttttgtagtgagttatttggggctaaaccccttatactttacttactgtaacaactagcccactattttcttttttactaaacccgccaaactccatatttatttgcatatttaatttgtcgtccattaaattctattaacatcctatgtgcctctaacttactttgttgaggtaatttttttactgcaatatcacctaacattgatgatgtgtcccattaaattagaaataaaaaaatattataaattttaatcttaattattttttttttcttttctcttctcatttcccgttttttttttcatatctcatctcttcttctatctccaccaacgcaactctctgatatgaagaaggtctgggtttgaagatcttgtcgcgaatcaatatgtgcaagcacgctcttcctcgaaagatttctcaaatcccctaactttccgtcaccactaccaccaagtttttttttttttttgagatccaaatcacattaaaaaaaactaaaataataatcaaaccaaacataaaatcttcacaaaaacatcacacatttataaacattatatatacctatatacacataaaaaaaataaaaagaaaaaaaaaaactccaaaaaataatcgcaaaatctggaaaaccatgtttcatcgatgggaataagatttgaaaatggagtaaccactcagatgccttttctcgttctcctacaaccccctccaaaac

SEQ ID NO: 307369 - DNA, 2833 bp, Cannabis indica
atgacctcgatgaaatattgtttaccagcaactctcctcctcgtgttcttgtctctggtgaacctaatcccctgtttcagcaatggcgcaagaaagatcaattgcttctgtcatggcttcgctcttcaatgtctgaagccattcttggcactgtctcgaatttcacttcctctaatgcagtgtgggttgctctcgaacaaaagttgctggacaatcgaaagctagattacttcaactcaagggacaattgacaaatctttacaaaggtaatctaagcatttcagattatgtcgataaaatcaagtccatttgtgattctttagctatagccggtcatactattactgatcttgatctcattctccacttgcttaatggacttggaccggagttcgatcctgtcgtctccggtatcacctcaagaaatgatgctttgacattagaggaagtccaagcccttctaatgtctcacgagactaggcttgaaagacattcttcaatgatggatctacccaccaaaatggctgcaaatcttacattcggctccagaccaggtccatacagacatccttttcatcatggtcgaatgccttctggtgatcagcaacccaaaatgcaagccagacactacagtcgcccaccaccaagcactagacccttgtgtcaattgtgtatgaagtatggtcatactgccacaacctgtcactacaggtttgacaaaaattgggttactcccaagaatccttcatctcagccgcatgttcatctcactgaacagaactcgcctattgatcatcaaactcaaatcctccctgactttggagatgacataggatggtatgttgatacgggtgcaactaatcatgtagccttctctatggactctttggacactgcaacaccttacaatggtcaagaatccgttgctgttggagatggtaagaaattacttatctctcatattggtaaaaccactcttccttcaatccattctaatcctctcaaacttcaatctgttttgcatgtcccttctattacaaaaaatttggttagtgtttccaaactaactaaagataatgatgtttttcttgagtttcacaagtcttgttgttttgtcaaggacaaacactcgggggctgtccttctcaaaggaattctcaagaatgacttgtacctgttgggagatggtcactccaagctgtctaacagttctctgcaatgcaatcttgtcaattctattactagttcttctacctgcacttgtaatacttttgatgtttgtaaaccccttgattccaaagattcatcttgtaatgaattttccatcaataaaagtgacattttctcatctcctactgtttttagcactaatatgcatcatgatataaatatgtggcactgtaagttggggcatcctgcctcggatgtccttagcagaattttaacacagtccaacattcctcattctgtcaaaaatttaaaattctgcaactcttgtcaattgggcaaaagtcatcgacttccattctccttgtccaaaaaccgtgcatctcagccccttgagttagtgcatacggatctttggggtccctcccatattgtgtccaaagacaactacaaatactacatcatttttctagatgactatagtcggttttcttggatttctccattaacacttaagtctcaggcctttgaagtattcatcaagttcaaaagcttagtggaaaaacagtttaacttacctataaaggcagttcaggcagatgaaggaggggaatatagatcatttgaaaaatttctaagtgaccaaggtatcaagtttcaattgtcttgtcctcatactcatgagcaaaatgggagagtggaaaggaaacatcgtcatgttactgaaactggtttaactttgttagctcactctggacttgacatgtcttattggtggcatgcctttcaaagtgctgtgtatgccataaatcgaatgcccacctctgttattggaaatattagcccatttgaatgtctattcaagcaacaacctgattacagcatacaaaaaccatttggttgctcatgttttccccacttaagaccctactctcatcacaaaatggagtttcgatctcaagaatgcctctttcttggttattctcccaagcacaagggctacatatgtgagaataaagaaggtcgaatctttattgctcgaaatgtggtttttaatgaagcacactttcctgccttcctcaccaacaatacaacacaggtacaatctaatgaactttttcctactgctactttctccactcaatctgtacctactgttgctcctactaatacctgtcctattgttgatcatgagcaaaatggcactcctccaattgatgttgctcctctgaattctgtaccatcttccagcagcttctccacacagtccactccacatctgtcatctgctactgagccaaccatgcctgttcagtccacctcggctcctactgaactaatacctgctgcaccaacacgaactcatcctatgaccactcgatctcaacatggtatttacaaaccgaaggcatacttggcaactaagcatcaactccctgaatccttgttaccccgtgagcctaaatctctcaaatcggctcttgcacatccagcttggaatgctgcaatgaacaacgaagttgctgctctcaagaaaaatggtacttggactctcgtaccatatcaaagtcatatgcatcttatagataacaaatgggttcatcgaattaaattgaattcagatgggagtgtcgacagatacaaatctcgacttgtggcccgtggt

SEQ ID NO: 307370 - DNA, 2259 bp, Cannabis indica
agagggaaagtcagagagagagagcgagagagggaaagtgagagagagagggaaagtcagagagaatgagtgaaatttaattttaggggtattttaggaatctttttgaattagtggtatcaatttgtacaaaaaataaaagggttcaatttttgatataagttgtattattagggtcaattaatgaaatttccctttaacaatgagtttgtaactataaagttctggcattttctagttatttgttggcctaactattttactaacctagaaaaaagcataaacgtccaaaatgaagtgggccataaggaaacttagccgtttttgtgaccgttgagaaagtcacgccattgtgttagcatgtgcgaagcaatcaacgacaatctgtatatgacactacaacacgtacgaagaatttacttctttttttcttttttcatttttagtgaagaattttagtctctctcaatggaccacaagcatttcatcccttatcatgtccttttatttttactaatttttaggtacgtgcatcccttaaattagtataatattaaaaaaaaaatagtgaaaataataacaaaaattaattaataattaaagtagttatagatatagtttagtggtttcacattttttctcataaaaaagaagtcttaaattcaattcttcctcccctaatgtaaaaaaaaaaaaaaaaaagttcaataaattaaacattatttaaattatatattttttcaaatcttatactaccaatttataattatttttccataataataatctataatatataaaaatttactgattaagccttttattttattaaaaattaatttagaccttatatttttaaaaataaaacattatactattccatctaatttagtccaacttttttttttaatagaactaaggtataacaaacttaaagtcagaatctattacaaagaggtacaaaaaatgtagtaaatttggtcttaacaccttcaagtcatgtatatggtactattatattctattttgactaaaattgggctcagagtattattatattctattttaaaaatatatattatttaacaaaataaatagtccagtcggtaatttttaaaatgcaaaattcaaaataatatttacttaatattacattttgggcatctcgaaaatttattacattaatatattttattgataattcattatatcaatattatattttgaaaaaatatttatgcttgaagaactctgctaaatacaataaattaatctttaaatcaatttgttatctctttataatttaagttttcttgatatataatttaaaacttgtaaattagtcattaaaataattattatatgataaggaattaaactgataataataaaaatcatatcttaacaaattttatgctttttttttctatatttctattagcaaatttattttggtttaaatatataaattaaccattaaaaataaatatacaaattaaaaagtgtaaaagaaagggaatgaatactaaaaacaattattattgataaataaataatttaaaatttttaactgagaacaaatgaaggattaataaatttattaattataataataaaaaattttgaagtttcatttcatttttaatagaaaaaactctagactcaattgtacatgtggatgaaaattatatatgttaagaaaaaaattaagatggactttaattttattgaaagataccgcatataagtttatttcaaacctcttctatacaagttaaactaatagcatgtatataacatgtattaacaaagaccaaaaactctataattctattatcttatatatcatttattctcttatattctttagtaaccacgtttcaaattgtagagtcaaaatatttatatatatttattttgtatttaataaatttaatacaatgcgaaatttttaagtatacattttttttcttcttattgatgaaaatggagaatacatttaatataatgtgaaacttttaagtacataattttttgaagaagaaatagtgaataaaaatcaatctaaatttttaatttagcattgtgaaaaaaaaaattatcttgcatgtcatgtgagtaaagattgttaacgcagattttcgttaactatattaaaccctaaatcgtgatggatttgcacaaaaaaataggcagtaagggaaaaataaagaacacaaagctattttacgtggttttgcagttaaaattgtgcatagt

SEQ ID NO: 307371 - DNA, 1670 bp, Cannabis indica
caaataatgtcaaaaattcaaaaaaaaacaaaattactaattattgtttataataattaccttgccactcccctgtacttggaaactcctcgtgaaaacccactactttttctgaaaaaaaaaatgcaacaaaacaaataaattaaaattcatatgcagattaagattaatccacaatttaaatttaaaaaatgaatataaacaccttctaagagatccaatatattcttctttagattgaccctccatttccttcatctcttcttcatatgttgataactatatatatatacacattttcaaaaacacaccatattataatcaattaattaatttactccttataattttaaccccataaaaatagtaattgaaattaaactaataatagtaaattaattaggaatgaataataataattactggaaaattaagaactgtgtcttgtccccagtacttcaatgctgccaaatcatatgcatgtgctgcagcttcctcatcatcataagctcctaatcaaaaaaaaaaaaaacccaaattaattaatagaacaagaaatatatatacaaaattaattattgtagtgtaaattagaaaagtaataacttacctaaatacactgcattcattccgattcagcaattccaccaccaaataataaattaaccgaataaaaaaaaaacagaacaaattatatatacgattaaaaaaaattaagcaaatgttacttaattataataatgataataataaaaataataaccaaccttgtcttcctttcttattttgagaatcattccagcaatttttatcccacaaatgagcttcatatctacctgtccaacgatgtctgaaaaaaaaacataattaatataatttcataaacgaaaaataatcgttacaaatatttataaatatatatatatatgtatataatttcataaacaagagaaattaaccttgtgacacctctgtaaatggagctacgacgaggaggagagtctcgaggtatactttttcgagttcttttcttcaccttagatgatgatgatgatttattacctttgtttgtggttttattaatctcagccgttgatggactattcttctgggttttccggcagatcttagccattaattttaacttctttagctatataataacagagggagaaaatgaaaaaacggagtaatataagaaataataattaaaagaatttatatataaaagttatatgtttcctaagtaggaagaaaatattttaattaatgaaattaataattacttacttgagtagtactaataataatattagtagtggtactacttcctagctagccggcttaaattggactgtggtttttttctttgccgtctctccaaacggctactaatctctttgcttttgttgtaacttgttattgtgaacaaaaatggtgtatatatatgtatatttatatatgttggctttaattttttatttttatcacttctaatattaagcaacttattggcattgggtataatttattttaattaattaaaggaattatttcacaaatatacaaaaataataaaaaaattacaaaaatataattgtactaaattttaaatatttttatgattttatttatagaaaatatgattatttttttattgtacttttgtt

SEQ ID NO: 307372 - DNA, 2675 bp, Cannabis indica
aatattatatttttagagtaatataaattttagaaagattgttcacactagagatgctcttacaatttacaaaccactaatatttttatctaataacaaatgatttttgtgacaacaaattgctgaaaaggacactaaagaatgatatttgaacttggcacttctcattgttctcaaaatgtacggtgatcgctcaattatatggcaacacttggtgcatactcgagtactaatagaacttataagttttaaaaggacagaattattgttgattcaccataatctaaatactacagtcctcacggtaattctgaaaggaagtccaatttagcaatcataaaacgatgtcctttgtgattttttttctactttcatttacccactttgtacgatgatttgctttatattttaaaaataattaaaaaaaatatataataacaataaacatccaaagtaacttaatttgtttatttaacttttttaatgaatgaagagtttgtaatttttatttcttaaaacaataatctctttggatagtcgactatatacattacaacataattaagaatcgaaaatgcttatggcaataagttcgaaacttatcttacgccttactatcacaacttcaaaggaaaaagactattgtttttaatcattttcaaattagtatgaaaatttatgtgaactgactggagaggtgaaagaaaaatcaaacgggtggttggttacctactctgtagccatagtcacttatatattgaaggactgcgcatggtacccagctttttgccacttttcagtactagcaaaaaataaaaaatgaaaaagaaaggaagaaattttcaaatgttaaatttggcagacatcatgattttgaagggaaaattttcctcaactaattatgttggtgagtatcattattatcatcgtggtaatacgagggacactaaaacctacatgaaactttgtatgtgggggtattatagtttatcgatgtgaaattatattatttgctaaagatttttattaaaattataggttttgaatagtgttattatattgttcttgcaaatgttaataattttctttaataaaactaaagaaaaaaacgagaattaataatgcagaatttaaaacttgacacaacagaattgtacgtagtacactgctataaaaagaagtattttcgtcacttacaaagtgacatataaagattttgcgtcgctctctgaaactggcgtataaattgtagacgcaaatagtatattatttgcgttagttataaaatgacagaaaaagctttatgcgtcattttgaaaccgactaaaaatataaaatgttctttataatattctacatcagtttggaaatgacacgaaaagagttgtgccatttcaaaatcgacataaaaaacttatgctgtcagttcttaaatgacgcatgacctgttgcaaatacctttttttcacatggtgcgtcggttataaaatgaaacataaatgtaagtaagagaaaattacaaatttccatgcaatttttcctacctgcataaattattttatataacagtaaatacataatataagaaaaagtaagaataacgattataaaacttatataaaaattttatatttagtaatcaattctataatcaataacgataaagctataactaattaaataaaactaaaattgttaatagaaacaatcctaaaacttatattctacatatcattaaaactaactatagactaattacataatacaaaagagtttatagcaataatcataaaacttatatcccatgtatcataataaaaagtaataaccttgttaatagactaattacataatacaaaagagtttatagcaataatcataaaacttatattccatgtatcaaaataaaaagtgataaccttgttaatcaataatcaaaggattcataaattatgtccacttatcccgtactgcattgatctcctcgttactgtagagagcgtcgagtcgaggtatagaacaccgacatggatcaaaattgttatcaagtgttcactacacataataaaaaatattagtttaatcaactcactaatccatctattcttaaagacttatatacatataatggatttttaaattttttattgtacttttagatcaataaaaaaggaacaaaagagcatccatttcaagaaaaaaagaaaaaaaaaacacaagaaaggcgtatatgtctaaggaataaaacctagatcaactaattatatatacatatggtttagaattttttcttctcaacaattgtgttttgaataaaactttctcaaatattcacttcacctactataaatattctcatatatttgcaatgaaaaaaatgtaactataccatatttcatatataacatatatttcatcaataaaaatcaaaacaacaattgtaaattttgtagggcaagaattaagttttaacaactatgagttcattaaaatctctaatgtggcacatatgtatttgtgtgtattgctatttaaagtttgacccaaatatataaagtgatcattttaataattgtggatcattaggtattaaagtttcatgggctaaatgtgtagataccctaagtgatatttttaatttattgaggggctaaattagaaatacttaaaattaa

SEQ ID NO: 307373 - DNA, 1889 bp, Cannabis indica
gaccgaccgaagtcggtcttggacaagtcgaacgcctctacaccaccggccgcggcccacaccgtggggccgggctagatagaaagagtactaattataatgatgatgggcgtacagagatggtaatcactactacaactgagtatgtaagccaatggcttattgtggctactggggagaatgcggaggaatcggtgccggagatcgaaggaatagagagctttggtggcccaatcgttcacacaagctcttacaagagcggtgagatttttagcggaaaaaatgttttggtgattggatgcggcaactcggggatggaggtttgcttggatctctgtaactataatgctcgtccttcgcttgtggtgagagactcggtgagctaatttttattactactcaaacataaaaatataaaacacacacacatataaacatacatattctactatgttatcatttatatgttactccaaactaaattgaaaaaccctaattcttttttttatatataaataggttcatttcatctctataaatttgaaaatattaaatgataatatatacaaaaatggaagctatgtatatatagtggggggagtttattagctttggtttttattcagcttaaaaagttcttattagttttagctcaacaacttctctttttatttcttttgtttctttcagacgtggtgtaatttgcggctgctagataggtaaagttttaagctagagctagctaggtttattggtgcgtaatttctatgataataaaaataataataattttttttaattgagtgtaataagccaaattaggcggaagactataatagatatagctagcacagctattacataaaataattatatatagtattgaatctagctataaataatataaaaattactatagtactctgactctcgctaaataaagatgtcattcttgtgattttgctttatcgaaattcgtttgcatgcgcaaacagcccaaaatcttataccacacagtatacatgcttttttattctctgcataaaatatatattttttctaaaaaaaaattctgtaaaagaatcatatatagtcagtgttacagattctaaaacatcaaaacgtaacatgggtggcattcatatacatctagctaggccaacttcaacccccacacacactaaacaaaaaaaaaactcgagcgtggggacctgctaatcatctccactttagttttgtagattttttttattattattttaattaaagatgatgaataccggcttttaataaattatatgtttaattaattaatgggctaattgagtgcaggtgcatgtattgcctcaagagatgttaggaagctcaacttttggactatccatgtggttacttaagtggttaccagtgtggcttgtggatcgatttttacttttaatgtcacgtttgttgcttggtgacacatccaaattgggattaacaaggccagaacttggccctcttcagctcaaatccatatcaggtaaaactcctgttttggatgttggaacactcgccaagatcaaaactggagaaattaaggtattattaattaatgattataattaactctaacaaattaagcacacgaagatgtatttaattattaactttttaatttgaattaatgattctatatgtatgtaatatattaggtttgtaaggccataaagagattatcactccatgctgcggaatttatagatgggaaagtagaaacttttgatgccatcattttagcaactggctacaaaagtaacgtaatgacttggctgaaggtataaatacacgcatatatataatattatttttatacatgaatataataatatgcttgattactaagttag

SEQ ID NO: 307374 - DNA, 2101 bp, Cannabis indica
aattaaacttaaatatttatttccaactaggagttaaacttaagtatttatgccgcaaattactcttttattttaataaaaattatagaagattattaataaacccaattaaagatgcgaagctaaccactttggtcaacagaaaagtccatattacatttttggtgcaagtcactttgatgccacgagaatgctcaacaaaaaaaattccacattacatgttttataaattggaatatgatcacatattgtttccaaaattattagtgataataaagaaggatatttaacatgttgtttcttcttcttgttgtgttgcttttaactatactttttcttgttaaaaacaagatcaaagccaataatgaaaacaagccaaaacttcctcctactcctccaaaacttccaatcataggtaacttacaccaacttggttcactgacccatcaatctctatggaaactctcaaaaacttatggccatattatgggccttcagttggggaaagtaccagccatagttatctcttcagctaaagctgcagaagatgtcttgaaaatcaatgatttggcttgctgtgatagaccatctttaactggccctgcaaaacttgcttacaacaacatagacataactttctcaccttatggtgagtattggaggcagataaggaaactatgtgttctaaagctttttagtagcaagagtgttcaatcctttgatttcattagagagaaattcattctcttaatgattttctccgcgaatcatcggtttcagccactcctgttaatctcagtgtcaagatggctactcttatggcaagcaacactttcaggacagcctttgggaagagattttccgagtgtggactcgaaagcgaagtgtttgaacaaatgattcatcgagcaatggatgtggttggaacctttgcagcctctgatatgtttcctcgcatgggttggattattgataggctgactggtgttcatgccaaatttgagaggagctttcgtgaaatggatgatttctttgaaattgttattgctgagcatctaaataggacccctgaaaaagggaaggaagatcttgttgatttgttgctaagcatagagagaggtgaatatgattccacttccaccacacaaattaatttcactagagattgtactaaggcagtcatcatggtaagatacataacctttgtcattttcttaaacttcaataggtgttgagctaataagttcatgttgtttcatgttatgtgttttaggatatatttactgcaggagtggacacaggtgcaatcacagtaacttgggcaatgtcagagctagctaaaaatccaagagtaatgaagaaggtccaacatgaaatcagaagttattgtttgaagaaaaacaaattcaagatcactgaaagtgatattaaccaacttgattatctcaaaatggttgtgaaagagactctgaggttacaccctgcagcaccaattttactaagagaaagcatatctgaattcaaggttggtgagtatcaagtttctccaaaaacagtcatccaagttaatgtttgggcaataggaagggatcctaattactggaaaaactcagaagagttcatcccagaaaggtttattgatagctgtgttgatttcaaaggacaaaactttgagtacttgccatttggagcaggtcgaagaggttgtccggggatgattatgggactgactatggtggagctcacactagctaatctcttgtgctactttgactggaaattgccaattgggatgaaagagtcagatattgacatggaggagggatctggaattacagtcttcaaaaaatctcctcttaaacttgttccagttagctatgaatggccatcagaggttcaaacatagataatatagttttatatatatttgtatcagaataaatatggccacatgttttggttgtatggtcttatatttgaaaataataattatagagtttgcttgctctgcaagagctgattgtgattggtcctcagttttgtattttctttctatcataaaaattttcttacccatgcttcggcccgtgtctagaggtca

SEQ ID NO: 307375 - DNA, 572 bp, Cannabis indica
tcgccgtcacaaaagtctctaatttctataaaaatctccacattatcgtgttttgaatttgaccttaattagtcaaacataaaattaaaaatatccttattaattagttattataaatatggacaatgtatattatagtcctcaatcacaatcaccattattttgttcaaatttattaattttcctataaactaaatattacgatatgatcacgcatgtatatatatcatgtaaagataggataataatctgtatgtatatgaacatatacatttgtatataaatattcgagtttgatgtatacgtgtataaaattatagtgggttgcatgtgagatttggtaatgggatatagctagtgagacaaaagtggatatatataaaactaatataaaccaataagacctagtatagtcacacaccacatatattcgaagatttagttatagggctcaaagttcaaccatatgattagggttctttttctcattttatcttatataatatattagtcggaggcacacctgctccgcacgtgtattcaacatgactttttattttgaagggactcat

SEQ ID NO: 307376 - DNA, 1017 bp, Cannabis indica
ttttaattttaattttaatttttaagaaaatatatttttattttattttaaaataattaatttttttaaatatttatttacgtggaccaataaaattatgccaggtgtacactgtgtccacgtagacattccactatggcaattaacaactaaaaatggatgaaaatgttaaactgctaacagaacacgagtttagggagttttaccaccaaaattttagaatttggggttagttgcaaaaacctagccacttaaggaggttatgccacaaattacccttattttaatagaaacataatgttatattcttgttgcttttgttctttttttcaggttcccaagaaactaataagcaatgaaaattgtagtatcaatcaaaattttctaacaagcaatatcgattgtattacaatacaaggagttatcactaaggttagtttaaagtgaggtatatgatactatcaagttgactacactgtattaagttttgtattttgatatatttttttctaaaataaaattacaggatttctaaattcctcattatcttactatggaagaccttatataaataatatttattgtgatcatcattaggtaactatttatatacattaattagattctaatattatttcctgtttaactggaagattaatattgcttgcttatctgttagaaatgcggcagaagatgcataagttatagttgtagtagcgttaatggtttgtattagtttgacactttatttattttaagaatcatgtatcaattacatttagctaatgatattttcaatttattgtataatttttttatagttcttcaatttttggcttatgacttttaaaatattcaacatcaatgaaataatattttaatctatattatttacttttacttttattctataaaaaaagataaagaatcataacaataaattagtatataagaatgttattacaaaatatttatgtaatatcccgaaaaatataatgatatttaattagactatat

SEQ ID NO: 307377 - DNA, 1826 bp, Cannabis indica
gcctaaaacgggattacaaagcctatttagaaagcgtaaataaaaaattactaaaaaaaaatggcaactatatatacagaaatttaacataacaaaaacaacgttatttttgaaaataattgtcaaaataaggtggcccatgaaaattttcctaaaatatatgctaaaattaagtggaaggagggggtatatttagcaactcactcacaaatatatttcaataaaatataatataaagttatttttgattgatggacacaagaaaagggtaattttcaacttatccttgacaatttacaaacttaatagaggaaattaggaatttgatggtttggatggtttgatgctgttctttttccatgtttcttaactttttttaaaaattttttatataaaataacttttctgaaactagtttttatattaggatatttttataaataacaaaaatttgtagaaatacagattataatttttttaacttgaattttaactttatttttataaactaatgatagtttgtcattatttttctattgttttcactttccaactaccttaaaacaaatttcttttcttaaaaaaactacaagtacaaagataccccatttgtttatacaaataaaatacataaaaggagtattatcctttttaaatatgttttttcctatgttttgcacaattcaataccaaaacttatgcaacactccatatgaatatattgcttttagttattaggaataagaaatttatagcaattaaataatttaggtggggactgtttcactatgtgggattcttccactattaaaaagttcatttgggtaatgaaccatgttgatcataaaaatttggttcataaaatacttggttttcattttgttctatttcattaaatttgattttgatttaataataagattttgaggagtgcaaaatttaattgtatatcttcctactatgcatcactaagaccattctcaagagatgagcttaaatagctacatacatatttaaaaatacaaagaattgggtcaaaaacacatcacaacaaaagttttgtaatttttttttgacggtttagattccttcattaattattatgtgaattttcgtaaaaatatatataaataaaaaaaaattgctttaaaatgtaaaaataacaaaactcttaaaccaaatttgtgtcaaaaagagaataattatgtgtatatattaaacattattatttaagtacaaatagaagttcaaaaaaattaataataattaatgggtagacaacaagagaagagtagaatgtaattaatttttagtggtcaacaacttatactcaaaaacagcagaagaaagaaacaaaacactaagaacaactgcataggcagcagtccaaccctttccttcaccacccaaatggattccatagaaaacatttgatatggcaaaaataatcaaaatccttcctacaatgtaatgataccaattccaatattttcgaacctttgatgctttatcaggcctagccaaaatagccaccacctgtcaaaatcaaaacatattagttaaaataaaattctaaaaaaacaacatactactttaagtaactagttacttgaattgttttccacatattttttaatttttcccctaaaataactttttgtgaaagaaagaaaaatcatatttttacaaacttttaccattaaaactagggatattggcggctaaaccacctgaactttacggtttgtaacacttaaccaccaaaactgaatttttggcggctaaactacctaaactcccaattccgttttgctctgcacacctcc

SEQ ID NO: 307378 - DNA, 2917 bp, Cannabis indica
agagaacatgtgatttagaacctaaagatctgaaaagagttaggttaatttgtgtaatctttcattcacatcaagaaaaaaggatagaaattaggcattaacaattgggtaaacaaatcaacaggattctcttccctattttatcatcttgattgaatctttcgctgttaattttagtttcatgatattattgttttgtgtttaatcataaaactattggtttgccaaatagaatcataaatttagtctaggggtactcaatccaattatttgtggttcgacctcacgcgtgtgaatttactacttgattactcgcacttgcatattgtttataattttcgtaacaagtttttggtgtcgttgccggagaattgtttaaggatcgatattacataagattacattgaattctactttggttaatttttcttgctgactgctaacctgtttctttcaacattgcctttgtctatttcaggaattgaaggtgtatgcgacgccaaggacagagtgtcatattgacggtttatcctgaaattgagaagacctgtagaagaaacaaaagaaacaagaggcaagaaagagtttcagcaactgctgaaatagaagaaatcatggctgataatgccaatggcggtatcagtggaggcaacaacggtaataatggaggtgtcgttgaagatcaagaaaatggtcgtagtctgagggactacattcttccaactctgacgagggtccaatcttgtataagaccacccgccgtagatgctaacaactttgaaataaagcctgtcagtccagtttggtggactcccctctgaagaccccaatctgcacttgtctaacatgatggagttatgtcagtctttcaaagtaaatggagttagtgatgatgccatccgcttgagacttttcccattctcgttgagagagtgagccaagagttggttgatctccttgccaccgaactctattgcaacatggaccgatttggcaacaaagttcttgtctaagttctttcctccagcaaagtctgctaagctgtgaggagaaattaataatttctgttagctggacaattaatctctccacgaggcttgggagaggttccaggatctcatcaggaaatgttcacatcatggtattgaaaagttgatattggtccacaacttctacaatgggctgattggtaataccagaacaattatagatgtcacaagattgatagtttgttgaaaatttggggatttttggattgtgaatatagtggttggagtatttttggattgtgaatattgtcatttgaagattgtggactgtggtgtttgttgttggtattattatgttattttggtgagtttgaaattttgggaaatcaaggaatattaggggaggtgctgtcgaaatttctcaaaaattttgttttgtgagaaattggtgtttgtgttgattatggcacccaaaagaacaagggttaatgaagagggtggttcgtcatccaacccaccaccatcatttgataggactcggtatgtgagtgaagcggctcaacaacgctttcttaggcttaaaagtaggccgcatattgaagaccgggggattgattatcccgataccccgttgagacgtcaaccttggaagctcccttggtccaaaagtcacttttgggccgaccaacttgtgcacagatcctggccagcctataggcttctcttggcctgccagggacgtaggtacaaccctttgagagctcgcctcactcctttcggttgctgcttgacggttttgccatacctggcatagagaccatgtcttggtactagtaagactatattctacatgtactctgtctttagcttacatagacatgccacatcaggtggacaaaatttgggataacaatatatttaagctagaacctagccatctcagaattaagatctattgacctaagatcaactaagtgacattaacttcgaaagatataacagtaagtttatgatatcttttccattgtcaatatcaatccagtcagatgtatactccatacatccgatactaatatactttactaatttccttaaaaagacatatcacatatcaatgtataagtaaacattattgttgattatcatgtcagtgtaaattcagtgcactaataaatcatgagattagaactttgaaacatataatcactattactttctactgtgatgacatcactgtaaatttctactgtgatgacatcactgtaaatcatgagattataacagaaattgtatattaaaaccataaacataaaaaagacatgtaaatttaaatgacttttaattttctattgatagcaaataagattatattgaaataggttttatttaggtcataaaatcccaacaccaccttatcaggtcactggcttctctgttatagcgatctaattctgcctggtgagatcgggggatgtactcctagttatccatcaatctcagaaatccatacctatgttgtgcgaattcatcgcaagcaacaccgcgtagttcttcagtttggctatggcctctttaagtctggcaaacttgagatcttctcccaagtctacatgaggcttaccaagctggctcaccaattgctaggcctctctctctagcgtaatactggggatcaaatcaaattgtggtgcccgggggttgttcgacgttggacattccttcagtacgaggcaccaatagagggtcctcccttggcagtagaggttggccattaagaccaaccgtgtaatgaccgctctagtaatgtagattagtaaaggcaattagcactaatttttattattttattattatttgtgaattaattttaaatgtggaccccaatatttagaaatagatattagagttataatttctcaattctggag

SEQ ID NO: 307379 - DNA, 2033 bp, Cannabis indica
tttttttttaaaaaaactatatttttacccaaaaagcatagaaaagatttgtaatttcctcttataaaaatgactcttttggtaggtgtgtgtggcaataagaatatgagaaaattacactctataccctttttatattattttcttttatgtttaccctcttttttaaagtctattatttttatctctttttttaaatattgtaccaattttgcccatatcacttcaagatattctccaatgtgactctcttatgtcagaatattttgagtacaatgcatataaaaagaggtatatttcaattaaatataaaattagaagtaaatttaattaattaattagtaaaagtggtatttttcaacttagccagggtaagaacattgttccataaatgaaaaagaatgtcacattatgggctgagtttgtttggtccacaaatggggatgggcttttaggctttcttaaaagcccaatttatattgaaaaacaaggaaaaaatcctgtcactctcgtactcccaccccccgaacactctcggctatctcccgacggcgccgacagaagacagcagatcacgtccctcctccgtctctggttctctctgacgttgaataacccccgttgccgactccgaaaggtactgagcagtgagtaattgagaatcatattcatatccttgtttgacaggcatttattaagtattcgagagatatgcattttatttctctcactaaaatttgtttgtgacgttcggggatcttagttttacaatgcaaagaacattaaggtcgttgattcgacctgtcttgaggcagagacgattttccactaactctgaaagaatcgttgcgtctgtactattcgagaggttgcccgtagttgttcccaaaatcgaccccgtcgtctacgccttccaggagttctcgtaagctctctatccattccaaatttcatttttcttttgtttctctgtttggttgctcagaaaattggggaaatttacttgattttctaatactgaacttaggactctgtcttgctttgaaatgaagaaaatgattaagaaaaatgcatttaatgaagaaaaaaaacatattagatactgctaagtgatattctgagcaccaatttaggttatgcagtctggtcgccaatgattcgtgaggtatttttgaagtgggaataatgtctggaagcactaattgcaatcatttagattagattcttagtttatgcttttccctggactccttagaattcattgtatttttatttgctgttaatcagtaaccgaatacatgttttttaatagtaataatgatatgataatttttaggaaggaccccagagagttagaacaattgctgaccttgacatattcatatcgtgtctgataagaacatgaagagcgaaggattttagatttcagcttccttttatttttacaaccacaaagtagtgaagtaaatgatgattacagtctcatttatttgaccaaaagctaatctttgttgttgttgttttttttttttttttttttcttctatgtttttaatcaagaattaaggtctaattactatatacttgttctgtgtttttggaatttaccatctcttctgtcctatttcaggtttagatggcaacaacagttccgaagaagatatcctgatgagcttttagataagtctaattccaggttaagttattttcttctctataatgaatcgttgcatagttttcattttttaaaagtaaaactttgcattctcatagtataatatgtgcatcttattcatagcaacactattataaaaattctcaaacactttacgccaattgttaacacctggttatgttcagagggaaaggggactaccacattgattatgtacctgctccacgaataactgaagctgacaaaaacaatgacaaaaagtacggagtatgttttaatgttacatgcttagaattatatttattttatcttatctgttattacttaaaaagggttttctttgagctttttcattgtg

SEQ ID NO: 307380 - DNA, 1760 bp, Cannabis indica
taaaacttaggtatttatgccgcaaattacccttaccttttttactatgtactacttttcttgaccatcacttttcttgtggtgtggttgtgttaaggttttatttttttggcatagttattaaacgggtgatatataatacattagtcttgatacgacgcgaatatgatccacaaacacaaatagcaatcctggatatcccttcccatacatatgtattttgccttactaaatttctatttttgattattaaaacttcattaccttttcttttttttcccttcatattactaagaagggtgtaccactcttaatttagaaagactatacgattaaatcaatgccaaatgtgaataaatgtgatcattattcatttaaacaacacacctacatcagttttaattatatcttaaattaatcaacttataattaggctcttagcctagtaatgaaatatgaggtgtatgttaccctttttgtgattatagtttgtttgtagctatttagtacacaacctataaacaaaatgaatatatctaatctagcataccagctacaacaatgactttcaataaatggactcatctgaacaaatactagtattttaattcgtaattaagtcctcataacaaaaataaataaatcattttccaatgtataataataataataataatatgcatcagcaaagcaagtcaaattagagtgaaagtgaaatgaaacagattatatcatagtattaattgaacaaatacaaaagtattggattggatggtttggttgggctaattagccgtccttgtcctatcaatattaattataagccttcttctgacttgtgagtcacctcagaggttttatatattcctttaatgtaataatattaaatagtctgtgacttgagaactctcttaaaaggaaaacatcagtttattatactcaatgttactttggaaaaaaaaaaaaggcaaacccctatttacagacacaaaaataattgtagtattaatgcataacttgtttgattacatcttgaacttagcttgaggaaagaccaaagcttctgctttgattttctggtgaagacttcttctctttgtgcaagactattatattaggccactgtcaggggtttggaggcagagatttggaaaatttttacaaaaatgaaaaacgcaattcttccatctgtaaccacacattatgattttggtaatgacccatttgggagtattggagcatttttcattctttttagtgtttagtttatagcttcgataatgatttttttttttatatgtttcaggtaactttaattatgatctccagatgtttagtgacattaatcctcaaaacagttttgggttttgcatggatactattcccagcttagacaattacaatcacacaagacttgaagactattcctttccctttcaaccatcatctctgctaacctatcctcaacaaggttttaaccattttttttatttcttatcttttctgtctttgttaactacccttttcagaaaacttaaaattaaatctaatatatactattttgaccaacatactgttcttctatagcttttccatccaacattttgagctgtgatgtcattgataatacctctgatcatggcaagaagattttggctccacaaattgaagtggtatatgttaatctctattcctccacttagtttttctttttataacctagccatgttaaataaattaacaattaacccaagatctat

SEQ ID NO: 307381 - DNA, 1749 bp, Cannabis indica
ggtggttagtttaccttgatggcacgtttttcaacatcttgaataaaaagttgccaaatagtgagcttaacaacatggaacgacacaatggctgctctatacaaagccaaaaatggaccaaaacggtagacagaagaaaaacttttggagctatatgtccctagagcttgtccaaactcactttctaatgattctttccgcaacttcgcatactctgcagatgttccttcaccatgaacactggtaaaaccagtagaatatctgcaccacagcaatggatttctaagcttacaaaataatatactataataattcagacaataccataaattaaaataacttacgaatgctggagtaacaagttatagggaaaccgattcaatggactcccccaaataaaaatatcatttttatatctcaatgatccacatttctgcaatatggtctctatgatgctcccatggcgcaaagctaaaattcataaacaagattgaaagcattattatcttaaccaatgtatgaaattactaaagaatggttgcatttgtttccataaatttaaacatcctaaaaaatgaaatcctcaaattcccccacatacaacaaattgcagagtatgatatcacgatcatcatgatacagatcctaatttacattgacttatacttaattggtttatcctaaatacatctaactgatacaattcagaataacagtaaaaatcaaacaaaatattcacattgcccaaatatgtacaaataatttaattaaacatattcaagactcaatatagaaatcctacacaagtcgcaagcttccaatcagctatatttatataatcccaaattccaaattcggataaatcttcgtccccaaccaaaattcgatcaggcaaaaaaagtagttcaaaatgtatgaaatcaagaagagtacttgtagagggaaggcggcggcgatgacggttgagaatgggaaggggcattcctcattgtggtcggcggaaatgaaaggaaaggggattgtagaagaagagtagttagttcaggaaggcatagccatgggagagataattttgtatgagaagaaaggtgtttgttgaaatgcgtaaatgaagttttaattgtatgaagggaataataaaagagaaataatagagtgagtgagtgactagtgttgcgttgtgagtgtgcttggtggcccatcaaactgccacgacaggccacaccgattcgccttcaatatatatctctttcccactcttcgatcattttgacaagtactagaactacgtatcagttataacaaccttatatctgggtctcttttaattggattatcgataatcaccacttacaatatactttcaaaagagttgtgtgtgtttagaaaatattactcaaccaagaaaaaatgccaataaaaataagactaattaggatttttaccccttaaactttaacatgtaccaaatcatgttccttaaatttttcgggccgttaaaaagtccccttgaactattgagatggttagatttaaggacttttgtttaatttcattcaattttactatttcaatgattgtttatgtactaaaccatgctctcaaattttgatatctaccaaatcatgtccctcgaactttgacatatactaaatcatgtcccctgaactttcattcatgttatactttttttattaaaattagactaaaagtccttaaatccaacaatctcaatagttcaagagacat

SEQ ID NO: 307382 - DNA, 1196 bp, Cannabis indica
cccactctaccagcagcaggcagttggggtaaggcctcaagacattttattccacttttctctctctttttattattcttctccctatttcgatactttggcctctctaacttggcccattcagacacgtggccttgctggcgaagagggccgccaaggaagctggcatgctagtagctgaactggagctagtcaaggcaaacaaccacgacctgcgtgccaccaatgagaccctttgggctaagcttactgaggccaggttctaggttgggggtttgcagtaggagaaccaactgttggatgagggcaatgcccatcaggcccgcttcatacggagtatgaaagtcgttcatgatctgtacatggagactgtggggtggatgtttggtgaaggctcttcctcccggtcaggcggcgcacagccttgaaccttcagcaggcctccttgaattactgttgttgtttattttccctggcttcagggtttgttgtaatggtaaataggattttccccaccatttttctctagagactttttttgatagacttcttaggggctggctgtgtcatcgaaatagccgattccaatgactagtgtttcaacctttacccgttattcttgatcatctcttcatcggtccaaggatgatttcttggttttaccctggcgttcccaaagctgcaacacttcttggcccaccgctcaaactcttacttggaaaaaaattgctcgcttagggttagcccagagattgtttcctttcacgatagagaagccttcactcttttacacatcttcttcagggtttagttctttcacgaggttgagtctcaagagtaatgtctgcaactgccttagacttaggcatctttcttactttggtccttgtcaggctaacattttggcaaatttatgcaacctgatgggctaaacttatgtgaagtccacggagatgtgtaagaaggaatttgggtgtattatttcttttcaagaattttggttgaatatgcatcttatctccagatttgtgcttaagtttagcccttgaagaaagaattcaagtgcctttctcttagggagatttagttgaaaatgcttcctgattttggttgcatgtgtatgttgggtatttattttaccaggatcttagatctactcagaagtatgtttattaacatcctaaataagaactttc

SEQ ID NO: 307383 - DNA, 1189 bp, Cannabis indica
tccagcagttcctggtatgctttcattgtttaacgaactcttaaacatgggattcaagatattccttataacaggcagagatgaagaaactctcgcccacccaaccattcataatttgcacaatcaaggattttacaattatcaaaagctaatcatgaggtaattaataaccatataattaataaattaatttaatgtatagttttttccattttcataatcatcacaagtaaatattatatgagtcacacatttacttatcattaacattgactcacattacacttatataataaaatttcttcatctttttccaaaatttccgctttctttattgaaatatgtcggaataaaatatatgacgattaactttatctcatatgttgctatcagctgatggtggactttacaattaacccaaaatatgttatgtgacaacgtttattataaggtttgttggtgcgacgaagttgtcgtgtttgttatgatggtttaattgactaaaacaacctatacatgctcttcttcaatatgacgatcgactttttctttttgttcatgtcatttctaaatacaaaataagtgcgtataaacataatattttttcgcatatataggtgtctcttcgtaatttaaagccatgatcgaggatagttagtatgaaaaatttacatagaaatacaagtatgtatacgataattaatataattaatgagaaaatcaagtcccaaaatggtgccagatataagagaggaagtgcgtatagattcgcctacacgcatcgcaaacccaattaagttgttctatataaatactgctagacctgcgacctgtcctagtcaacatccatgcaaagggaatttgtattttttttaattcattttactaagtgggtttggtaggagagggcaagaggcgctgaaattttaagctgagtggaaaaaccaccaatattcttaccaaattaatattttaaagttacaaggaaaatataggaaagtgacctctcaataaccatgtcattccaacataaataaatactgaatttttgggtaaaactttttaaactaattttgttttggtttctacattttggtcatccacaaatttttaggggaattacctcatatatttttttttaacttttttttttcaaatttacggtttgggtttctaaagtggttgcaac

SEQ ID NO: 307384 - DNA, 996 bp, Cannabis indica
actaataataatgatgccaaaccaaataaaaagccaagaaacatacccgttggatatgggaagaacatggaggatctcgagcttggcttcaaacaaagtcttcaaggatagggtgaactcgccgagataattgagatggtagcagaatggatggcgaggtcgaagccaaattcgaagccgaagacaggatgaatgaggcgctcaagtcgaagtagaagccagagtgaggtattacgaatcgtcaagacttggtttttttctttctttcctttttttacagagttagttagggttaagaaaagaaggtgtaattatgtattcattaaatacctcacttttaaaggaaaaattgaagtggaaaaaggaaaaggaaaggtggaagtggagaatatgatccctaaaatcgtggatataatgatggtcaatggagaatctgatgtaattatgaccgagattgaaatgggcagattttgtggaggtgggtatgtgtcattctaggattctaagagaagacgtggccaggaggatggtgatgtggaggggcaccacgtggaggtatgtgtcattctaggcatgatggggagttgggccgaaccattaatggggatcgcgtggggattttaattcaagaattggagaggcaaaatgatgacgtggataagtgacgaaatgttcaaattcaaaatatgtagccgttggcattttaatatcatcaattataaaaagaatggttcaatattcggtacaattacggattttgttcacaggtaaaaattttgtactttttctacattaatttacttcccttctttgattcttcgtcttttacttctcttttttttttttcactattaagataaactattattataatgtatatctctctctctctctctctttcctactaattaaaaattttccaattcatttaatgtatgtttggatttaaaagtactaccaaagttactatattttttgaagtataggatattttga

SEQ ID NO: 307385 - DNA, 1841 bp, Cannabis indica
tagtaattaatagaaaaaatttaggtgatttggacatccatataaataatattttaaaatacttttccttgaatgtccataatagctactcgaattgacccatagaccaaaccaactttctaatatcctcgcgggagggaatggacaccagacgatcattcatagtattagaaatgacaggcgaaatgagattctctagctcaaggcctatgatggggtttgaggaacgaaacacattcttaaacttgtccaaaaaatagtctataatagccaaacaatataagacccaatttttgccatcctcagaaatagccctaacatagtttttctttttttcggataatagtagacacatggaagaagagagaatttttatccccatcccgatactaagtttctcgaaatttttgacaccagttatcacattctttaaatgacacctcatcgagttcaagtaaaatatcaacctctaattggacatttcaggggatgacaaaattttttggacctctagcaggatattatccaatagacacaacttcaccttgcaaaagccaaagtgagttttgttctattgggttaacattttacaagtaaaggccaatttagtaactagttgaaaatttttaacccccctcgctgtaatattccagacatcctaactaacctccttactagtgggatctcgagtcccctcatccaaaaatctaaaaggcgtatgaaagtgttctctgtcaaagataagatccaaaactataggggcatggttagacgattcgatagtgagatatttaacccccgctttctgaaacgaaaccttccactcagggatgcaaatgaatttatccaacctttccttaatcaactcaaagaaatttatcctatttgactaagtaaagaaatttcccacacttccaagatctagtcattgagtagactagaatcagcatctacaactatattccccccatatttctcagcttggcccataataagggtccaatgttcaaacaaccatgccaattcaagagccaaatcttcccaaaaggtactcatgcacttctcactgggatagcataaacgaaataccccaaccaaggcagagcattctaaacattactagccacaatcacaatagaagtagatttcacaaaatcaatatcaatcccgactctccaacacagacaaccccccactgagccaataacatccacaaaactacataaaaaaaaccccaacagcctccaaatagtgcccatacgaataacaatgagtttagtctcaattaggaataacacatcaggaaatttcaatgacaaccaagatattcaaggccttaaccgccttgacattccccaagcctcgacaattttaagagaggaatttcatgagtagagggaagaggaacaccagatcagagacccaccaatgagcacctgaaacacaacaaaactaaaagttaagaatagaagagaaactaccaaactagctcatagaactcagtttaaaacaaaagcaaagatgcctcagtggcccaaatacagacaaaatacacaagaactcaaaatagagagcaaggcaatagccatgatagtaaaaagcataaacaaacgcacaataatctcaccaaaggcaaaggagccacaaggtgtaagagaactcacatcaaacgctccaaaaatggaagaaggagacgaagcctgattagagtccaaaaattgagcaaacaccaatttcgatcacaccagcaggtgtgagtttcttcacaccagaacactcacaggttcaacaactgaacctatgtttaaggaactcgagtgcactaagactagaactgagaa

SEQ ID NO: 307386 - DNA, 2957 bp, Cannabis indica
taataaattagttatttttatgttatattataatatcctattatttaaaatacatgagtaacctccaagtttattgtattgtagaaagggtagaaactaattacaaattaagttttctttaaaattttaatataatttaatggtaactaatcagtatataattggtatcatacgtacctcaatagtttattttatttttgaaataaaaaaaaaaaaaaaaaggtcaccataaataaccaattcacatagtgaaagaaaataaaaaaaaaatgaatactgcctattctaattggttttacaataaaaaaaaaaaaaataggaacaaaaacaaggaatgataatagagctaattttttttttttaattctcttttaggcaacttgtttggtaggtgataatccttgatggattagcatttgctttattatcatatttttattttttattttttatttatttgtttttatatgagttattgaaaaattggtttatatattttttccactaacatgtgatgacccacatggccacttcttaacaaataataaggacaacagatctcaatgtcacaccttcccaaacatattcacttctctaattaaataatattacatatattaattatttttagagtaaatattttaaatatattttaaattttttgtataccaaaattatcgattcaactttttattttattaaatgataattcagattatgtatttttaaaatagtacaaaatacatctcgagtttaattttgtcaaattaaaatttaataataatttgatgtgaaagtatatattatgactaaaagtaatttttttttttttgcaaccgtttgtgctagtaactaatttcaggttggttatattaagaaaaaaattgacaaaaattaaattcaaaatctattttatactattttaaaaaacacaaaatatgaattattatttaacaaaaccgaaaatctaattataatttttataaaacacttaaccttatttttatacatatatacaacactaatatagaatttgtctaaatttaatcatgagttcatatgactctctcaataattgagggtcatgtttattttattttttttaccaaaattattgaaggttaataggttatattctattgtatgtatatatttatattgatgattttgaagtctagattttatatagtttaaaaatctttaaaaagttaggtatttgaatcacttggtagttggtagtagtactatagtagtgttggagtttattgaaaatttttatgtaaacttgttgatcatctatttgatgcaacatattctttagtatctttagattaaaaaaatatgtagaatgtattcttttacttttaaaaacatttaaaatattttaaagttaaaaaatatttaaaaatataaagtgcaaaaattttaatatagaatttatttagttacaaaaaatattaaactaaagtaaaattaaaaatttaaattatgcccatactaagcatactatgatttcagacttctctattgtctcaaatttaccaaatccactatagttgtactgatcaaattcaccatggttgctcagtacgcagggatactgaagaagggttttagtttggactgattgtaagcttaaatagttgcaatagtaataatcgaaagaagatgatgaagaagatgaaattcttctttttgtttgtttgtttgttttttttttttttaattttaaatattggattttttatgaatttattttaattatgttttagtttaaattttaaaattttaatatctttttcttgaaactataagtttgataaaaagattatacttttgtttaaattttattccgcttttattttttatgaaaaatatattaattcaacatccaaaaaaatatatactaaaaaacacactttagtgtttgcttatgatcttttttgatatttgattgctggtggcttattagatttttagttaaaatttctgttaagatttcttttttactataaagagtttgataagtctattattgttgattttgctctctcaactatatatttttatgtagtagattttgtccaattaacatattaatgaaaattttatctttctctaaaaaaatagaaaataataaaataaaattatctacacaaattactcaaaatagaaaaattctcttttgatttttcatgaataaatataaataataaaaatagaaataggtagcttcatagaatcattattggtgaaaagtagaactcatcttagtccacaactttttttttactttcatgtacggccaatagaaaaaggtacccactagccgtacctttgtcttttactattattaaaaaaaacacaaaaaataataataaagggatcacttttttatttattttttcatgtcaatgaaatttgaaagatttgagagttttagaaaaacaaaatagaagaattttgagggattcaattaaagtgaagagtgtttgtgtcaaagttttttttgttaatttggttgtttagtttttttttttttttttgtttttgatagctcaccattaaatcattattagaggttagtaataacaagttatctatacgactagtgggttattagtggttgggttaaatattttatacaataattgagtgctcaaattatgagattggatgaatcaataatgtgagagataaaatagaatataaatattttaaagttaattataatactgcaatctttctcatttgattttattttaatttttttatcaaacgatctgagaattagacgattcattatttgatttgtttttataattctatccctagtagtatttctaacataaaaaatgtgtatttttgacagaaaagatgtcctaattagattgtaacctattcttttaactcactgttattaataaaatttcataatttatttcaaaaaaaaaata

SEQ ID NO: 307387 - DNA, 2995 bp, Cannabis indica
gaattccctaaactcttctctcactgtgaagctcgatcgctccaactatctcgcctggaaatcataaattgttcccattgtgattagtcatggccttgatgatctgctgttcaccggagttgcccctcctgaaagactggtcactggagccatcaatcaagaattcatctcctggaaaagaaaagatcagctacttctcagctggcttagatcatcaatgacagaatcaattcttggatctcttgccaattatctctcgtctcacacactctagagagctttagaacaacgattttcctctcaatcgaaagctcgactactgcaaattaagtcttaactctcgatgattcagaaagggaacctatccattgcagactacttcgacaaggtcaaggttcttggtgataccttgtctatagctggtcatccgattgatgaaagtgatctcatcatgcatctgctaaatggtttaggtccagaatatgaccctgtagttgtccatgccacaagccttgctgatgatcttcgttcaaatcaatccagtctcttcttctcactcatgaaagtcggttggaaaggcattacaccattggagatcaaccatcaaagccctttgccaatctctctgtaagttcttcaagatttcctactggttcaagaaccagtaattacaatggcagaggcggtgcctcaagttccttcaatcgcagcaaccccagatccaacggtcgtggctatccctccaatcgattagtgtgtcaagtttgccacaaacttggtcacactgcctcagtttgtcactatagatttgacaaaaattttcaacccccaaccagtgaacactaggcctttcttacagaacttgaggaagatgatcctcaggcctactacaccaatactttcccagactttgctcaagatcacgaatgatatgctgatacaggagctaacaaccatgttgctactggaatggaacaccctgaaaaatgaaactctctacttgggatctgattctttagctgttggaaatggcaaacaactccaaatctctcatctaggtaactcttccttacttacaagtagatctcctttatagttaaattttgtttcaaaagttcctcaaatcacaaaaaaccttgttagtgtctggaaactcaccaaagataatagtgtatttcttgaatttcactcaacttgctgttttgtgaatgataagaaaacaaggagggtcttacttaaaggaagagtcaaaaatagtctatacctgctcactcaacccaccacaagaacacctgtccagattcagtgccaactaacaactaaggagtcaaaatgtctttctgattttgaatgtaatactgtctgtaataaagatactactgctgtagtctctaactcatgtaccaattccacaatcaataaagattccaattttcataacactgatctcccctttactgctcttactattactagttcccaggatattaacatatggcactctaagttggtttaccctggtcccaacacactttccaaaatcatgtctaaaattaattacaaaggcactttcaaacagctcaaattttgtgatgcctgcaaaataggcaaaagtcaaaagttaccatatcctgtgtccactagtagagcctctgtcccattagaattggttcacactgacttaagggggccttcacatatttcctccaaagaaggttacagatatttcattcattttctagatgacttcagtaggttcacctggatttttcctttaacattaaagtcacaggcctatcccaccttcctacaattcaaatccctagttgaaaaacaattctctcttcccattaaaaaggtacaatctgattggggaggagagtataggaggtttgcctcatttctagcatttaatggtgttcaactccagcactcatgtccccacgatcatgagcaaaatggcagggctgaacgcaagcatcgacatatcaatgaaataggcatgacactgcttgtacaagctggtttggacctgtcaaattggtggttggcctttcaacatgccacttttgtcatcaacaggcttccaacacctgttctcgacaacatatccccctattaatgcttgtttcataaacaaaatgactatgagtttctcaaggtgtttggttgcacctgttttccttatctcagaacatttcagcaacacaaaatgacaatgaaatctgagaaatgtacatttgtcgggtactcttttcaacacaagggatatatgtgtgaaacacaatcaggcaaaatgtatgtcactcgcaatgtagtgtttaatgaagaagagtttcctgccctactcaagtttgcaacatctcaggtaaactcacaacctcctcaaatatttgcttctgcaacatttactactgcacctaataatttttctccccgtgttactgaggaacaacatgctgtcaccatgactagtgagccacgacaacattccactttcagttctcagtctatgccacacaacaatcccaccaactaccagcagactaaccccacacaaaaccagaccccactcttaggctaccaaataacaaaactttatcctcccgagactcaaacttcctacctaaaaccaatcctacatctccaagccaacctctacaacctacacaaacaaccaacacacaccctatgcagactagggccaagtcaggtattcacaaacccaaagcaaatctagctacaaaatatcctttaccagaatctctcttacccaaggaaccaacctctctcaaacaagccttagctgaccctaaatggcatggtgccatgagtgatgagtttgttgtcttagttcgaaatgggacatggacacttgttccttacaaaccagggatgcatgtgttgggttttatgcccttaataaaactcatttcaataatcagatttacttattaatatagatcaaaaataacattaaatgttgcatggttca

SEQ ID NO: 307388 - DNA, 2522 bp, Cannabis indica
ctctctctctctctctcagcatcaagaaactagctagggcttgtagatttttcagctgatttcagtgaatcctagcagaatttgagtgcttcacatcaaggtataacctcttggtctctcttatcttaatgtttgaacttgtgttctaaggttagattgaggttgtttgagttgaaattcgttagattggttggttgtggtaatgttcgagcaaggtttgagtttaataactcaaactttgctctctaatggtgttttagatttttgagttaattgttgggttttgttgcttgaaatgagtctataatggtatatacatgtgttttggaaattattggaaagtttggggttttaaggttttgggagaatttcggtggttcctgcactgaactggtcgaccggttcagtgggacttataggaactggtcgaccggttggtccccaagaaatcccaccaaactggaattccagttggggaaccggtctaccagttgggaccattctgtaaaccctagttttttccctttttgtaatatttagagtattaccatgctattcatcgataggaaaatctctaattttgattttaagtccctaaaaagtgtgttagcatgtctctcatcaaatttacaaatattgtgatatagggccctgtaaagcgttgagctgctgttcgactgtagctgaccggcacacctaaactcaaaaataaggtaagattagcataaagtatttatatgtacgaatgattgcatgttatcatttttttacacttctaacactggaatactggtaagaataagtgtgttagtatagtgtaagattttaatgggtagttacggtgttaccaacacgagtacaaatgggtattgagtgcatgtggtacaacacctagtagctcttggaagtacaatatggctctaccatcactagtatggagtcggtacttcagtgcatgttgtacagaggtcatactttcgttgagaacgttcttaaccatttggtgagatttgcatttaggcccaggagggcctaggtacaagctgatattgcattatatatacataatttatgcatatcttactgagtctgtcgactcatcagttttctaccttatgtaggtaagggaaaggctaaagtggaggagcagtgagttagggtttggcaaggattgtacatatcacgacagtgcaacctagaggattttgatcttattgtcttttgagtcacccttttgatatcaccatgttgcttgtaaaaaaatgctatgttaaaatataggatatatttattttcataatagtttttaactcgggatcccgacttttgatctttttttataatttttattttaataataattaaatttcttaaaaactaaaattaattagtttttgaatacgggtgttacaaatcagccaccccttttcataaaaaagctctacaaacagagttaacttttttcaaaagaaactttggtagcaacataatctgagatatgtaagtatggagagaaataagcactgagttaatgagggttgccctccatgcaaaagatatgttcctcgaactcaaagttttgattttaagaaccattttatccaccaatatttcacaatcaaccttagcaatttgcttttaacttattaagagacccaagtatttgataggcaactctctttggtagctagaaacatcaaggattcactgcacctcattactatccataccacaacaatagatgcagactcgtatacattaggaaatagaccagaagtttgcaaaaaaagtttaagtctttgaagtaagtagtataccgatttgaaattgtggtaaaatagtaatacatcatccgcaaaactcaaatgattcaaagcaaaattaaaggaacaatcatgaaatttgaaatccttcttgggtcctcctttcttcattattcgggagaagtatttcatttccaaaatgaagataagaggtgaaagagggtcaccctgccttatgcctcttttagcctaaaaaaatcatgcattaagccattaagtattaatgtaaatcagggagtagtgatacataccataatgagtcaaattattgcttgcggatattaaagaccttttaggatttcctccatgaagctccatttaacaatatcatctgcctttctcaaatcaagtttgatctaaaattcactttagagctcttccttccataatgtcgaactatatcttgacacatcatgatgttatggacaatgtgtcgtccgtggatgaacctaccttgattttgagctataaagttaggaagaataagtcacaaacaagaacaaatcattttcattgccactttatagagcatattgcaacaacgtgacaatacaactcgcatgtccctgaaatatagttttgtcatttgacagagaactgccatcacaaaactaggcgcatatgttatagtgcaaacttctcgccaaaaaatatgagtacagtcttgtaacaccctaatctataaggacgccacgtgtg

SEQ ID NO: 307389 - DNA, 2091 bp, Cannabis indica
tttctaatattttatttttaatttttttttctttttaaatcatgtatgtattattttttgtttcttttgaaaatttattaaattttgttattttaatttatttgtcataatatttaaaatataattcatttttatttgataaatatattttttaagaatataaattagaagaaaaagttttaaaaaagttaatataattaaatatataaattttatataaaataaatattattaaatgagatgtttagaagttttcaggcctaaataaaaaatttacaaactaaacttaattattacaccaagattaatattatacctataagtatcatattttaattacaatttcatgtactaactaatatatatatatatatatatattctccgaattttttaacatctccattaaaaaaggaagaaaaaaaaagaaaaaaaaaaaacaatagtgaaatgattgagagatttatcatcaaacattacccattgggtttttcttggcctcacaaatattcaaggtgtctattctattttgcctatgcacatttatttctggtattattattgaggacaagaagatgtgacatgcatataatatataaataaataaaaatacttaataataaataaataaagaaaaaaagttaatatacggctggatatgattcgtacatactaacatctataatcaacggctgagatcaaaactattttcttctctgagattttatatggttgggagacatgttatgttttttatttttatttttttagttgaaacctgaaaaacattatcttcttccatttttttttttctctttacagcaaaatcccacctttttttcatcctgataaagctaagtcagagcaatctgatcatttatgagaaaagaaagaacataataatgggaaattttcattgatgggccatcttcattttgctaaccaaaaatggcttcgtgttgaaagagagctttaaaaagagaatcaagaatggaaaaaacagagaagtggtagctctggaatcaataaatggatggcttttgaaaccgggaatgaggattccaatgaaggaatcattaccgaaaaggcgagcatagcggaaaggacggcggaatggggattggttgtgcgatcggacggtggagagaggagttttaagagtattgggagtgttaagaattcgtttggtgatggggaaagagagaaaggaaagaactcagaatcagcaaggacatcctcggaatcgctttccacattggaaggcgcgatcccgagggtttcccaagagttaaaagatgcactcgctactcttcaacaaacttttgtagtgtctgatgctactaagcctgaatgccctattatgtatgctagtaatggatttttttccatgactggttactcttctaaggaggtcattggaagaaattggtaagtttcttactatattttataataattattaaattaaaatatgcgagctataatttttgaaatttaaattatatttagttattaaattaaaatttatgagataaaattagattacaaggatttttgtaaatttgttgcactactaattcctttataatttttctacttaataaattatatgaatttttatgtgttattttattttaatttttattacgtgtattatgtgattattgcaactactttttaaaaatttggcgccattccccaacttggagtggaaaattctatatcttgaagaaaggaaaaagtagtggatttttatattgtagatgattacatttttctatttaggaatgtacttaaaatcaatagattatactgtagattgtaaaaggtaaaggaaaatgttgggaagaaatgtgtggacaataaaaaagtgataatttttatttttatggtttaaatttgtaaaatatagtttttttgaaagagttattttactgaaaatttttagaaaaaaaagttaaaaaattaatagaaaaaaaaaaacaaacataagatgtttggttacttctttatggtaattggttaccataagagtacctagttactcttatatgattttcttataattttaaccttttttttttctaatttt

SEQ ID NO: 307390 - DNA, 747 bp, Cannabis indica
tagttttaaaaactgttttcagtttttgttttcagtttttaaaactgaaaaacagtttttaaactataaagccaaacatcctctaagttctttgatttgctttggcaactcacttcccagattaaaagatgttctctaagagatcaagaacaaaatggtaagtattgcaattttaatttatatatacatgtttgctttttaaataaataaaaggaaatttaacctttttttccattgtaattttagctttttatttttatgcattccctgaagttatggtgtctcttctcgaactcatggttaagcgcgattcctttatctccctagccttttccaaagtgggttttcttcaagtaatgacatatgtacacaatatagcacttggaacagccaaaggacttgcttacttacacaatggctgcaaccacaagatcatacagtgtgatgtgaaaccagacaacattctgttagaaactcacacttataattggaagaaatcttcttagaggttatagataatttcatgttaactttgttgttcttgttgttgtctttaagaatgctctgttttcttgttttggacttatgcctatttggtgcacatattttatgtggcttgtgacatgatggaaatgagtcccacggcttaagggaatataaatttgcataatactacataccagtacagtagcaccaactagaagtacttaatattagatgtcatttttaataataataataatagta

SEQ ID NO: 307391 - DNA, 1283 bp, Cannabis indica
caaggtctaaattcggcactggggtcggggactcgaaccagaggctggggtctggggccagcactggggctagggtttgggtccaattctgagtacggcgtcaggtccggggccaggggtcggggtcgaaggcttggggttagggttcggggttgggggtctgggtttagtccggggaatgggtctgggtccgacactgggttcgaggtccgacgctgcgtcctggctaggggtccaagtcggggtcagggtctggggtttgggtccgagtcttggtttgagtttgggttcgggtctgggtccgaatttggttccgagtcagagttcgggttggggtccgaggtccacgtcaaaatccgagtcggagtttgggtccggactcaagtttgggttttggtatgggttccaaggtataggttggggtcggagtccaaaatattaataaagataaaaagaaaactgtttaaaaaaacaattaaaagtgatttttattttatttttcaaaattttcaaaattttgattctcaattaaaatattgaaaagtgaaaacagttttatagaacatgattttagaaaatattttcatttttctaatttaaaaaataaaaaactttttaaaaagtattaccaaacacactctatgtaatttgatataaggtatgatcgacaaaatgcgattctccactctttaactaaaactcgatttatatatactttctcactatatactttattgtttcaatttttacactagtgtatcctcaaatgttattttattacaaaatatcacttaattattaagttatagagattcgtttggtacttatattacaccgtattatattatattaaattttttagcatattttttgtataatgacatgtttagtattgatttttttaaataaatgtttagtattgatttgtatatgcatataaatatataattttttttttgacataaatcaaaatataatgtaatattatgtaaatttaatataaaacacaatttaatttaatataatactatacaatacaatacagtttaatacgtcataccaaacaaatcacaagtgtctaaaatattatttgtgttagctcattttaaactgttataaatattctttattggatgcacaatgtactttttttattctcatcaatgtacttttagttatttttccaaaaaaaaaaatccctaattaaaaactatgacaataaaatttaaatataattaaaaataatttttatatatatatttataaggatatgattttgtccc

SEQ ID NO: 307392 - DNA, 852 bp, Cannabis indica
agtcctataattaatatagctattcttacaatcaatatgaacccctaattatatatatttatatacttatatataaatttcatggaagagaggacaaaaagacttgtggctcttaaatatttcaaatggaaatattgctatatatatacacaacacaagtgttacattacatatcatcatcagtagttgatgtcgtaaacggtcaaagtttcataaatacatatatatatcctaatataaatatctaaataaaaatatacttttctcttcaaaaatatcttaccataacacataaaataatttattttcctattacgtaatggtaataattaagatttttaattatatatatgttagtagtgctcatgcatgtttgaaattagatatatatatatatttatatttttatatataaatatgtgtaaaataattataacccttcattatcagaatggtcacttataaaattgtaagttatagtgttatattagtaaacacatctttaatcaagaaaaattaaaacacttaataaaatattaagaaataactctttctatttttggcttatattcttttattctaagagtacgaaaatgacccgtacgttaatatacaaaatttatttataaaaaatattttttgtggatctattaataatgagctctactacacattttttcttcataaaaaaataaattatgtatcatttttttcctagcttttataatcattatgttgactctttgtatttttcgtacttataattgttatattatttttaatataataatatgtagattaaaatgtggtaatatatattatatgggatatgattttgttccgttattgtac

SEQ ID NO: 307393 - DNA, 1606 bp, Cannabis indica
ttaaaataataatttttagaaaaaatcattaaccaatcgtaagccgctacttataaaaaatgtttgaacactggtgcacaataattataatattattttaataaatgtttactttttatattattaattaaaaataatgttaaataatactatttatttttccttaaaaaaagaaaaagaaaatcttctttcttatacattttcttttactttttctccaagcattgacaactaataaaaaagatagtgtctccaagtcatctaccatatacattcctagtacccaaaaaaaaaaaaacccctctctctcttcacaagtttgctttcttgttatgttaaaacaatttatttatgttactattcttttttttttttttaacaaaagtgctgaacctgttttagagatgagattaaagggcattattacaagatcatatatgttttatttatataatcaacttagaattgttttatgaatttttcattaaaataaaaactcaacattcttgtatatttcaatctcaattagttgtgtcaataatgttatatattttttaaacaaaattattttgccatatgggtcatatatatatcaaacattgaaattagtattacatttggagttatatgcttccattaaggaaacaaaaatgtgcacattaagcttaattaatattaattaaacacataccataacattatagatatgtataattaaatactttataatatagaaaagtagagtcattctcttttatgattagttaaatagcgtgtagtcaaacaattgcttgtttattataacaaaaacaacttcatgcactgcatgtgcatctctctttccttttctcttttcttccctataaattaatatatttatatcactattaaatctcctctcatcacaaaaatcacaatctcttcctcttcttattcccgaaaagtttccttttttggcaagtaataatcaagaaaatggtgtctataatagaaagtagtactaatttaggtgagattgcattgaaggtgggtgttttttattagtacaaggcttggtttatgtgattctttcaagttcttcaaatgtcttctccaacaagatgagatctcttagcttcaaaccggctcgatcttcgagtattaatcggattctcgccgccatctctgactttcctcttggcactgatcaaagctcattaccttctccaagaactgatccacacttgtactcatcatcatcatcatttgccaaagatgatcagttttttcataccaataatgttcttattaagtagtagtcttagttatttaatcaatgtttatttgtttattaatattttatgtgtaatgttattattattatcaaatatatcctcaatctcatattgagattgccattattgttgtttaattcgttttatataaatttatatcatgagactttcagtttagtttattcatattatttggctcccaataaaattttcatatttataatgtcttaggcatcaagattcctcaaatattggaataataaaataaagaaaatatatataattttatggatagttttttttttgaaatttttacatgaaaaattcttttt

SEQ ID NO: 307394 - DNA, 1006 bp, Cannabis indica
aaaaagtgacaaaaaaatgaataatataattttaattttggaagagtactttttgtataatatatatttatatgtgtctttatagtgtctaacactataccgatgtggcgggttacaagtgattagtaatttttcatattatttatcaaatcaaaatacttgactttatattattttacaccaatagcagcatgctactttttgtaatactggacactataaggtgtccctcagtatttgttattattttatatgcgttgtataaaactaattattttcttaaattaaattgttaaaatactacatactaaaccaaaattaagtggaaatgcactttatttggtctctccttgtttcgtcgtctagttctagcactatttttagcatttttctcttttgtatagagtagtattataagacatcagtgattttgagcaccatttagaagtaatgtcttgctattgattagtgatatttcataaaaattattgtattaaattatttatatgatactatcttattaaaaataattatactgacactcaatatttaaataagaatatatggaggattagttaacaaccaataaccatgccataaaaaatcagaaaagtgtggacacatgtctctgcagctttaattgatatcacatgttgcttgacaaaaatgacttttgataacaaatataaaacattttcaattgaaaacatgcaatgcaatgacctaaaaatttgtactataaaccgtgaaagctcactaagatgcctacaaattattgttcagtgcacttaaactttgcctctaattatgcagggaatgaggcaaatatatttttcaggactcaaaaattaaaaataaaaatttcagtggccaaacctataattaaaaaaaaaaaaacctagagataataattaaaaaaaatacttattggaggtctctctctattgtttcttcgattaaataaatatatatatgtatatatatattactgacatattataacaat

SEQ ID NO: 307395 - DNA, 750 bp, Cannabis indica
gtggtgtaagtggaaatcaagattctggttggggaaagaagagtgacaacagtgataatatgtggggcaagaaaagtagttggaatgctgaatctggtggtgtaagtggaaatcaagatactgcttggggcaagaagagtgactggaactcagaatctagtggaactaattggagctcaggaagtggttttaaggaaaaccagtcagattttggggatgatagtaagcgtagtggtggaaactggagaggagggtttggaggtagaagcggagatagaggaggctacaggggtagaggtggagacagaggaggctacaggggtagaggtggagacagaggaggctatggtggtagaggtggagacagaggaggctatggtggtagaggtggagacagaggaggctatggtggtagaggtggagatagaggagactttggtggtagaggtggagacagaggtggctttggtggtaggggtagatccgacagaggaggcttccgtggtagaggtggatcagacagaggaggaggggcctttggaggtaggggccgtggaaggagggattggcaggacggaactacttccaatgttgaagattggaatactcaagcaaccccagttacaaatgaatcaactgaagcgtggggatcgaagtcttggggtagtggtggaggcagtggtgagggaaatacttccaaaacagaagcgtggggtaagccactgccatcaaagtcttggggtagtggtg

SEQ ID NO: 307396 - DNA, 1739 bp, Cannabis indica
ctatgcccagggccaggcctgcctaaaagcatagttagggcatgattagaacaaataattatagggtgtttttatcatacgtcccacaaaaatgtatgcattgattggaactcttaattatttcagtacctatacaaaatttttagtttcaatttttttatagtcgtatacgttataattatttaagacatctagtaaaattttttaaaaaatcgaaataatttacaatatataaatcaatgttcaaactgtctatttcacacgcgtataaagtaaaaaagtgactcgtgtaacagactctttaaaccctatttttaacgtattaacttttttaaaatttttcaaaattttgtcagatattttaaataattacaacgtatacgatcataaaattttgttagactaactattttttagatatcgaaacaaataaaagtacacatattttaagaaggtgtattataaaattttctataattatatatattttgagtttaaacatatatttttctcgtttctctccaacaaacaagaatataaacaaggaagcttcccttaaaacaaataaaataaaaatacaaagagaaattctagcacaacaatgtatttatgcatattaccttaaacttttgaattatatcatattaatgctacattaataaaagatttttaaaaagtactattgaaatacaatcaaaatgacacatttataatgattactaaccttagaagaatttttttttaaaataaaaaatagataacaactacaaaatcatacagtgaaaaaaagtactatttttcttgtaattatatgtaaaattattgagaataagtttagtatgtaagattatttatttattttttcaattcaactatgaattattaataacatattatatgtgcaattacataattgaatataaaattgacaaacaatatgatattcttatagttgacatccacaaataatatttgatataaaatgactgaataattagttagatattgaataattcttgaaatctatatgctaattaattatatcttgataattttggtctatatagaagtcatccttatcattaattacaattattattgtgttgaccataatcatttttaagtcttccaaagttatataaaaagaaaaacaaaagcaatgaaaattaaaaatcaaacaagagatttgacaaattaaataaataaatgttaaaaatattaatagtgcctagcacttatcatattgttacttaatatgtatcaagtctaatatggtttattttaataaattacaaaatatcattaattattataagacgcaatttcacagtgaagatcaaaattttagtaaaaaaaagttagaccctttactagaaaaatacatataagatgtgttatgcctagagcattttagaccattttcaactttattattaaaatctcttttctctatttcattttaccttagagttttaaattacaccaaacattaactaaataaaaatacatatattttagtattaataataaaattattatcatagacaaaatgttcttttttaaaaaacataaatagtaaattattatcataaacataaacaagtttatttaagaatttttcaagtgcaactctttgaaagagatacattaagggcccgtttggtacgcaggattggactgaaaaggattggactggactggacaagattggattatgctgaaagtaatcctgtgtttgg

SEQ ID NO: 307397 - DNA, 2202 bp, Cannabis indica
gaatactgatactacgtataattctcttgtgtaatattttaattgctgcaatcattttgctgctgtaagtattctttctgtgcatgtgagcaagtatccaacttgttattgcaagtctttacagttacgatgtatttaataactattattatagaaattaactatttttttgcaaaatagcgactttcaaaactaaccgtggaaaaaatcaaggtgtgtatggtaagatgtatacagtatgatatttcaaaattaattggcaataaatgaagtagttcattcatcttataataatattaaattatcacacattatcaacgtgagatggaaattttacctgtggaaatttatccctgcacatatacccaccctatatattggagcgaggattccatgcctaaattggaaacaaggtggagatcacaaggataattccatctctagataacaaggatagatttgagtttttgaatccaaggctgattcacccatagaactgttggaaaaagtttcccaagccatgttcctattgtcaacagcaaggacaatcatcctacaccaattatcctttgaatgcaccatcagtaaaaaggattttttaattgaagggggccccaaattatacgacatctttgtatcagatttgacctctctcgcaagcatctccatctaaataaactcaagtatttccttgtaatttcttcttgcagactcttcacatctcttttctttccaccaaaaagaattacatttctatagttccaaatagtatcacaaaccgaagcgaaacaaaccagaacctgcaatatagcctctccccatgaatgtttttgcacaaaaatagcaaaacctcaatcatgttttggccagtaaacttatcgatcctagaaaggatcagggagcaaaaccagagcagcctagccatgtggcagttgacaaacgagtgtaataaattttccacttcaagatcacaaacaatacagtttttgttaccatcacaactaactttatcccgtgttgaaagtgccccattacacaccctccacaacaagctttgtcttaggtgcaaatggttagaccaaattaatttccagcaagggttagcaagatcaaaccgctcaccttgatcaagccaataagcaaccttaatcaaaaactggtcattagaggaatttttccaaactaacttatcatttcccaagagccaaaaaatatcaatattaagaatcttctcaccaatttattccccaaacaaatatagcacatactttctattccaaacatggtgggtactgtctaacaaatcaaaaaaggtcatgagcttggaagcctttaatctcaccttctccataacagcttgaaaattatcatacctcagccaaggcatccaaggtcaccaccaaatgtttacatctctcccatttgcgataatagtacaggccccttccagaatgattttcctagcctgtagaatccctttccaaatagcaaaattcgaggctctaggccttacaaaccagaaagactcccaagaggaaaacttggcccgaaaagccatagcccaaggtttctcaacattgccagctatatcccaagccaatttagccatcaaagctctgttaatatcctcaaacttcctgaattccaaaccaccccgttgtttaggttgacacaaagagtcccaaatcttagtagccaaaaaatgagcttctccacaccacctatccactagaacctacgaatcaaggcatccatttgtctacatagggtgactggaagcatgaaagtggacatgggtaaataggcaaagcaagagccattgaattgatggcgcgcgacttgtctccccgaataagacaagcttctcattctccaaccttctagtcttgccttcaacctctctttaaggaaggagaaatcatttctacgatttttcgacaaaataaggggacttcccagataaaaatccatcgcatctgtcaatttaatctgaaacaactcctcaattcttttttcctgccactagaacaattcctcgagaatagaagtcccgatttatttttactacacagttgcatagaccacaactcatacttttaatgcactccacactacaagaaatatcacttttaccagcacagttcgctactgcactggtaaaagtaacttttaccagcgcatggcaaagaggtcaaagtttta

SEQ ID NO: 307398 - DNA, 1823 bp, Cannabis indica
attattttttttataatatttttaataattaatattacgtgggccactaaaaatttgacatgtgtacatggtacatgtggtcagtacactgtggtacttaactgtgattttagacggaggagtacaaaacaaaacggaatgggagtttaggtagtttgacccctaaaaaattaaattttgtggttaagtgttaaaaaatataaagtttgggtgattttaccgccgatatcctaaaaaaaaattatacagaccaaataccgaaattatcctttaaaaattacaaatatttatactaataagatactatactaattttaataaataactttctctccattttcctacctttactcctaataccaaacaatacaaggaagagttattatccatataagctaggtaatatagtcgtctttcatgcggtaattttaaatatttattttcgtgagttacttttgatattttattttttttttaattatttattaattatattttatattttttaagttattaattagtgaataaaatatttttaaaatctaaaatgataaaatagaaatctaaatttaaaattttaaaatatttattatgaaatcacttagataattttagttgatatttattatgaaattaaatttatacatcataaatatttttaatatatttcttaaatctagttaattgggataattttttgttttctttatgtatttataaaaacaaacacatcaaataaatcaaaacaaactatttatttagttgattgatacaataaaaataaacaaaaatatgattttaaaatttgtgtaaatatttaaattataaatgtttctaactaacaaaaaaaaaataaataataaagaaccacgattcttggatgtgatttatcaaaaatatgttgaactctacaaactacaaaatttgatgtcatatgaataaagaagttacaatacatttaaggcaaaaattatattttagctatgtaaattgaaacacaaaaagaagtttaagtcattgtcattaccgtagtatacttgtaaccgctacaatactcaaaattattattataatcgtatctcacttataaatcgttcaaatttattattattgtatctcacttgtaatcgacgctacatttaaaactattattatcaccagtattgaagactgaccaagtattattattaaaatcaatataagaaaaaaaaaatctatttcaactaaccatatataaaaatattataataaataagattttttaccccaaactataattagtgtacttctatcttctatcaaataaaaaaaaatacataaaactcatattaaaattgtttattaaaacatttatattattaatcttgacaaagaaaaaacatataaatgatattgatatatgaatatttcccgtcaaaaatatgtgtgtataaacaaagaaaaattgttagtaatttttttatgaggtactgtaatggattttgtaaacataccaacaaacttagaataaaatatttagaaattgagagatgtatggtattaaacttaagtaacaatagttcttattggctaaaaaaatataattgtataatagataaatatagttacttactatcaaaattacaaaagtgttttcttcatcatatttttttgtagtcccattcaagatgtaaagtccttttttggcaagttagttgacaaaataattttttcatttatggtaagattgctttgcattcatattcgatttcttaccatataaattcggattgtagttgccattttccttgattggaaagttgcactttcagctgaactttcct

SEQ ID NO: 307399 - DNA, 964 bp, Cannabis indica
agagagagagagagttattgagagagtttgtgttttaacaatatagtggtttaagtctaatcaattaaaacaagaaagtagataattttgattttgaactgaccaggaagaaacaagcctgcataaaccatgacagagagaacccaaacaaccgaatgggcctggaggcccaccattgaatcccggaggaggcatctctctaggctctacttccaagttccaccacgaatcacaatcactattcactactctttcttcttctcaaaccaattcaccatcactaatttattttgttcaaacaatagaatatagctaataaaactgcaatttcactatatatacattatacatatatacatataaatattttgtaacgagtcgactaagttacgagcaagaagcttttgttttgtcacctacctttccatttcgataatctaatattcaaaatcctacctaaccttcttaattcaaactatctacacgttagtatacagtgtcaactacccttattcttatgagttttcattaattgtttaaacctcttgctaaacccacaaatttaaaattccgataaagaaaaaattgttaaactaccaagttacactatccaagttcagagacatttatattgctccatctaaatatattttactatttaattgaatttttttaaaataaaaataaataattaagtatcttgaataaaattaatttaattattaattctaatttaagttctaagaaaaatctattaatttaagttgatcttaaattaattaacaaattaattttcaatttatatatatttttttacttaattaaatattaaaaaaatataaattagtactgaaaatcactatctagaatattttcttcaaatgtatttttctaaattaattttaaaataaaccaatgaaaaattaattttatttattttaaaattaattatgttactaattaa

SEQ ID NO: 307400 - DNA, 1206 bp, Cannabis indica
tccaaattatgagatgtcattaatgcatgtcaataacacgacaaagtaagaaaatttaaaataattaatatatggaactcttcaaagtcgaagaatgtgacttttcacaccttttctttttataaatattaattcagaattaattgaaacttattatatcaattattagttaaataattaagctagataaaacctttaatctatttcctatataaacacctttctctacccccaaaactcactcaaaaatatttatatatataatcacatcgaaagagatagaaaaggaaaaaagtaggaagaaattaatggctgatgaatgtccatgtcctgcaggtaactaattaaccctaatttatttctatgtttttttttaaaaaaaatcatgtattaattaataaacatgaagttatgatcaattaacttaaatattatataaaaaaaaaatatggcataaaactgcaggattggtcagagtttatagctttgcaaaatttccaacaatcctatataactggagaaattaagttttcgagagattgctttttcgaaatgtagataattagtattgctttttacttacatcatgtactacatatgttaggtaagagttcatggccggagcttgtggggaagaatggagatgaagccgcgaaaacgataggaaaagagaatgggaatgtgatggcctttgtaattcttgaaggaactattgtcactaaagagtttagttgtgagagggttagggtttgggttaatcactctggaattgttattcaagtcccaaaaattggctaattaataaattattaataaatattattaagtgtttacctctcatcatcattttattacattaataaattttggacttgaactgttatttaagttgatcatgtaattattacattaataaaaaaaaatatgcaataagttcttcgtgttaattataatatcattaagatggttttctcgtggtaaagttttcaagagcaggagcattatgtgttgtgtacagaatatgattaaataggaataaaatcttatagaatgctaagtgttttacaataaattctgtaaagaaagtgaaattatgatgtaaagaatattaataaatttaatattatcattgcaattgtgcttagggtaaatactattttggaccctctgttttacaaaagttaccaattggaccctgtgttttgt

SEQ ID NO: 307401 - DNA, 3342 bp, Cannabis indica
aataacgggataaaatcatatccatatagtattgagaatatgtatgcactttaaaaagtttaatgtcaataagttttattttgactaattttagttagttaaataaattcatctactgcaactattttaatagtttgtgcacctacacgagtaagctgttcaaaaatgaaaataaataataaattgaaaaattgcaataaaaatgacaaattttaaatagttatcatattttaaagaagatcttatgacaaaaaaaaattgatgagagcaaaagtttcaatagttatcatatatatatcttaatagtgttgccataaaaaaattgaaagtaagaaatagatgtatgtgatataatgtgaaaatacaaaaaaaaaaagaaagaaggtgatgaattttttttaaatatgtaattatatatttatgaataagttattaaatttattagaaattaaagattagtgatagtaatttttttagattagtttgaaatattttagttatttcttttcttcatttcaatagttgatttgatgaataaattgttatattatatatgtttaatttaataaataaaaaaaataaaagatataattatttgaataaaaattatttttttaagagttgactaggccaacccgccaatccggtcaacccggccaaccgaaacctgccaacccgtgacccgccaacccgccaaaccgtgccttattcaggtccgggttctgttttatttttgaacccgaaaccgtgaatctaaaacccgcgaacctgaaactcggtaaacccgcccgatgttcaacctttgtaccaccgtgttgtgtcatgtcaaaacttatatttttttatgtcgtatcgtgtttaaatacttttttttttatgtcaaatcgtacttgccctagtttcatatggtttcaataaattcagttaatatttacaacactaattagggccacatttaagcagatttagtgaaattttgatatgaatatgataaagatgggggccattcttttgtcctctattttgccattttctgtttttctctacagcctatctcagtctctctacgtctgtgattttgtgtgtcatgcgggtatagcattgcacttttaaatgggctgggcttaggcccatttttttacagctttctctctataatagctgggctgggttgcttctttctcttgtttttgtttttaaaatgatcttaaatttgaaatagataattagataaatgtattatttgatgtgcttttgattgagactttggaatatataattttatcaactagatcatatatatgtatgaatttcttaaaaaaagttttgcatgatttttgtgtttttttttcaaaagaatttttacataattatgaaattgaggttatcaaaaggtgagaaatgtaaaacacgttaaataattaagtttttttttctttttttatatataataacacttttgatcgtacagtaataaatttttagaaatacaattcgaaaaggtttcattgttaaagtttaatatggcgtcgtatttgaaagtttctctcttgggattggagactccgtatatgaggtattaatctccatctctactgtatttttgagtatactgtcactacaaaatttaattatattcacaacaaaatttatgactaaaaataaaaaaattgtaattaattataaaacatcattcttatgttgtggctaaaaggttcgtggttaaaggtattagtcacaaaaattacaatttgtaaatgtgattaaatgtttttttagttacaatacttattttgattaaaactaaattagtgacaacttgtaactaaaaactatattttagttacaagtaatattttgttgtgactaaaagtcacatttagtcacaaaaattctttgttgtgactaaaagattgtcactaaaagtagctatattttttatagtatgtatacctatatagtagattttgattgagatttttggtatattttttgaattttgtaattaaaaaataatgaatctaataacttgattattgttgaaatttctcattaagaaattgtgtactgggattttgaaaaatgtaccaaaatattagcatggataagattagaaggatcatgtgtttctgggtgctcttgtttaatatatatagtaatttaaaagcaagcaacacatatatatatatagtacatcgattgatcgatcacataaacgtacgtataaacaaaggccaacatgcatgcaatggctcttattcacacacacatatgataatattattatacatgcacgcatatttatatgtatattatacatattataaattaggttttgcatatatataagctaataataacaataaaacaaagttcttcaaattgggattgaaacattataatctcaactatagtgaatgtgatgatcaaacgtacggtgactttcaccactggcggaggaactgctgccactttgaccaaaagcttcgttcttatcatcatcatcatcatcattattcttcatcaaaagtcggcgccctaagatgccggcggcggccacggtggtgctgccacctttcgaaatagtcactttcatcttattattattgactgctttggcttgatcaaggctacatgccaccatcaagaaaagtgctatggagattacaagtaaagtcctcattaattagttatacacctgaaaattaatacattattaataattaggcgtacataattaattgtaaagaataaattctataaatacgtgtacataagtaatatatatcatcatacctcttttttttttcacttggagaaatgtaatgagggataataatattggatttttggaagctgagattatatagaaattcatatgagtgaactaaagggtaatttagaagaaaataactataccatgtgtggtgtggcacaaggtcacttaaaatgtaattatgattaattaaggatataagtgtattaatgatgaatcatatcccattatgtacatatatttcaaccacttgtgtttgcacaaacacaagtgggtaatatacccttatgattttgcagtactcttttttggtgcttgagtttaattaaggtcacatgtgttttggttttcattttgggtttaatcttttgtatatatttggtttgtttgtgttaattagcgaaagaaagaacgaagaagtatcagtctcagctcgatcggttattactgattgttattcaagatgaactccttttattagtttattaccattaaggaatcagatatagtgaaatttggagttcaatacaaagtaggggtgttcatccgatccaatccgcactttt

SEQ ID NO: 307402 - DNA, 2968 bp, Cannabis indica
attaatttaaaaataaaaaaaaaataataatttttttgaaaaaaaaaaaactatttaaaagatatttattttttaactgtcaaatttcattcaactatactaaactcagctagttttctaaaaaaaaattcggtaaaacaataataattcgatcctttaccataaatgatgtagtatgttctcaaagataaagagtacttttttctttccgtacgaggtagtggtggtggcgttcctgtcctttgctaggggtggtgcacgtcctactgatgggtacgtgtaggcaaaattgtccttcggtacgggagggacactgtgtcccttgtccaaaaaggttaacctttttgaatcatattagggttttgggctcttctatgccttctttattcttacccaaagttgaatatactctgctttcaatctactgtccccaacttcatgtgcctggttttgcatgggttctttgctcaaattctactgttaaaagctcatcctcatgctagtttactcatctcattatgagtttgttttgctggaactgaatcaaggaagagatctggaagatgttatgaacttggtggagaatgtggctgttgaagatttttctcttgaccttgttcctaatgacatcagtgctaagggaactattcgcagaactctcgcgggtaagtttttctctaaaagaaaggtttttaatgggaagcttcggtccattttgacacaaatgtggaatgttcatcctgggtggcgattgtaagaaatacaaaacaatatttatatttttcgtttttcttctgagacggatgctctgaaagtcatgagtagaggcccctggggcccttgtgggggtttcttgttggtgacttcgatgccggataatggcaaatggcaatcgactgatctccagagtgtttatttgtgggttcgtttactcggagtcccatatagatacattacagatgaaaatgtgggaaagattgctaatagagttgggacccttatctcagaagataagactagagtgcttgttttctgtttgttttaggtttaaatggtaacattcataatgtgaattgaaaataagaaaaaatatgttaaatgagatgaatatgatgaattatcatagaatttggagtcttagaatataattggtgaaaaattctaaattttggatgctcaacatgtttcgtccgtgatcgaaaattaagtctgaagcttcaatcaaattttgaactatgatacatttactttaagaaaaagtattgtgaatagaaggaaattgacaaagagagagtaaaagaacgagagggaaagagaatagaaagatggtttatttttggatttttttgaaatgaaaggactaatttgagagtatactaaaaattggcacacaaaatctatacacattaattttaatttaggtgttaaattttaatctaataaatgtatatttaatcaaattgatgcctaataataatataaccatcaatactaattttaaagtatccattaaataataacaaatttataacacaaagcaaaatgcaattccttttactaaaagattgggcatccactaccctcaatccacacaccctttgcagtagggcaggtagcaaggttacaatgctcagtgtctatatccggggaagaaccccaccaatggagtgccttattttcaacaccaagtgagaagtaaagcaagaccgccatgaaagcaaccccaccgtccaaagccgcagagaggacgtagttatacctttgccaccacttcttcctatacctaaaaacaaagaagttgaacacagttcccaccacaatccacgaagtgtagttcagcggcgtggcgggtggcataatcgcggtggcgccgagcagtacgggcaggttaatgtaaggaatccacttctgtttggggaagagcttgtggaagaaccaaaccaagaatggccccaaaattccccctaagaagaaccaattcagagatgggtactctccctgtgacccaaagattcgtttcggtcccaccaatccccaaatcactgaggcatcgaagaacacgttgtcgttagggcaagtccatgtgttattctcgtcttggcatatgttgtctacggtgttgagaagtagccatgccacgctcatatttacagttcccgctaacattgtgcctatgaactgtatagaacttataatgttaattttaattattgaaaattgcattattagtagtaataatatgtttatatatacctgaactaggaacatggacctgggaggaatcttcatgtaatggcctaatttgaagtcactaaggaaagagattgcctgagacatgctcatatatccatatgtcttgaagctgacattggctataggtcttcctggataaattactcccattatgtactcggtgatgatattaagtcctggagtctgtaaaaatagttccacatcttttgtgtgtcactgttgtttaatttctttataatgttttgtatatatataacagttaagtgtttgaatcctattttatatgtaataaattatttagaattttttaagaaatgtgtaagaatttggctaataaggtatatagttatgaattgaaatgagtacctgattggtggtagctgtaataacactaacgggaagagtgaaagagaaggcaagaaaagctgcaaatagaagtccccaataaggcaactgaatttgctttttgagaaatatgcaaagtgcaagagacactgtaattgtaaccgccagaagcaaataaaaccaccacgaaggtatgtctttgtagtttttcattaatcttgtgtgaatatcatcctttcctttcaccgaagctctaaaccgatcgtaaatctccctattatatatttttgtatatttttacataatgtcacttcattttttttgttggtatatatataaatatatataaaaatagaccttagttttagat

SEQ ID NO: 307403 - DNA, 1076 bp, Cannabis indica
ataaaagtaggtatatctaaaaaaatatgaaaatggaggtaaaaattaaaataagtaaaataaattaggtatacaatgtaattccatattattaactaattgtaaagtgctacccagatccggtcttgagaataggcgagctaagccaagtccacctagcccatgaacccaaaatatttgtctcattttaaaattacacatttttttttattatttttaaaatatcatatttttctctaaaaaatacctaaaaatattattttttatgactcattaaattttaagattagccctaataccactcatagaagatattgagcaccaataataccgaacatcaacactctttcagtgataataagattcatttcgattttcgtattttcgatttttttttttttttatttgtcatattgcctactaggttacatataagagatataacttcatccaaaatctagctaatatataaatatgtatataaatcacagtacatattaaataataattttgttttgagttttttaatggttcaataattccttcgttagtttccaagttctttcctgaaatcccaatttcccaagtttaaaaagtataattaaataaagctataaataaatttatagcattgtttggtattatataagatcatcatcatcattgtaatatatgctatagttccaaaaaattacattaattaaaattttatatattttaatttttttaagaattttatatattttaatgttgcataataactaataatactacctaataacaaatgttcaataatataataagattaaacttgtaatatgtatacactttcaaatatatattttgtcctctattttcatttaattattttttaccataatgtttttaataaaagagagaagatctacttggttataatttatttattaaaagaagagaaatgatatatgtgtatgataaataggtgaaggttttttatatgctaaaatgataatactattttcactcaatcatattataataaaataagatttatataatattaaataaacatattgctattattgtatatatca

SEQ ID NO: 307404 - DNA, 1777 bp, Cannabis indica
gttttatgtttttgtgaaataatcccttttatttaattcttagctagtttttttttttttttttacgtttgtagcccttttacattagctattgttatgagtgctataaggtagctttactaccctttcaaaaaaaaaaaggtattttcataatgttgacgtagttttttttgtcaactgatctaagaatatcgtaaaaataagaggactggactggatatatattggttaaaataaaaccacaaaagtacacagacgacactaagatttatagtatttcatcccatatcgcgatagtaatagcactacgtctactttatattttattatttagatccaaacacaccagagttatgttttcaagagtacttagacaaaattataagaaagacttatgggtgaaatctatacaaaagtttatcaatttatgactcttgggagcccaacaattcacaaagcttagtgatggtaatggtgagaccaatatttttaggaacaatggtgaaaagaaagggaaaaatagataatggtctctaatcttctaggaagttgtgtctcaaatggttgagaatgactttgcttcaaagagagtagtcacttgaaggaattcaaggtgaaagtgtttgtgtagccaaaaatgtttctctttacctaggtctataactatgtatatataggtctagggttaggttgtgattccccacaattcagggaatcttgccaaaaatgtcacattccattacaagtaaatgaatatgcgagatgtgatcatagaaaatggtcacagctcgtatggaagtcttcttgggtgagcctttccacaacaaaagtggcataacccataaaaatacttccttgtggcccacacatggtggaacacacaaattctcgagtaaagtcagccaacctatcttgtgaccctactttgagattaaaaactttaaaattgtgatatgaccatgagacaagcttagatcgtctcgtaaatagctttccaacgcaagttgaaccaagtgtcatttggataagaattgagcgagttaggcccattctactgaagggttgtaagagacttttagctccaatatgagctttgtcatctggatgcaagttgtgccatctttttggccaaaaagatggcacaggttgcccgtacgtgtcctcaaacacctcagggtgtgttttgacttattgtttgatggtgattcatattttcttagtttcggggtcccaaaaccctagctcgatgtttaaaaccctaattggagacctgtgccatcttttggtgccaaaagatggcacatgttgcctatcactattgggggacccttggtggtctttcttgattagtttatgcatctttatgttagaaaaacaccttagaaaaatttactcttggccaattaatggggggcgacatgtgccaacttttgggtcacagagatgtatttttacactcttccagaatagttccctcacctccagagtaatcaccatctcaaacattaagttctgagttgatatagatttaaggattctaaatacacccccatctaagatatagatcacttttatagattctttcttgattgtctcacaatgtctccttgttggattacatctttgatgcctttcactcaatagtaggagtctgatttaatgcatacacaagtgtgcatttaacctcttactattggtgcttagggagatcttgttgtgacattttatcttcatctgaaataataaattccttctagactaagtcatcaacatatca

SEQ ID NO: 307405 - DNA, 1279 bp, Cannabis indica
tatttttttttcaatttttttgtcaaacaatttaagaattaggcggctgattatatatttgactcatttttctaattctaatctcaatcgtatcatcaataagggagatacgctaattaaattgtgtgctattattttagctaattaatatcaataaaattacctcatttattaaaaaaaaaaaacatattggaggagatatataatgttaatttttgaaaggagataaaagaaatacaattttaaaaaataataacaataatggtaagaattccgacatagttatgagttgtgttgtgatggggtgataattaaattttgtagagttccaaaaaacatgtgaattattttgtacgtagtacttgtttctataataattctaaaatatgtaataaataccattcattcattcaattgaaaaagaaaaaaaaaatgaaaacaaagatcgagaaattatataatcttattctattctcatataaagaaacttgttcaaaaacaaacaacactaagaaagtccacatctcattcattcaaaaccatgtggtcattactaaatgttcaaaacaaaaatatgtactaaatactatcatcttaatcatatgattgattgatattaattaagcatggtgttttaatagttcttcaatatatatagttaagattggtatttaagagaattttttaattttaaatattttataatattaaaaataaaatttaaatattttatcgaacgcaatgtataattattttttttattatttatgttcagcgttatatatcatgtgtataagaaggatagtgtatatcatgtgtataaaaatgggagtgtatacaaaaagcaagttttataaataatggaagtgtttggctaatttttttaaaataattttttgaaaacttaattaaaaaaataaaaatattattttctatttttaaaaataattttttttaatatttttgtctaaaacatatatcttttttattcattttttctctcatactcaagtttaggtcggggttcgagtctgggatcgaggtctggatccagcgccaagtctaaatccagggtccaagtctgggttcccgtcgaatctaagttcggggtctgagtttgggatcttaggccagattcgaatttaggatcctgggtttgtggtgtactgtggaatattgaaatttttttaagtaaaaaagatatgaaaacagtttttagccaaacactattaaaatttaaaaacaactaaaaattattttctattctcaattttgaaaa

SEQ ID NO: 307406 - DNA, 1285 bp, Cannabis indica
aaagaggagtctggtctcgagtttctaggtgagagaaatttcactataacattttccatatataaaatacttgtttgtagctctaaaatcttacaactcatttcacacgttaacgaatacttactcagcacgaatacttgacaagaccatgtatttttggcaatactaaagataaattagatgatatgttacctgtttactttaaccttagggcctaacttgtcctttattttgaagtgttccacacctttgataagtgaggctcgcaggtttataatttcccctagctacactttaaatctacataacttctctgccaaagcattccacacctttgataagtgaggctcgtaggattataatcttctacttacgctttgcatccataaaacctttttgttgtaatagaattttaataatctgaaccaattctgattgaagatattagggctttataacttaagtcaccagccagattcaacacgtactttcttagcatctcaacatgattacgttacatgcctacccttctcaagagttctaatagcctcaaaactgagggcttacttacccttctttccaaagtgcttcgcctctgcattggggaaccttataggaaaacatggttacctacctataattctatgctcttgcagtttttaagatacctttagtcctctgacttaatcttggacctaaatatttcttttatcagatttattttagtgaattagaaattaactattctgattatacaacatatcttagggaatcatccctaatataccttggtaactattgtagtaagtggattctgttgataataattacttaatccatgaactatcaactcctaacatattctctaatatctaaattttcctttcgaactggtcatatgtttgagggtagaaaattctattgaatttcaacttcatacccatggctcgctgtaaactctcccaaaacttatatccttatccgacataataaacgtggggaattcataaagataaacgattataactcctcatgttaacttactatatacaatattttcatttatagaaaatattccaattagtaaatgacccataattactctgatcaagccataccaacttatagtcctaggtacatcctttaagttagggctgtacatcggtcggtttgggcggtttatcctatatattttctaacccaatctaaagttcgggttgctaaaatttaagtgcaacccgtccaatttttaaaaaaaaaaaatctataaaccgaccaacggttt

SEQ ID NO: 307407 - DNA, 2360 bp, Cannabis indica
aatgtttaaacactatttcacacgtgtatgaaataaaagagtcacgtgtgacatagactatttgaaccttgtttttcggcatgttaaatttttttcgaatttctcaaaattttacaggacgtcttaaatagctacaacatacacggtcatgaaaagaattgggctatttttttttttagatgtgaaaataaataggagtgcatcgctaaaccactttagggggtgcactataaaattttccaaaagtataaatagatgataaaaaaataacgcaaattttatggcgcactcttttttagtgcactccctatcaatttcagcatctaagagaatttttttaatccaatttttttatggtcatgtatgttgtagttatttaagatattctgctaaactttaaaaaatttgatagggttaaaattattgttgtacatgtgacttttcttttatatgcatgtgaaatataatatttgaacattgttttttattttataaattattttaaatttcttaaatttaaaaaaatattttaaataatatgcacaatcataaaaaataattggattaaattttttttcctatactaaataatatagaatgcattggtgcacccttttttttttagagtgcatcgtaaaagtacttttattataaaatgaaatatgtaattattaaagtttaatactcatgttaaaaaatcttcaaagtaaaatatataattgttctttttcaaatatatatatatatatataattgttaagcaaagaaaatatggaagtactttttttttcttattataaatattcgcgattatatttaattttactaaatataatgtatttttttagaaaaaaaatctcaaccactaaacatcaagaataataagtactctaaaatggtggaggcgagaatttattcaaagacactatccgctatcaacagatcctaaatacaaataggactctttggccaccaaatcatactagtacttgtcaaagcaagtttggccaaagtatgaacaataccattacaagacctattacaatgaacaatactaacaactttgtgcctattacaaagaccaataatgtcatccaacactagacccaaagagataataatagagacattattttaattttaaggatatcattcaaacaatcagactcaataatgatatttccgtacccaaaagaaagatattgggacaaatcatttctaatagccaatgcttcaactacctcaggcacaaaataaccattcaaacgccaacttgtcgaagcacgaacaactcccaactcgtctctaattaccttgcccaagccaatacaattgtctgtagtgttaatagttgtgtctatgttaactttgagacaactaagaaggggtggtccatttgggagctacttgaggagagaggtgccacaactccgacaagccagagcaggtagccatcgtcggctgaggaggaggattaattgtcgtcaaatattgcctgttgtgaaacatcccaagaaagtcacatgcccaacgaatcgtgagaacaaaagacaaatcaatattgttatggaccactgtattacgcttgtaccaaattcttcacatgatcaccatgaccaattcaatcatctcttttgaaaggggactaataaatctatgaataaagtcaaaaaaaatccacacaatggataagacgatttcccaacacaaacttagagattttcttacaatgaagcagagagttacaaccccaaagagcatgatgagtagtttcttcttccaacccacacaaaggatctaacccatcatataagagaccatgacgagccaaattaattttgcaggaatccaattgtaggattcttgccaagcaaaaagtctaacctttggagggaggttaagagaccaaatctttttcccccaaccaaacaaacctctagacggagaagcacaatgcactgccaagttacaaagtgcaagccaacaaccactcgtaatagaaaactatcctgaagtctcaaagttctaaataatcttatctgacacattgtttgaagactaaggatgtaacaccctagttgttagggacgctatggtattatccaaattactgtaccgagctttgctagttaaagggttttaatgaaaaaaatgtgatttatttaaaattttttaattaaattaaatttacttaaattaacatatattttagagtaatatgcggtataaatatctaagtttaactctcggttgcaaataactatctaaatttaatttttggcggtaataatacctaaattatatttttgaactctataggtattaactgttaaatgttaagtcattatccacgtgtcatt

SEQ ID NO: 307408 - DNA, 693 bp, Cannabis indica
tttttttttttgtttttttgagataaaggccaaaggcaaagggtcatttatgattaagcaaataatttccaacacaagagaatagctataaaattgtgataagaaaaactgacctttataggtcttcttggaaagtaaatttagttgacttttactaaacaaaaaagtttgcgtatctaggtaaaagatagaatgtgcttgctttaaaattactaatttgaaataggttttcaaatcataggcatttttctctaaaggggaaaaaaaattctacaaggcactgaagtaatagtactgtgtaaacttacagtattttccatgaacaagtgaaaagggaaaaaaggtgctttgttaagctttccactgtcgtctagtactttttatttattattatattgtattattagggtggtttttagaactgacatgaactaaaaagtagttgagttgagtatagtaaacaaaatttactatgatttggctgataaaaaaaaagtattgtttgtatagagtttaaaacaaagaaataattaagcacttgttatttactccaattccattcatttccatatccaaagagaatctgactataagtgatgctgttgctgaggctgagagaggtgtaagggaaaagatgagtcaggaatccaaagatgacataactctcactttctctctctctctctctgctcg

SEQ ID NO: 307409 - DNA, 1961 bp, Cannabis indica
aaaaaaatttaacacgccgaaaaataaaattcaaattttttgtcgtgtctcttttatttaaataattagttaaatataacaattttggtaatttttgttaattaatatgatattaatttattttttattttattaaaaaattaatataataataaaaaatatttttttaatgtaatttttggtgttgtggttgaagtaaaaatattttttaacgctaaatttaatgatagtgtaacactaaatttagtgtttatttggagatggtctaaccgcatcttactcttactatgacttaacactaatatttgagttgtccaaataccaaagtttcatcactatgtgcatcatcgaaaaacaaaatccacctaaaatcatttcaaaacaaaaagcctataaatccaatactaaaagtttaccaattacacaaaccaaaacccatgaagagcaaatcagtgaccaccatcatctttactctcatcttctccacaactctcctagacccttctctctcagagctatgcaaccaaaatgacaaaaaagtccttctccaaatcaagaaagctttcaatgacccctatgtcctcacttcatggcatgaagacaccgattgctgtgattggtactgcgtcacttgtgatcccaaaacgcaccgtatcaccgccttaacagttattactggttctctcacgggacctatcccgacccaagtaggagacctccattacctcgaaaacctcgacctccacaaacaagttaacctcacgggtcccatcccaccggccattgctaaactcaaaaacctcaagttcctcagattaaactggaacagcctcaccggttcggtcccggatttcttaagccaactcaccaacctcactttcctagatctatctttcaacaacctaacaggacccatcccagcttccctctccaagctaccaaaccttaggtccctccggctggaccggaacaaattaaccggatcgatcccggaatcgttcggagagtttaaaggggaagatttttatttggtcttgtctcataatcagctctcgggtaaaattccagatttgttgggaaaaaagaaggactttgctaatgtagacttttccaggaacaagcttgaaggtgacccgaatgcgttattcggatcggataaaactatccagtttgtagacctgtcgaggaatttgctggagtttaatatgtctaagattgagtttcccaagagcttggccacgttggatcttaatcataataagataattgggagtcttcctgtgggactgaccgcactggatgatttgcgcggtttcaatgtgagctataataggttgtgcgggaagattccggtgggtgggaatttgcagagcttcgaggacacgtcgtatttccataaccgttgcttatgtggtgctcccctacaaagttgtaaatagtaaattatatatcgactttggagaagtactaaagtattaatcatattgatcagtgcaattatatatatattgaatttctgatgttgggtgtcactatatttgattacacattattgtaatggatgagaatatatattccattagttgtaatttgttttatgtatggaaaagttgatccaaatcgtgtgggagtacagtaagctttcaccatcaattgcatggcgcattatttgttttatgttatgaaggatgttattccaccgattttatttctcacctttgtttatctggttgaagcaatcaagagatttcaataaaaacatataaacgaatgaattactattgaatcattatatcattaagattatccctcacttctaatatttacacttcataatttgtataaataatgtaggacttaattgtacaattagtttttattttttttttattttttatgttattcaataaataatattatttttattaaaaatataatgcatgtttactattaagtaatga

SEQ ID NO: 307410 - DNA, 2369 bp, Cannabis indica
atttttgtatgaacatatttttgatatagtgtaaaaagagatactttttgatattttttttaattaagtagtaaaattaagcataaaaattcaaatttgtgattttcattattcgttattagatcaaaattcgatggtttgatatttttaaaattaatatttatagttaaatttatttaataaccattcatgggtaataagtgttccataattatatatatatatatctatatactatatatttatgcatatacatatttatataaaacgtcaagaaataaatatatatttatatagaatgtgtggatcactggattggacataaaaagatagactttggtcccaaacattcatgcatatggcccaatttgtaaaaagaaaaatgtatccatccatgaccccagtgagaggcttattaatactgataacatgaggaaaataacagttcatattatgtctaatcatttgccaaaataaattgatgtgtaattattatgctgatacttgagttgataaccacaagctgttgtgatttaacatcaatactaggcaacttgtttgttaccagttaactttctttttctttcactgaacaaattaacattcaataaccgcattctttcgtacaaacaacatataattctaaaactgagtaaaaaggctttggaactctctagtagcatgtcatcctgtttgtgttctactggtcccgatccaggttctcgtttatctttgtgatgttttaagtcttttttcaatgaaaaatgctaaagagtatcagtggtgcctagcaccctcctatgtgtcaatatcgctattggtctaactaagtatctggtcccatataatttaatataatagcttctaggaagtatcgctacccaatcgcaacgcaacatgtcgagaatgggctaggcaccactggtgcctaatagcaatgctaacaatatctatttcttttatgagttttctcacctacccgtttcttcatttaatgctttttctacgtaggcaggggcggagccaggaattctatgcaagagggccacaatttcaaactttaatattaactaatttttataacacataattattaaatttatattcaatattaaaatttagagcaatttcttttttatgtcaaaaatcatctaaacaaatattaaagttaaacaaaaattactctatattattcatattgagaatattagtacacttgtaatcaatgcacacgttgaatatatatacgaataaaataatttttatatctaataatattgatgtggtttttcatcaattgatctaagaaaatcatgaatgttatccgtgttttatgcaagaatgacacttggagtataatagagaaggcccaattaatcttccattaatcgaagtcctttaaagcgctcagttgttgaagggtctccccgcactaagaggcatccaaagtaaagggatacgcggaagcctacttgcagcagtctttgctttccaaagagcaggatgagaagtgtctctcccgaaccttgaagggcctggcaggttttcagtacgggaatcaatgaactgtactaccaaccactgattaaaagttccataactttaatatgttgatggttttcttatttatggttaagtgatcttagttttctgtacagctacaagtaacagcttcatatatgaataagaaattttctaatatttatataaattatttaatattaaatattaataacttaatattcatgcatatatcaaaatattcaactcttatttaataatcagaaatatctttgcaagatttttagggcatgaaacctaacagaatcatcatcagagacaagctcgactcacagttcaataaccttttatatgttttagtagtttatgtcagataagcatgcttagaaaagtatgataagtagcatgtcaatagtatgatagcagaataagtgcacgtttaattagattacaattatgatcactgtctaactgatttgacttatgaattcgtattccgtgctatagaatggatgcctagtgaaacaccaagagttagggtaatatggttgaggctggaagtggtcaggaaaatcagaatccccctcattcttgcggtcaaggtagaggtcgtagaagggctcgtggtggtggtaatgcaaatctgccacaggctttgcaaaattgggagacgaggtttgcaggaatgcaagccagacatcaaagataggatgaggagatttagagacttaggcaatagggtcctcttgttgtaccccctcctcaggtaccattagctcatgttcctattgggttttatgccctaaataaaacttatttcaattgtaacaccctaactatcttaggcg

SEQ ID NO: 307411 - DNA, 1123 bp, Cannabis indica
ttttttgcatcaatcattttgatattgatttgtttacattaattctaatctctttttttcactgtttaatacaaataagttttttgttttttgctcaaagtatgtgttatctctgaaaagaaataagcatattaatttggaaagaaaatagaagttcaaattgtatgttagagagtcctaaattttagaaattttttctgcatattacagtgttacatgtatattttgacagtagattcagccttttatttaagtttaggggtcctcaaaagcctagttttcacagtgatgatgactagctatgtagttgtttgaaaatcaagcttttaactagtaactatttgttttgttctttgatttttacataggaatgaggcacttcgagttgctttcatacatgttgaggatggtggtgctgatggaaagggtccaaaagaattttattctaagcttgttaaagctgacatacatggaaaagatcaggtaaatcattgttttcagttgctggttttcttgtttgttaatggtagctcatgtactggctgtaatttgaatgagaccatatacatgtcctccccttgagcccgaatatctttgggaggcaggacactcttaaaaattgttaggtaggtctctttgtgccattgaattaacctcattgaagcaaactatggcatgcccactcgacctatccctcttggttagcttgatattactttgaaaatgggttgtcaaattatttggtcaaaagccaacatcaggcttataaaatgatttttatgggtttgacactaaattatttgctagtaaattatatattttttcgtattctttttacatttatgattgttaccatggctttcctcctccataagtgagggtgttttttattagtttgagaggtctctcatgacatgtgattgtcatttcttttaaataacaaaaaagatatgtttgaattgatttgccattctaaagtgactgaaatagactttatcgtaacacagtactttgttaatttgtttacacaagtttttccgggaaaaagaaaattgtttacataagttctacttacattaaacatatttatatattttattttaattctaatatatatatatat

SEQ ID NO: 307412 - DNA, 674 bp, Cannabis indica
aaaaacggtgtcgtttggaaaccgtaaatgagatggcaatgaaataggaagatgggttggttgcatgcattttggtttcgaaaatgttctgattttcaaaatcaacaggttcattttcattattctaaaactttctttctttctctttgtatgtatatattgttcatatataatatatatgtgatttcatttgaaaattgttccatgttattattgtatatgtttatttattaattaaatcttttattaaaagggttgttgaaaatgaggagtaatcgagtgaaggaagaggatagaattgaaagaacaattcagagccttctcaaacttcctgagaatcgcaagtgcatcaattgtaataatttggtatatatctatcaatcaattttctacctttctatataaatatatataatttttacatgtgtgtatggtatggataaatggtcaaattgatgatctataacatagaattatgaaaaaggaaattgaaaaacaatttgttttgatgagaatttggtacttgaaattcttgacattttctctatgatatgccgttatttatttatttatttttttataacaatacactgataaatttgagaaattattttatatactaattttttatttttataattttttaaattttcggactgggttattttggtagt

SEQ ID NO: 307413 - DNA, 1654 bp, Cannabis indica
tatatatatttgagtaatattagacacacattcaaattgcatttattacatagaataatgtatatttaatattgaccatttatatttttaagtatgatcatattatttttcattatatagttgagattaattacacatcattgtgattgtgtgtaaaaaatgtatgtaatttgagtgtgtgccaatcatttttcatatatcatattattcttttcgatcctcacaaaaaaataaactaaaaaatactctcaactttcacctttcatgattgcgtagatcgtttaaattacttgtttacaaggttatataatagtgggtatatatatatatatttgattatttttgtgaaaatacaatatttgattaggctatcgatgaattagatcaccaattatttgtaacaaaattgtaggtattaaaaaactgaaataactgacagactttaataactaaaatatttaaaaatatataatatatgttatcttaatccgtttgccccaacctatagattctaaactatatactaatgatcatcaatatgtagctagctttgattatgcttacttgcttcaacgatggctttaggcttatattatttaattagttagaagctacgtactttttttttttaattataatcttcttataataaccacattgttaattacgaaattaatatttaattatagagtgatatgtatttagagttagggagtggtgtgaagtatgataacttgtagtagaaagcaaagacagaaataaatggcaagagtttcagaaggtcatagggacagagactgatgcaaatgatgatgatgatgatgatcaccagtgatgataatgatgaatatctgaggctgaggaatgggtgcatatagggttttcatcaattgtacgcaacaatttgtgaatggtcactactcaaacacctgccccagcttaattaacaagagctcagcctatatttataaatttttatattatttttttggagtacaatgttatatataaatatataatttgttcccaaatttaaatgaaatgagaattgctatagtgccacaagcatttgaccttgtcggcctaaatatggcatattaatttgtctatctatctctttggtaatagcttttacttgtttatacaaaacaccccccacatggtaaattcagactagttatagagatagaatatatttttttaatccatgccaggtcccattactgtatgtaatccacttgactaagttaccctactactatagctatactatcccaaaagataaataaaataaaaatctgatttgaaattgcatttaatgtcaagtggaaatatttacaagtgtatgccatattaaactccaacaatgtcatgtataatatctatatacatattcggattctattatttaacagagatgtgatatactattggattttacatcaaccacttaagcttagcttaagtggccataaagagatttgaagagtttatgtaaaatactaaaatcaaatttcaaattgtgtaatgtaagagatatatatatatatatatactaggtgattgttacgtgccaagccacgtagtgttagttttatttaatattttagtttttattttaattaataattaaatagtataattatttgaacga

SEQ ID NO: 307414 - DNA, 1649 bp, Cannabis indica
ataccgcctgacagtatttttgtaaaaaaaattagtataccatgtaaatttcccaaaatttaacactaaggcccattgtataattcggccctatagttgatttaagcctaagtcttctatttcagtccatttcatctaacctaactccaagtgaatgcgtatataaagaaagtgatgagaagagagatccaacctaacctaattctatgtcacacaactctcttctcttatttctttgtaatttcaaaattcattgctttccctctctcaaatatagttccaaaggtgtttgcatagtagccgacactattcaaggtgatactcaggcctttttagaagactatgatgaacacaatcgaaggaggagaatatccaagtataaatcttgataatgttctgctacagacaggaatcaagggctagggatctgaatggaaggaaacaatatatttcgctgcaaccactgtaaagatttcttaatccttttatgtgtttattattgttttagaaaattcatatttaggatgttagattagaatcaatttaacatacatgagtgagtagtaaattaaaactatggtaaaaaaaaaattcatcaagcattgtttactacttttgctaaattttttgcttctattaatgatttctatgatttttttttattggggttcctcgctctaggaatgaagcggcttgtagacttgcttcttggactgcttcaaccaacaaaattgaaccgacttgtattgggcagttaggttcctttgtatctatctaccatgctcatttttgcttagttaatatatcttcttttttagcaaaaaaaaaaaaacctaagtacccacattaaattttatataaaaaaatggttatttatttactttcaaaaataaaaacaaagtaaaatgattactagagattggggagtgggatcttcataaattatataggttatgatcatgacacacagagatggtcttctactttctctctagagtcaaccttccttcgtgtcaccctgagtcttctccttgagtcaccctgtattcttagtctttccatcttgtctttccccgatccttcttctttctagtgcttaggttctttgccttttgggtttgtcctttccttaggctcgttagttttgtccattggctgctgctgttttcggggttttaagtgttcctttgtttttcggttctggtagtttgttaatttctgttaagtgttaggtaagatttgggttggtgggtgccccttttgtctctgttggggttcatttattgctttgtttcttggttcgttattcctctgtttgctgaacatttatggagtcattcattgtcgccagttctcctctcaagggtaagaacttttcttgccaagaaacttctgtcaaactctctccgtgtccctcctcggttcaggctttggctgcgtcctctttgtatgggaaagtgattgctcccatgactgtggatatccctattgtgctagactttgtggcaaagacttggaaaagaccggttagtgttgttgctatggtagatgatttgaagacttccaatgtgttcaagtttggttttgataacacagacgataggaactgggctatctctaacggcccctggtgcatccgtggatataca

SEQ ID NO: 307415 - DNA, 1147 bp, Cannabis indica
aatactaaaaataatatttagcatccattattttccattcatgactagtacatagctaattaagtacatttagatcattacagatcaatcgttacaagttttaatataaatttagtttcaaggaaaaatttcatatagatttaaggctaaactaataacaacattctaattccttggcagtacctcctcaaccactaacatcaaagtgagctcttgaaatgggagaagataggggcaagcttataaaatcctagtagaaaatcaactaatatcaatagacccttagtttaatgaaatccctacatggttaacttttaaaaataaaaagtatatcataattatcatcacgtataaaaaaaaaaaaaaccaaaaaataatcacaacatcaagcttttaatgcatatcacactgtccactagacccctatctcaatactaattgtagaaaacaacatcctaaattgggtaattgcgaaccacaaaaatattacagtgcaaattcaattcacttcttttacagattctaggtcttaaacttacatatgagtgcacacttgatctacttatgattactcaaatactaagtagtgaaacaacattatgcataacacatgataaaaagggctcttctcaatattgagtataatataaagcagccaaacaagaataataaaagtacatattctcctttcattattttagaagattaggagcataatggttataatttgaaataactaaaaaaatcatataacatgcataaataatggtattaaaatatgtttggtactcagcgctcctgaacagtctcgaaaaatatgcagattaagtttttaattttttcagtattttataaatcataaatattgaaatatgcctaatgttaatcaacacatatacaatcaagtctaataatcaagtggagtccctatctctcccaaatcattaagctttgtccaaaaaggcgattataagtctcgagctcaattgttagatccaatcctagatatcacgttttcctacgaccatcaaatgagcaatatgttagacttttatttgggcttacattatattttattggttttattaaaacttgggttgattggatagttctttgctgtgttagcccatgttgttggtgatcaatt

SEQ ID NO: 307416 - DNA, 2094 bp, Cannabis indica
ctgaatcctttgctctagcgacgaatgctccggtgatttcgagaaaaggctttgttggatagtgatataggatgcagagggtgtggtttggttggcgtagtcagtgtgttaggtgatttctctgctaatgtagcagagctgcttgccattcatctagggttgactcttgcgtatcaatttagtttcaatatctctatttattaatagtgattcatctgtggcaattggttgggttaataagcttcacattaattttagttttcagtctattttattagatatctagtagttgttggtagtggttcttgcagtatcactccgatatcaacgaatggtgttgtccatattgacaatctctattactagtttataagcgatcgtgtgttatgcttgtctttgattttttagttcttttataagagcggatttgtcgtaatgaattttgcatttatttcaaatatatatatatatatatatatatctgatgtgccacctagtggattatacttgatgaattctatacgttccatatttgaccaagtcactaaccttcttttactagcaatacctatcaataaggccatgcccatgcctttaaatccttggtcaaattgaaatgacatgttcatataaggatttttctctttttgtagatatatcaatataaaaatatataaattaagtagtagttttcgttttgttgggttcaaactttatgcaccataataatgcagtggcaactcgaaggaaaactcttgcaagttggcaacgtccctcttggcctcttctacatatatggacgataataaatttcccaataaaaagtactcaaagctctttttggaccaaattatatactgtgattggattttgattatttgttatggcctacgtacccctgatgaccccacatttgctttaatctcacggttcgtggaattagagcactattaatataacaaattaaaccacataatatgataaaaagatcatgtacatttcttatgtgccatggaataagattaatgattctctttttggcttggaagaaaaaaaaagaaacaaattgataaagaatacccactctctctctctctctatctctcgtattttccatgaggaagggaccacagcatagagagagaaagagagagagcccaaataatgcccaaattaagaacgctcaacgaatgtattattgaattcttaaaatgtatattaacgatattagtttaataattaaagtgaaaaaaatcgatcaccaaataataatgagcactaaaattccactaagaaaagaagatgcacatatataagagaaataattagttggtgatgatccattgttaagttaattggtagctaattaagattagagagattgggaagaaagagaatgcaaggacattattgtacaagatatataaagagatagtacaagcatatattcaaattcaggcccaccttccacttattgatttatcactaaaaatggttcaaagagacaaaagcgtttgataatgagatcaatgggaggaaaaaaaaaagttgattatggcatggaggttagataaaaaagcccatgtcttatataccttagctagatactcaccaaattaatagtaacatccactcatatatatgatacattagtgtaacaaaatttgttgatcttgacagagatatttagagtaataaagatattataggctaggcaggtgactcttctattttattatacttttataaaatacttgaattattacactaattattaattagttaaaccatatcatgcttattgatctagctaacttctcaagattcattctactcattattttatgctagcttaagccttaataaatttttgatgcttagagagagagagagagtatagatggaaaagtggaacgatggtcaaaaattataatctcgaataatcttgatattctaaatatctaattatcttgttccactaattctaagatcctcaattgtatttaagtgactctaatgtctaaaacgttgcatttcactgttactgaacataaatataaaattcgtaaacttcacatataacatatataatag

SEQ ID NO: 307417 - DNA, 1530 bp, Cannabis indica
tttttttttaattttatgatttgggttgtttagtgatttttatgtgggttgttatgtagattttggttgcaatttaagttgcttcggtaggtttatatgtgggttgctatgttgattttagttgtgatttaggttccgttggttgctatgtgattttttgtaaaaataaataaataaaaagagtaatttgcggcaaaaaaacctaagtttaactctcggttgcaaataaatacataaatttaatttttaacggtaataatacctaagttataaaaatagaacttctataagtatttggttgttaagtgttaagtaaattaccacttgacaatttttaattggtcaaagtcattacattaatatttttttttaaaaaaaaataaatgtaccattaagaaaatgacatgtggataacggtcagatacctacagtgtaacaaaaatataaattaagtattataactgttcaaaattattttaaatatttatttacaactagaaattaaattaagtatttatactataaattatttaaaaaattaaattaaaacaaaaaaataaaaaaactataaaattatacctaattaatttgtactataaattgaattaaataattataatttgtttttactataattttttttgaaagaactataaatttgattgaatgcacataattgctatacattttatatctatcctatatctatatcttgagttactaaaaaagaggtgtattgaattgatcaagaacaattaagccatatactcattagatctatagtatatagcatagtcaagtcaacctaataatctttattaatatttattacttaaattctttgccaaatcttccttttctactaatttaccataatttatttatttattttaataaatgatcatcattatttacaatgaaaattaaaatcaaagacacaaaaatccaaaattcgagaatattattgtcgaattattaatgttaaaataggaaaagattaagtagtttccaattttacccctacgtgtgaaattaaccgaaaagggtaatttcgtcataagaggacaaaccaaaccgagtacataaaggaaagagactggctcccactgttggagcttagtgtggccattaatggaggcttaatatttagataagagagattgagaaagtttcagagaaaacccaaatcgatttcgaatgggatttactctttcttctttttcttcttctaagacgaaaagctctaaagagagttggggtatgggtcttcttctggttttttttccagaagataattccgccattgttgaaaaaaacatgctttttaactcttcttcctcttcttcatcaaactcttcaatttccgcttcagtaattagaagaagcaattccaatcgtcttcttacaaaagcccaatccaccatttcaatctgtgctctactcgtcttcatcactcttctccttttcacactctcaactttcgaaccaaacagtaaccgaaatcaccaacaacaaccaagaagattcctt

SEQ ID NO: 307418 - DNA, 4588 bp, Cannabis indica
agaacacctattttacaccatatacaacatattccaatagataaaaacacaattaaatcacaaaatcaaaacttgccattattgagcaaactttgagctcaaaaactctagcttgctcaacactcgccacatcagccaaatctcaactaaaatcatcaaaacaaatttaattaagctcccaaaatagattctaaacaacctaaatcctaacaacaacaaacctaggattacacaacctgaaacctagctttaaactaaaatttaaagaatgaaaaagaaactagagtcttactttttccttccaactacttgctcttcaaaaccagttgtaaatcgtcaaggaaagaggtttgattgctctagtttctttagttctcctagaaccgaatagagagagaaaaaggataggttggataaagttgattttctatttcctttacttaagataaaacctaactttatttccatttacttaattaatcaatctttaaaaaccaactaataaaactagctaaagacaaacaaggagaaataaaccaaaccatggaaatttactaaattgccccttcacgtaacacttaagcaaaacaagtgcctaggattaaaatggtcaaaaaccataccccgcagaaccccaacattccaaatgtctaccaatcttgccttgccaaaaaaaaaataataaccaataccatgtgagtctaatggcaaaattgtttcctttacactgttaccatgtaaacaacacaaaaatataaaatttcacatattgtatatataatacatttagaatttaattaaatctccaaaattaagaaattataattcaattacctatttcttgagaatatgacccacatcaaatattatgcacacataatcatataatacaattaatcgatgctaaatgtctactattccatatcttaagtatgcggtcattacacttggtgagtccaaaaacgtgttggggatgtattttttgatgcctaatgatattttgacatcaattagtcaatttctttgctctggtgaagttgttcaccaattctcaaagatgttgctgtttcacaaaagtaggagactcgaaactacccaatttgttcctaaatcactttggaaaaaaatttgaaatatgaagttatgaatttgaatattttgagttcatagctatcatgtactatgaaaaactagatgaacgctcgagacagaattagaatcagattagcaaaacccagtacacccggtcatatgtcaacctgggcgttgggtgcttttttttttgctgattttgagatgtcgctttgatacttccaaggtctttgaattcgaggtcaaggtgccctaccctgcttttgaccatgcaggagcaaatttggcatttagtgaccgaaactagtgcaccaagttaattgttaacttgggcactagtctcagtattttagccctttaagattctcgttttctctccaagtttacttgtatctttgttatttctaattatagaaaaagtgcatggaacacttttttggaagaatgactgaaagtagcgcaggttgacaaaatatcaactagagcattgggtccattttttggccaccaaatggccacgtttgattctcaaaaatactcgtatcttaatccttcacaaaaatagagaacatacccaaaatacttcttagaaaacttcttggaaatggcataggttgacaaggtgttaacgtaggggatgggtcccaattatgaccccagatagctctatttctctcccaaaagcacttgtttcctcattttggatgaagatgaagaaaatgattgagatagttctttagtatggtggttggaagcaccccaggttgataagcactcggtgcttggggcacctggtgctctaggtgctcaaaaatgaaagtgctctaaatctaattcgtatgccttaaatattcgtgacatgtctaattcatttctaagtgctaagtttgggtcattttcagtaagacggtcacaaaaattgaaacccttgccagattttcaaccgaagcactggtgaaaccctaggcgcctaggttggctcttggggttcttgggtcaactcctttcagtttctaggcttcgaaattggattcttcttgacttcattactcagaatactaaaggatggttacttggaaacaacttagtaggatccaaatacacattctggagactcaaagttaacctagtcgtagggttagggaccttttccaaagttgactgctatgactagagttccttcactctaaaaatattttccttcctacctcgtgtcaaacattgatatccacgtcattagggctacttctcgggtaaataactgtctccttttttcatcagtctaaggtgaattatccttaaatagcttaaagggttgagccaaaggcgtgacaactggtttgacttcattcatctcaaatttaagtaataccttctataaataactcttgtgagtttgcaagatcttcttagatctttttccctttatttatatcccgaggatcttcttttttgcccccatgtctttcatatcaaattcactcttcaatttactcatcacctcatttatcttgagattgttcttcccaaaattaagatatatctacatatagtagtagatagatattttcaacatagtagacacaggattcataggaacttttagtgaatttgatttttgtcataaattcatcaattcagatgttccattgtctaggttcctatttaaggccatataaagatttttgtgggaggcatacctaatttgtgttacaatcgtcaaaccctttaggttgtttcatgtagatctttacttctagatttccatgtaagaaagtttttctaatatccatttgatctatttcaaggtcctagtctatagctttagccataatggtcctgatggagggttgtttcactaaaggcgagaatatatcattaaaatctataccttccttttgagtgaggccttttgtagcaagtcttgtcttatatcatatcttctctttgtctaacatcccttccttaatcatgaataggtattaactattaatcaatcactagaatggtggtttattaacagctgaccaagttttgttcttcttaaggacatcttttcttcttatgttgcctaaagccaatgtctcttacattactttcaagttattttgagtaagtagctggatctaaattttaatctcattagctgtagctaaggaaaaggctaagaagtaaacaaaaccaagtctttcaagatgtcttagtcttttatctctagccatgagatagtaatttaattcttcctagacttcctgagtttcatagcttgatcttgatgtccatctgtgttgatactctcatccaccttaatattgttctactctaaattttcatcttatttgagtgcatgcttaggtaaaggtttcattgccatttcttcctctcagaaatgacatctctacttattattcacttcttgaaacctggctcaagataccaaagtgttaaggtaccaaaggaacatgcacgtgatttctctaggctttagtttatcttgcttcacatgttcataggttttgcatccaaaaacccttagatgatcattgtttggagtttttccagtccacttttcttgaggtgtcatgaattttagagaaattgaaggatacctaattatcaagtagcaggctatagacaaggcttctccccaaaaaaattttctaacccatcaactttatgcaagaatcttaccctttctaaaagattcttgttcatcctttctctgaacccattctgttggagtgtgcctctgatagtaaacttcttcgctattccttctttataacaaaattctttgaacattttagagaaaaattctaatccattttctatcgtcaacttctgaagcttcttaccaatttgaatttcaagcaattgcgtccatttgacaaatgtgttgaagactttatctttggtttttaaaagatatacccacatttttcttgaggaatcgtcaatgatgcttagaaaatagtaagcaccaccaagggttggtattcttgaaggcccccaaagatctgaatggacataggctaactggtcctttgtgttgtatataccaggggaaaatttagtctacaacttttatctgtatgcattcttcacaaaatttgagtttgtatgttatctttcctttaagaatcccttgtttcttaaattcaaggcctttctcactcgcatggcctagtctcaaatgccacaatcttgtcatgtcgtcatcacatgcacttgtgatatttgaaactaaactagtaactagtttcccatttagaaaatacaacccattctatatttacctttcattacagttagtgagcctttaatgactctaagtgagttttcatcaattttaatagagtatccttttgaagttaaaacaccaataaacaagagatttaattgacctcacttttaaccaaggactgtgagtcaattaataagcgatagaaatgtaattaagatagagcaaaaagtaataagtaataaagaacacaag

SEQ ID NO: 307419 - DNA, 2458 bp, Cannabis indica
cagatcttcacattatttccaatgccagtgcactaccactgccttgcaccccttgccaaggttcatttcatttcattctctttttttgacgaacttgggaagtaaatgcctgctaacatatctatattgtttcaattttcaggtcattaatgatagatttggcattgtcgagggtctgatgaccaccgtgcactccatcactggtgggtttcttagtaatttatatgcttgtgttgttgatttttgttaaaaccaatttgtgtaatcaatttgttgtgtgcaaatgttcctttatgcagccactcaaaaaactgttgatggaccatctgccaaggactggagaggtggaagagctgcttcattcaacatcattcctagcagtactggagctgctaaggtacctttttttttcactctttgttttaaacatgtcaaaattaaccaatttagagctgtcttttatttccaaaatcgttatcttatgttgcccatttatttatttgttggtttgatatggtgaaggctgttgggaaagtgcttccagctttgaacggaaaattgactggaatggcattccgtgttcctactgttgatgtctcagtggttgacctcacagtaaggctggagaaggctgccacctacgagcagattaaagctgctatcaagtaagaaagacaattatattcctatttgaaattgattttaatttcacattagtttctttggcttgtgttttacctatcagctctgcccactgctgtttgtgctttgtttagctttagatatgtcaactttgatgatttatttctggtggtttctttaacattttctatttggttattcacagggaggaatctgagggtaaaatgaagggaatcttgggttacaccgaggatgacgtggtttccactgactttgtgggtgacaacaggtaatagatagatctatatactttatatcttgaatatgtcctggccatgcatttttaggatgcgggccttcataaagatttccgtaacttgattgtgattgatcaacttttcttctgaaaatctaatctataaatttggtcactatattttcaaagaactttatttttgcctttgcatctctgtcctttccctccccttatttatgttttgacaactattttagctgcattcttcaactagttatcttagaatgatgtgttgaatttgtcaactttataggtcaagcatcttcgatgccaaggccggaattgctttgaatgacaagtttgttaagcttgtttcgtggtatgacaacgagtggggttacaggtaaattgctcttttatctttgggtatatttttttcttttgcttcagctcggccttttgtacttgtgtttatgaatacttttgtgggattttgcagcacccgtgtgattgacctcattgtccatgttgcaaaaaccaagtgaaatagctagactgggcttctgctaatggtgttatctctattggcttatgatatttatcagtcttctgcttctcattatcgaaaataagaggattttttttataaaaaaattacttgggtgtttataccaagtctttgtactctagatcatttagtttcagtgtgatcaatgatggggcaatagatgtgctccatgttttgttttcaagatagtaaacctttatttgccggtatatttgtttttgctgagtttattactctaatgctaaagggcatcttatggggtttttgcatattttggtgcaatcaacatctaaaaaaagaatccaaaaaataagaaaatgtcattaaccattaaagaagaaaagaagagaaaaaagtgaaggaaagaagaaaagatgagaggtatgaaatattgagtgggatggagtgaaaaaatttcatacaatcaaatagagtaaaaaattcaagcgaaaaaaagaagagaaaataataataaaaagactagattattgataattgagtagtgataactacaactttttattttaacttttagttacatgttaaaatatatatatatatatatttttttttatagtggaatattattctagtttacagtataggaatttgacacattttttttctcttcctaccaaaccatggctggagaatatcttttagatgtcatttcttgaaggacttgtactgatatagcagtattataggcaaaccttaaagttggtatatagtattctgttctttgtggctattcgaataaaattagattcttttttttttttaatttgatggtggcatatattaggtccagacttccgaatctttacaagtttaatcctattgcacatatcgagagccccaaaaatagaattaaggatacatgatcattaacttgttttcatgtgggagaaactgttttattatttataataatataatatatagattaaatatgtgtaataaactaataatatgtaacatatgacaatgta

SEQ ID NO: 307420 - DNA, 3929 bp, Cannabis indica
gcagtgtaaaaccggcccgttttacccagaaaaccatcaaaaatcaattctccaaccaaaacgtttccaaactcaaccaaactttccagacctgctaattagaccctaataaacattttccaagtgataaaacaaagcttcatgcataaaatcaaaatccaccattaaagctccaagctttgagttcaaaactcaaacttggttaaacaacactatcatgcatcaaaccttgcttaaaattacataatcaaccatatagaaactgcagaaatcaacagcaagcatcaacaaaaaccacagcaacagattcttcattctttctttgaaaactatatttttgagtaaaaacttccaacttgaaacaaagcaactagcatgcatcaaactagctttcatctactcaaaataacaagattaaacctctgaaacaacaacaaaatcacagcaacaacatcaacctaaactaagcatgcaaaccatcatttcttcccaaaattttcgagaacttaaaagcaagttaatgaaatcataccaacaacttaggaacactaaatcttgaacaaagaagcttgaatcaccagaaaaccccactccttgctgctcaagtggcgaacgggaggagagagagagagagagagagagaatggggtcaaaaatccaaatttttaaatataacccaaagatcaacatcatctgcaataataatagcgatagccacaagaacctcagtagttaagggtgcagaatctccgaactcaagaaaaggagcatagatacaaaatccgacgttccagccaagggttcaaaaatcagcaattggcaaaattctgtacatatcaagttagtgaaaataaaacgtagtacaacctcatatgaaacgacaatgaaacatatctaacccacaggactggagaagaggaaaacactaattatgaaattaatcttgagaaaagctggaccctgaaaattcattgaataacacaaggcaaaacatgaacaaaaagtcgcactgacgtagcaaaagatgagaagtgttttaaagaaaatactatgctaagtcaactacccttcgatgttaaatgctaaatcttacgtcttagctcctggtgcaattcaacaatcatctaagttcagaacatagaatcaattttggtgaagataaactgcagcatgacatcatgatcataagagaaaaaagacaaaggggcaggcataataaaataattcaactgaagacttccatagcgcaaaagattgcaaccccaagttaagatgaatgaattgccaaacctccagtagcaccactatcacattaaatggagtattcagaaaatacttggagtacctatatacgacgcatttaggtgagaaaataccatcatcaagggggaaaggaagtcaaaataaaattgagcatataaaaataaacataaaccatgctctgctggtcatgtattgatcaaaatttccaaatataaatacacgggaaaagtacgaagcgtaagttactagcgatcctctgctgcatccatcagagctaagaaacataaaccatgcataataatctgaaccaaatatctaaacttatacctacctcgacgtcaaaaactaaatatctgtccttttaatgagaaagcccaacaagtcctggtcgcaaatgtagatccagaccccacacagaattctaagcatagggggatctgcaaatatcacatagaatccaacaaggctacaaccaactattcgttacaaacacaacaaacaaaagtaattgcacttgcaaaaaacctctgaacctctacaagaggtatataaatactaatacaaattcccaaagtgcagaataaagatgatgctctgagaatcatctgtggaaatagattcttatcacgatataaaaaggtgatgaaacaaatcaaacccgcagtaatgggaatggagacgcggaggacatcgaagacttgcggcatgacaattaaggcatccatgattagtaattctcgagtgacagaagagccctgaaaattcattgaatgcccaaaacggaagacatgaacaaaaaatctcacaaagacagaagcttaagttctagaaaataaaaacacatttaagaggaaacactagtccaggaataactcccttccaaggttaaattcttgtttatatagacccgattaaagaatattgaagccttacgcaagtcaagaacctgaaattagtgaacatgcatatgataagatggacagcatagcagaaaaaacacatgaaaggaggatgaataaataagaattgaaataaatcaaataatcatgttacaccccctccatagtgcaacgacgcaaaagaccttgacccattctctcgatcgcctaaaagaggaaacataccaagaccctcaaaaaaggaggcagaaagagattcaaaacaaagcacaatgaagaaaaggagatataaaagcaaggatggtgatactatgtcaaacccatttggatgaattgccgcagttttatcaactgaaacatatacatttataaatgtgtgtacgtaagcataccaaaccatccgcccgtccttgaaagaagaaagtcaacgatcgaaaccggaaattcagaaaaaagtttaaacgatttcagaagttcaacatgataaacgctctcagaaataagggtaacagagccaaacgttagataagacgaggagttggcataacttaagcctttcttgccaaacctctgcagcaagctggaagaagggatttgatttaataaatcaagaaatttcacaatctgaataggcaatatgcttttagagaacatcaattaaccaaaaagaacctgggacaccacgaaacaggggcaatccaccgagccactcccagtcccagcctcaacaatcgaagctaaccatcaacgaagtaatcgaaagaaatatttcagttatgtgaaaatcacctcgatggttgtggccataatctgcatatttcaacacagatgaaaccaaaacaaagcccaaggccaccataagctgaataaaccaaaagaatccctaaataagaagaatgaatcgaatcgaataagaaatattaatcgaaattccaaaccaaaccgatctaatcagaatcccaagcgtaaatcaatgatcctctgcataaatcaatttcgagagagatcactaaccgattcgaacaaaacgcacacaaacatcaatcaaactcaggtatatcgatagaagaacaaagtcgcgatatgcaatcaataccaaatcttcgaataaaaaacgctaacaacagatcataaataccagagagctcttgcacccatggaggtaggggtagagagagaagaccccattctggaaacttcaatggggatgaggaatgagaaagaaaccagggtctatttatagcaaaaggatgtttaaatgaacggctaagatttaaaacatgtggacggttgatagaacgtggtcttctaaattgggttgaattatattttcggaaatcaaaagagtcggtagttacttaaaaacaatagctggtcgacaagtaacacggtttctaattttattttattatcattttttaaaaaacgaatttattttattttataattgcttgaaagctaagccactgtaccgttacttcctttcttcacttcctacccaccgaaagtttttatttatttattttttaatgtaacacagctgcacacagactatgcgaatcctgtgtttctttatcttgcctatccattggaaagccacgatataattaaatttatgtaattagagataattacacaatttgtcatatttttctgaccaggtaattacaatctaactgtgtaataggaagtaattgaggggtttcaattatactctccaattctcatggccgcccatgagaattgaatgtaattacactgtgtaat

SEQ ID NO: 307421 - DNA, 1454 bp, Cannabis indica
caaatgactgtaaacattacttacttactagttactattgaacaattttcctaatatttacaagggaacccaccttctaatcttctgaacatcataatgaagctgtactttccaaaacttgactaaatggtgtcatttgatttataaaattttggtttaatgggcttccttgaatatgttcataactagtctctcaatgtctcgtggatcattatattaccactagttacccctgttatggtgaaattcgtttaattgcagtatgaaaattagcattaacgcacatacacacacataaatatatttgttacattttttcattctctaatcatgggaaaccacttatattggacgaaaattcttccatgacacataactattaagagagttcaatgaggttgtcatatgtacataatgtagttttaagtactaataagggagacctttgatttttctttattcaaatccaagcttgtttcaaaattccgatgtacgccattctgattctaactatgatgtggaattcaggtttttgctgaattaaaggatctggctgatgagatttcatcagtagctttggtatctcccacgttgattatcattggaagagtggttgccctttcctcgtattggccacattctgtagaagaaacatcctccttggtagaggcgaaataaacattttcttttatgaatttgaggagatatcctgatatctttctaggcagaagctgggtttatacatattcaaactctgataattcttgccccagatggatttggtttactcccagtgaagaattatagatgtttttattagctctgctgcgaagagatggagaggcggcagagagaagaattttttgggatgctaatggaataaaatttccgagtaaaataaattgtatgttgactgagttaggagttactgagactgggccttgacactaccacatgaatttcagtaagaagaataaatgctttgtactttagaatgaagcataggttcattgctgacaaccaactaaatgcaggcattttttctttcaattcttttttcttcattggaatttctgattgtcagataggaaattttttttgtaatgagcatttttaatttatttgagtcaaatttaattcttttagtgttataaaatatattatgatgtccaaattaatgcattaattactatcataaatatttaattataatttcttttttattttattgatttaggtttttattattctaatcatataaatagagtttcacctcattttaataaattaatgagaatttttcatttactttcttattctttttgtcttctcttttcttttagaggaaattacgtagaatatgacattttttccttaaatttcataaatatggaaaaattagagatttacttaacttatggcttttttacaatttaagttagttgtatggaaaa

SEQ ID NO: 307422 - DNA, 5263 bp, Cannabis indica
acaccatcaaatagtaaaatgagattagggagtatggaatggtgaaagttagaagagaatagaagaaataaaaggtataaatatatatgaaatataaagtgtgcctatttttttaattttagtaagcttgtgttcaaaaatttaatatactaaatttcccaactcagatataatgatacactttcaggagtggagacttcccaaataccttccttctagtctctacattattaaattcagtctaaattattatataaattcataaaaaaaattatatattaaatatttgagacctatccactgttttgttttttaaaaaagctattagtggaataaaaaattgtaagttgaggattttttttttttgatattaatgttttattatttaattttttttgggaccttagacaatatatatatatatatattttttaaaatggatgaagccccaacccattctgatcctttattggttactgttaaccaaaagaaacagttagttagtttgttagagttagttaattcaagatttcttttaattataagttgttgtagctacactaatagaattaagatccctttaattcgggttcgtcttccctcgactttgaagggcttccggtgtactggactggtgtttactcgcctgcaatggaggaatttctatccaagaccactcaacttcatgtctcggatgaagaagaatgggaggtggataagagtttatctttgacgattgctaaaaacaatttgcgagggagactttgcactaatgtggatcacagcaggggctttctcaagaaagtcctggggagaatatggagactcaaggaagcggaatggaacattaaaattcaagagaaattcgattcaggtatgttcctatccttttcttttgcctctgaacaaaaccagtcaagaattctagccaagatgctgtggtatttatctaatggattactgattttggggaagatggtgaatactaatgattcttggaaggatgatcttacagcctttcctatttggggtagagctcttgaggtaccaatagactatttaactgaaaaaaaaactttgagattggcttccatggcagggacggtcatttcgatcaataatgctgatgtatcaaaaatggtgactaatggtttctttagatttcagatttggatgtcgatcaacaaaccagtttgtccggggtatctactaccatgtgggggatcaaagaagtggatcgcattcaaatacgacgaactgccattcatgtgttttcggtgcggacgtatcggacataatcaaaaagattgttctgtggaatacaaagaaatcgcaggagttatgggggagaaggctaaagcttacgggatatggctaaaagtggaacaagaaatacgggatggctttcaggaaggattaacaggaccaagaatagaactacagaaggggataaaggaacagaggaatgggatagggcctgacaggggaatgaaactttcgaactccttttctcttctcacagaccccatggaaacaaggaagataattatggatgaaacacaaatgagtaatgataatgacggtagtaccgtagaaaaaggcacaacaagtgtcaatgttatgataccacaaaagctaactacaagcgatcttagggaggatttgggtaaccaggaagaggtgaatagggggaaaagaagaatgttggaagttgaatcaatatcgggggttggcaaactccaaagaactgcgaacctacctatgacaaccatggaaacacaacagctatatgatgttccaatcacgtttcaacaagagaaggatgggatagaaggaggaccatctttcgtctttggcccgagtcaacaatcaatatctaaggcacaaaggcgaaaggtagcagtgaaaaaagatggaaaaacaggaaaagcaaggcggagaagataccgattggggtttctcaggaaggggattcgacaattggaggtacgatggaagaggtgcactctgcagggcagggtcgcctacagccatgaaaacacttttgtggaacgttcaagggatggggaacccttggacggtccgtacattgaaatccctggtgaaacgatggaatcctgatctaatttttctttcggagactcgattgaaaaaggagaaagctgaaaatcttcgggttgctctgagttttgagggttgttttgtggtggaagcgcggggtaaaagcggtggtctcatcttactttggtccaacttgatcgattgtaatatcctttccttttcctcttttcacattgattctttcataagaaaagaggaggatcaaggttggcgatttacggggttctatggcgatccggatcctaatcaaagatgcgaatcttggaaactacttacaaggattggaaggatgtactcggggccttgggtgatagggggtgactttaatgagattttgagaagaaaagagaagatgggaggacaaccaaaaccgggtcatcttattacgaattttcgaaaagcacttgatggaagtaatttgaaggaagtagactatgagggtagttgctacacttggtgtaacggacggcaaaataacctcatttttgatagacttgatcgagtgtgtggtaactcggagtggtttcatatcttccctgctgccaaagttttccatctcgaaagagtgaactcggaccattgtcctctcctccttcagtgtttgtatcaaaccaatgagaatgtgacaggatctaggtggcattctaggttccattttgagagtgcttgggctgaagaagaaaaatgttctcagattgtgacagaaaattggaatagagggaacagtagtaccacgacttatgagctgaagaagaaactaaccgattgtgggaatgctctcaatcattggaacaaggcaaaaaagaaagaaatgaacttgaagctcaaggagttggaagacaaaatagccagtctttctttgagtacggcttcaacagattggcagcacctaaaagaggttgaacggaaaaataatattctccttgataaagaagaaaagttttggaagcaacggagccgcgctatttggctaaaagaaggggatcgaaacacgaagtacttccacaggaaagcaaatactcgaaaaaagaagaactctatactgggtatcatggactgcaatgacaattgggttactggaaacaaacgggtgggccaggttgcttgtaactacttccagcagctgtttgaagctaattcagcaactaaggaagaattggaagagttcaaaagtgcaattccgaacaaaatatcccgagaaacaaatgaattcctcaaagctcctttcactgccgaagatgttttccaagctatgcgtaatattcaccctcaaaaggctccgggaaatgatggaatgccggggctattctacagaatgttttggccgaaaataggagaagaagtgaccaaagtttgcttgggaatcttgaatgatggaaaaccgattgaggacataaatgacacccttatctgcctaattccgaaaatagacaagcctacccgaatgtcgaacttccgtcctattagcctttgtaatgtggtgtacaagatcatagcaaaatgccttgcgggccgtatgaaaaatagcctttaccaagacatctcggaagaacaaagtgcctttctggcgggtaggttgattcaagacaatgctatcattggttttgaaagccttcattgtatgaaaacgagaagattcggtaatggaaggaaaatggcgctcaagttggatatgtcaaaggcttatgactgggtggagtggaatttccttactaccatgatggaagggcttgggtatgatgaggaatggataaacaaaatcatgagatgtgtgactagtgtttctttctcggttctaattaatggggaaaagataggaaattttaagccttctcggggtcttcgtcaaggtgactccctatccccctatcttttccttatttgctcggaaggtttatcttgtctaatacaagcggctgagagggctggcactattaatggggttcggtttggtagagatggagttaaagtgtctcatctattctttgcggatgatagcttcatgttccttgatggaaatatcgacgaatgtgatactatgtcccacattctgcatcactactctcggctttcggggcaacaaatcaatcttgataaatctgaagtgagcatgggcagccgcatttctcctcaattgggtcaaagcctagctagtcgtttgggggttaaacttgttgcacatcacacgaaatacttggggctgcctagtttcatcggtagaaggaaaaaaataggtgtttgaggtaatcaaagataaggtgtggaataaacttaaaggctggaaagcttcaatgttctcccaagcggggaaagaaattctgataaaggcagtcatccaagccatcccgagctattccatgagttgtttccgcctcccaaagaagctcattactagccttcattctttggctgccaacttttggtggggggatacaaaagaaaataaaaagatccattggggcacgtgggccaaaatgtgcaaaccaaaggaagaaggagggttaggctttcgaagtttaacggagtttaatcaagctctcttagccaaacaagggtggaggttgattcataaaccccattcccttttggcgagaattttgaaagatagttactatcctaatacctcctttcttcaagccaagtgtccccctggagcttcatgtatttggcaaggcatcatatggggtaggcaaattattgaagaaggaggccggtggagaattgggaatggaagaacgactcgaatttgggaagacaagtggatcccccgcccaaatggtactattctttatcggcatgaaggaatagccccaaacaccactgttcatacccttttgaatgaggaagaagattggaataaagagaagatcctcatctatttccactccgaagacatcccctggatattgggaacgcccatagatacgcaagtggaagataccatgatatggcctttctccccgaatggaaattacttagtaaagagtggttatagagtggctcgggaacgaaatctccacccgactcgatgttcaaacatggagcccatccacgcgtggtggaaaatgtggtggcaacttcaactccccccccccccccccgggatcaagctttttggttggaagctttgccataattggct

SEQ ID NO: 307423 - DNA, 1964 bp, Cannabis indica
aaacaagaataccagtgtgataaggatttggatgaatttataaatcaaataaataaataaatgatcacatgaaccaaatgacactttaaacaagtaataaaattaaatctatttctttactgataattgaatagaaaagattacattgaaatagagttttatttatggcccaaagcccaacaatgctaaggctaggtaaatctctgtgtatcctttagccttgatctattcctagattcacgaagcctctcggtgatctggtgtcacggaggatacttatctaatgagtgtttgaagtcgtacatctcttcttatgccacatgtttcctcctccgtgaacgaggataacatttatcccctaagcttctagaactttgtgagttgtgggagcttccaatccttctccgaatctttgagacatatttatgacacatggatagtcattgagaacacatatgtgttctttttgttgagttgtcatcgattgaaatatcaagaattatgatgccacttgtgtggcacacatgccatgcctttagtgaatttgttgacagcacgcgcatgcagggggcgcattttctaggggaagttgtattgatggtaggtcaattgacatgaccatcctttaatgatactaggcttgaggcagacaatgatgaaaaataaaggccttgattaggtttaaatgctatctttaaacctccctatccgttagatcaaattgttctttttagagggagaatctggactgtttattttgaattgcacaaatttggtcagaatataaatatatctagcacaaaccatttcttcttctttaccatttcagacttctcaaaaacccttgcttttaagtcgtaaaatagagcccttattcgcagaaaagctttgatcttgtgctcctttccattggtgaatgcaagaattttttgacggcttaatccaatatttcctaaagctttgttcaaaccattttctgaattttgaaccattgatccttgaatcgttccacccccagcctgacgaggagttcgacgttcaagccggcttcaaccaagtgattgactgggtgcacaactcctcggtagatttccacaacctctcatcctccaatcgtataccaagtaagtaccttgatctaagatagaaattttttagttcaagctaggtttaggatatttgatgtatgtgattggtgaagtgatgtttgtagagtcaaaattcttagaatgaattatgttgaatttatcctgtcgaggaaatgctaatgtcgcttgaacagtaaggatatggtaacttgaatcttgtagattattttcatgttcttaggactctaatattagggtttgaaccaggcagaatgaaccctttaaaaaattttggtccatttgccttcagattgcctatttggagttgcctgaacttcaaatggacttgattttaggatgttacttgaatattctttggaaattctcttttgggttcctaacctgtcactttgagccatcacctagtgaaggcagttctttgtaagtgatgggtccgtagggatctctccaagaaatttgaggggaggcctctccgataccccatatagtcatttggatgctgggtatataattgcttggttctttctttttgtttgtttttccagttatggatttgaatgaggaatttagtctcgatgtggtaaaccttacagaagcgccagtcatgaccccctctgaggaagtgaatgtagaagaagctctggctgaagttcctgtagaagaacttcaactagggcttgatttgggagctgctctggaagttggtacgtcttgggaattaacaaagtctaaggcgaaggggaaggccaaagcttcatcccctacaaccattgtctacaatgattccatatgagaaatggaccagaaagtaaatagctttaggtcatactgttggaatttattttaccaggatct

SEQ ID NO: 307424 - DNA, 1146 bp, Cannabis indica
agagcaaataagagtaaaccaaacagcagaggatctcttatagagctaccatgaaaagatggaacactgaagattgtaacacaatatgctatgacaaatttactttcattgagtgatagcattccaggaaaaaaaaacacaacaaacagaactttttatttttaatttattcaattttttttgttagttcacatcaggccaagtcttgtaaagtatcttattcttttggggctcatcaaataatgattaaacataaagattacagattagtgtctgttgatcacaactgccatttgtcatagataacaatcacaacatgagcaatattataggcaagtgaatcctatattctaaggaatgttgagctagcatctaaattcctttaaaacttacaccaaatatttccatagtttctcttttaagttctccagttatataaatgtgattgaaacatgatcttctttttccaatttaaacatgttccagccaatttgaaagtacaagattcacatataacaatcaaattgctatcggttatttccaacaaaacatcaccttaaacaaacctataacatatggtggaaagttgaagtatatctaaacctcatataagtaaaacagtagataatttacttgggaaagaaatgaacaaacttatgcacttacatcccagcattctttgctccttgaactcccgctggagcatcttcaaacacgataatcttatctggatttattgggcctccctgttgatagaaaacttgtgattaacaattgcaaccataattttattttacaaaatgtattacaaagaaataaaagaggatagcagaaccagatatagaatacactaaagcatatattattcaacataaactaacttgcttaagttacaacctcgaatctattagctgcagcaagaaatacatctggtgacggtttgccttttttgacttctggatcatcaccaagaacaacatgatgcatcaacgagaaaagttcaccatgttgttgtgttttcagtgcaaaatgccgcttgtgtgaactgcaaaatgtaacttcatatgagagccctttataattttttccgcataaaacatcaaaacatcatcttttttttttcttttcttctttatctactttttc

SEQ ID NO: 307425 - DNA, 1615 bp, Cannabis indica
tggaaagaaaacatcaacatctccttaatgttgctaatgccttgcttttttatcttatattcttcttgcatattggagtgattgtgtcgctactgctacatatctcataaacagaactccaacacctaacttgaaaaacaaatgtccttatgagatattgcatcgtaaacaaccacattatgatcatttaaaagcttttggttgtttggcatatggctctactcttgcagtttctagatgaaaattttcaccaaggtcacccccatgtgttttcattggctatccactaggtatgaaggcttataaactccttgatctcaatactaatcgagttttttgtagtagagatgttcaatttcatgagcatatttttcctttcctaaatgcttctccaccagctgattatgatagtttttttttcagcttcctactagtttcactcaagctgccacatctgctcccattataccagaaattcctactggttttacaccagaaattcttgttacaaaccagctgcctattgtttttacaccagtagtgataccagttccaaaccagctacctactggttttacaccagctgttggttcccctacttcagccctttctaatccttccacatctcaacatcaaaatgctcctctaaactctactacaagacctattcgaaatagtcataagggggagttgccacataatgctgtttgcaagctaaaaaagtccttatatggcttgaaacaagcacctaggcaatggtttgagaagttctcgagtgctctaattgaagagggttttcatcattcagccatggatcactctcttttcattagacactctggacatagtttcatcattctgttgatctatcttgatgatgttattctagcctcaaatgatttactacagctggaagaattgaaaataagaatgaataacagattcaaactcaaagatttaggggatctaaagtactttcctggattggaaattgctaggtcggcgaaaggaatatttgttttacaaaggcattatgctcttcaacttcttgaagaacttggataccttggaacaaaaccggttaatactcccatggaggctaacttgaagcttagccaagaaactaaagatgatccattggctaaccctacaatgtatagaaaaataattgggaagctccaatatttgaccataacaagacccgatttatcttatgcagtgaacaagttaagtcaatttctagtgactcccaaagccagccacatgacagcagctgaacgaatactacagtatgttaaagggacttctggacaagggatcttcatgtcatcaaagtctgaaatcaagcttgaagcttacacaaactcggattgggctacttatccagacactaagaggtctactacgaggtattagcatctttcttagagatggactgcaaatatccatgtcacatcttaggggagtatcaaagttgttatcatgagctgaaattagttaggggctttgctaaaatgagctgaattcagttagttagtttgcttgggtagttagctactgttgtaactaattcgatcttgtatcagtttatataagaaaacttgatcagtttctt

SEQ ID NO: 307426 - DNA, 1823 bp, Cannabis indica
ttgatttctaattataaaattaaaagtaaaaacagttttatagaacatgtttttgaaaaatatttttacttttctacttttaaaaacagaaaactgattaaaaaaatgttaccaaacgccacctttatttttaaaattttttgaataatttacattttacagtgtcaaaaatagatttgaaattttttaaacatacgtagtgaattaaaatatcaaaattctattttcggtactagtaaattaattattcaaattttttaaaaaatttacaagaataatattataacttaatgaacattatttttgacatataatttcaattataaattaatttaaaaaattataattaacacttctcatttatttaattaccaaagaaaaaatgttccgttgggtaaaattgaagtgagaggtaaccataaatgataaatgtagaacgtgaagtcagttgaaatttattactacatttggaagaaaaaaatgaaataatttaagcatgatcagatgatccaacggtcaaaaagtgctcttaaaatgacatttgtcaattgttgatagaaattaaatgagttccaaaacattattttatagtattattttgactaattttctttctttgtgtcttgtaggtgttgtattattggtgaaaattaaaagtaataccgttattcttttattataattttttagttaatttttaaaaacatgtattcgaatatattttttaattttttttatagtaatattggttatactcataaaatcatttttgtaaatttttaaaaaatttcgaataatttacactgttaaaatatgtttgaaattttttgaacacgcatgataaattgaaatattacgaattatgtttccaatactgcaaattatttgaaatttttctaaaatttacaaaaatgatattataactataacgaatactgccatgaaaaaaattgaaaaaaaatattttgacatacgatttcgagagtagaacttgactaaaagattataataagagattataattaacactctttaaatcaaaaacctcaacaaaaagaatgacaaaatttagaaagataatatataaatatttgatcatttgtctttacatatataaaaataaaaataattaaattccaaaatatacttgattaatattatttgttttaacgtaaataccttgagtttttaatcatttgggaaaatagcctttgaaaaaatcaaaaattgagaaaaagtatgtaaagaagaaagaaaaattgaacatataaagaaaagcaaattactggtgttgaaccgatgacctaatctctctcagagcaaaactaactcgaataacataattagaaacatagaacttttgtaaactagtgggaattagatttttgagtttataaaaataataacaaatttgttgatcacaaatttagttaataatgagtagaaatcaatacgacatgtcaataataaacaacaattgaacttaagaaaataaataatacaagcaattataatagcgtcacactaattcaatcccaaatagtaaaaataacctacattcactatatatttttattatgatgaattatttaaaatcagataaaatagatcaaatgaatttctcaaacacaagcgttagaaaaagaagaatgcatacaaaaaatagtgcttaatcaagagctttcaagcagataatgattggaaaaataagcaaaaattactcacttattcctatacaaaatacataaacttaggtgccgtttggtaacacttttgttttttaattttttaatcacaaaatgaaagtaaaatttttgttttaa

SEQ ID NO: 307427 - DNA, 2348 bp, Cannabis indica
atgcgcagcattatttaaaacacgggaaatccaagaaacagagcaatcagaacaaagaagaagatcatataatttggtaaaggagaaatgtgagcgccaagaaggggagtttcgatccatcaaacctttaaccagcgttgaattatcagagtgaaaatccaccccttcgatctgcaattgaattgtcatggaaactccaaagagcaaggcctccaattccccatgaaaggcatcatgcacgaccactttcttcgcaccagcagccataaccgctccagaagcatcaaaaagaaccacagccacggcccccgtctccctgttcgaggcaaaatccacaaaaccccgcactcttccaggtctaggcagtccccatctgtaattgaccacgccaaggcccgagacaggtctctctatctccgtagttctagtcttctcatgctcaaagaaacaagcctcaatgttcttttgcagcagcttaaaatccacaggaattccattatgataggcttcattacgacagagccacaatttatgatacattatagtaccataaagaaaaaaactagatagctcattcgagttaaggaggtgctgaaaaggcgggtggaggagccaattgaccaaatctctaccattaagagaggggagagcatctgatcgaaggccccagcgggaggagaaccaaagccttttcgtgatcgaacatccggagatgaaatgctcagccgtatctttttcctcgtagccacaaagataacacgggccagggggcttcccaaaaatgctctgtaactttgagccaaaagggagggcatcttggcaaagcttccataaaaagaccttaaaacgttcatggattttagcaagccagatttttccacaaatattatccttctcagcaaatctagacttattatagtcccagtaagcagctttcaaggagaactttccattcatagatgatttccaatagggaatgtcctctacggggagattattcctatcagaagcaatgattctcgcagccgcctcaggggtaaaaacttcttcaaccaatcgggcattccacctggaggagtcaatatcaaccaaatcattaaccaaattcagattctttatcaccggattaatatcgcccttgtgaaaaatgggaccatctccacattgccattgttgacaccaaaaatcaatagaggaattctggccactaatccacacactattctcaataatgaagtctcgagtagcccagatacctctcgccaccggggaagctctagagggcagaggggcggaaaggaacccttcgtttctgcaatattttgcattgatcactgacgtccaaagagctatattccctgaggccaaataccaacccagtttagccaacagacagaaatttatatccttagcacgcctaaatcccaaacctccgcaggctttgggtttgcagagactatcccaagcctttagagagagatatcttccttctttattctgaccagtccaccaaaattttctcacaattgagtctatgcgatccgtggtctttctgggcagcaggaaagttgacatagtatatatggggatagaggcaaggacactttttataagagtcatccgagccgcttgagataagagtttggccctccatccttctaaacggaagctaatcttttcaatcacaaaatcaaaatcagagcttcgacggccattgacaataatcgggttgcccagaaatttttcctcccccaacatttcatcaaaacccagaacctgaagaaactcctcacggcaactggtagaacaattttttgagaagaataatttggatttagacacatttatcctctgccccgaccaattgcagtatttatcaatagcttcaatgactgtttctcggtttcgttgatcggcttttagaaaaatgagaagatcatccgcatacatcaaatgagagattgaggggccgtcacgggagaaagagaaaccatttagattacccttactttcttccaacaagaggattcgggttaacacctccgcgcctataataaataaatagggcgagagaggatctccttgtctgaggcctcgtttgggatagaaggtcttagttaaaccaccattaagcaacagctgaaagtttacagatgacaaacagcagaggatcattttacaaaaatgatgattaaaaccaaggcaatgcattacctttaaaacgaagctccattccaagcgatcataggctttggactacaatagaccttaactctaaaggagcattagcctcactgaaaatacaatctgactttaaactagacgctcttgcaatgcaatgagcagcc

SEQ ID NO: 307428 - DNA, 2045 bp, Cannabis indica
tttccaatgtgttgacgacacaataaacattaagtatgtgaaaagggtttcagatgaattcatacattatgtacctataatcatgaaataaatcatgtgaaccatgcaacatcaaatgttatttctgatctatattagtaagtaaatctgattatattgaaatgagttttatttagggcataaaacccaacaattagtaacttcaattttttgaaacataattggtaattaatttagggactttatttagagtaatttatagttaaaatagttaaagttcactaatttataatatttaaatgtcaaatttttatttatttatttatttttggccaaaataccttttgttacactttattggcagttggaggtaccttgattttttttttttttaaatttgaagcgatgaaaaataatgagaaaatgaccaacaggtcgttacagattaaagattctggtaaggaggaaacatccaatagcccagaacttaagtagataaagctcatttggcaaagttgtgagcaacataattaaaattcttagaaacatacaaaaaatcatagccatcaaaagaactagccaattttttcagatcagacacagtattactaatcagtcaacagttgcaagcatcattaacaaagttgaccaggatctcagaatcacactcaataagaataaaattgtgtagaaagtgtctagtcgaaaccaaagctagacgacagactttcgcttaacctaacagagggttacaaaagttcaatacttgagagttgatccaaacgactgtcccaaaatgatttcaccaccatggaatcactaccaaccgccagattgcaattgattttaatgcaatccacaagaggagtggagcaaccaacaataacacactccagtgaagttgccatgagagagggagcaaactttgaaaagtaagaaaaaatagaattaataagatgagtaaaggagtgcaacacattatgatgaattttgtcatttctagctttccaaattgaattaaccataatggaggcaaacaagaaaacttctttagaatcaatgcccatattatcaagatacctaaggaatttgacccaatcccaacactttagattattctctataatcagaattaggccttaaggggaagcacaccaaagatggtacgccaattcacaaaataaggtaaggtgttccaaggtctcgttctctctaccgcaaagggggcaaagttgatcttctatttgaattctagcacccacaagctttagttggcaaagcttctgagagaatgcaccaccaaagaattttgtgatgttcatgaatcttagaattccaaagcttattccataaggagggagccactgaaataagaggagcatgacgataggcttggataaagtaagttgacctggtagaaaaggagccactgggttctttgagccaaactcaattgtctctcccgaccccacacgatttcccaccctttgcaatatttctaataggttcagcttcatagagtgagaaaagttttggcctgtccaatccccatcaaacccaaaaaaggtcaaccactactctcacacttctcaaggaatgccattaagtgtagggcaacggttattcctatacgaacccacagatccgtctaaatgtttatggtagagccatcaccaatacgtttacaagtcgcttcaagaaagatgtccatagactttacaatatttttccaaaaccaagaatttgagctctttgccttggcttccaataaagggtgattcttgaggtatttggcttttaattttaacgtacttaactacaatcctcgtgggatcgacctcactcttcgtgagtaatacttgtttaaacgatacgtatacttgtgtgttgcaaaataccacaacaattatacgtactgtcatactatatggagtctgttcaaaacatttacctccgcccagatacaggaaatgcaaaacacgtgtcacctgagtattctgccacatcattgtggaaaaataggataatagacttgttaaaaattt

SEQ ID NO: 307429 - DNA, 2092 bp, Cannabis indica
aggacctccttccctatgaaagggagctcctctagctctttttttacattaaaaaaagtacccataaggtcagagcatctctctctagaaattatagctttcagacttagctatttttcttgaaatcattctcgtgagaataaaaacttgaagtagacaaagctccattactatcgcgacacagggagtgaactactataacattcatctcgtctatacatacgagcaagttggctagttttctgcatcagcaagtaggaaccaacacaaaaaactactcccactgctccatggaataacatgaatgctgccaaccaaaatttacaagaaaagaaggtggtcaatgctccaaagcaaagctgctcgattaatctacaaggcagagttgcatgaagcgataagctgagtactcaggtacacaggcctacctcttagggaaggaaaaactgccttagtaattttgttaaccacaatgatatagtacactaggttcaccaaattttagaaggtagtttgtcagcagaggacctccagggatgtttaaatgtagagaaagaacgagcaagaggcgagaaggcaagccctcatggaaataaccttaggaatcatatcaatgatagagtttgtgggtgagagttccatgatgacaatacaaatcatcttgaagataaaatagttgaattgaccaatttcacaaagtgccttgcccgaaagcgaagtggggttgtatctaacttagaagaaaaagatctggaaccatgtgtaagaagaataatagaggcaccatttttgcacattttagaatgcctcagatagagttgtactgagaaaggacggaccccaaatcccacctgtctaaatatatttgactgattcaagtagcaaaggtaagtgatgatgcaaagtgcctctattttttgtaaactttattgaagtctatcaaagattggttgaagatattttattttgattcaattcataattggaaatatttacaacaaaagtttaaaaaacacttcataggcgtgaaggattatgatatggaggttagttcattgaccaatataaaacaataatcgagagaaggtctaaagaagtatatccaaaggatgatggatgtattagctaaaacttaggtcaatgatgagatgaagctaatggccttaacatcatcaatatctactggatctctgttgtggggagattggcaaagaaagaggtctgatatgttgtcagatttctcatccaaagctaaacgcttcataaattgagaagagtcttatgtccatgcttattgagttggttctactccgactcctaaatattctactctgactattgctcctcccagaagcattttcacaactcatatagtgtatggacctagtgtttcaagatagacatctgtgcaggctagtttctctggctttggggtggcacaaaccaaatatagtgtcgcccccgaacaaacaagttgacaaacagaagttccaaaatcaaatgtgagtcattccaggaacaaaagaggcacaaagaactcgaaattgagtgaagctccaaataaggagatgagtcatgaaccatgttattccaagtatatcagcttggtgaacactcgagaaaatatttacatagcaacttgcaacatggttcattataagaattcatcgattatttacaaaggtggaatgcatagaagggaccaaaataaaatatgtgaataccatggtgatgttgaagacactatgaatgggcgtgattatctaaaagatgaaattcaaggattggtcagaattggtcatttatctaattggggtcgaatcctaatcatttatcccaaataggcagtggctcatgggcaattatttgctcatggataggaaggaaccataaatcctcctcaaatggtaggttatcctcaagttctaggaatacaaaccctaggaattcaaaatcctagtgtatagtccccttatggggtaccgaatgcccagttacttaagcccatctaggctctcggtccaagtaatctatatcaattcattgatcgtctcagcttctcgtcttcaagaaaggtgcaatcaacttcctg

SEQ ID NO: 307430 - DNA, 1085 bp, Cannabis indica
tctctctctctcacacacaaaattttgttatattattttttttaaagagttaattgcggcataaccctccaatactttcacttttattgcacttaatctccaaagttaaaattttggcggttaaactcctaaaattaggaaacttttagccatttacagtgtcgatctattttaggtgttaaatgtcatgttggactgtccatgtgtacatctacgtgaacgcggtatacacatgacacaattttataggtacacgtaaaacattatttaaaaaattaaaaaaaaatgttaataaaaaaatatatatggtttttgataattttaaattaaaaataaattaaagagattatatgttatctttttattgaaaaataattagggtgaaaaataaatggaatgaatttgggaaaaataattattttcgttaaaagtttattttgaatgagaaaaattattttattactctaaattgatattagaaaatatctcgggttctaaaatatgaattggcattttattttaacatcaaaattttaatttaataaaatggaaagaaaagaaatagtattaaaacaaaaattagaaaaccctaaactcatctctatctccctttcttctacttgcggcaactagaccacaaaccagcccttgaaggcaccgatagtctaaacggatgacacctccattgcaactcttaaaaaaaaactagaaacctcgttatctctctccctttctcgtcggttgcaccctcactcaaactctctttctctccaagtctctctcgattttctcggtggagccaccctcctccagtactgaagggctaaacagaggccatggatgacctccacgagtcacgaaaccccaggaattcatgttccatgatccctttctcgctctcacaccctttctctctcatcgtgtcgaactcggcccaacatcagagggtgtctccagccatcgatagaaaaagtggaagccatgaatggcttcaccatcacctgaaggccttaaccccgtgatcctgatgttggaatttattttaccaggatcttagatcaactcacaagtatgttgtttaaaca

SEQ ID NO: 307431 - DNA, 2228 bp, Cannabis indica
cgtcttatgatcgatatatacagacttttcaaagtctggtccttggcctttttgttacacgcttggtgcagaacactgtcaacccattattactcagtctagacagccatcagcaactccaccactaatcacggatcgtgagaagggtaaggcagttatgactcatgttttgccatcccctggaatcactgcatatcaagttgctgctacatcttcacacactgaagcagagagttctggtgtaaacaactcctcaatgtctaccaatatgatggaaaaaatcatcccaccaatttcatctcatgtgttgccttctccttcgattgatataacacctgcatctgattatgcacttaatgcttctcctgatattactgctactcacactactccagaaattactaaaaaatcattgcctaacttctcccatcagcaatcggtggttctctcagtcgccactcctccggcttactaccacatgacaaaccactctatacttctgtcatagcgcctttgacatccactcctttgatgacatcctcatctttagttgtccactcttctgcaccaagcacatatctcttacgtgaacgcagcaaccagcaatagattttcatcattgttcaccaaagataatggtttcaacaaacagaaatgttcatcaagtccttaaacgatgtcatactcgtagtaccccactggctgattcaactaacactttccaatatcacatgtcgacggattctacctatgacaattcactggtggaagacctttctggtgtttctttggcgcaggctgaacctcagcctccccaatcaccatgatcctgattagttggaatgctcggggtctgggcaacccgagagcatttcgtcaactccgtttgcccattactaataataaacctgatgtattatttattatggaaactaagcttagcgtaggttctatatctaaatttcgtaatacttttaattttcaaaatgggattgaagtgcctcgagtgggattagggggtggtttgatgcttctatggaaatccaatattaatgtatcaattattaactatggaataaattttgttgatggctatgtctctgctcttgatgactcgattcggcatttctctggattttacggtgctcctaatgtatctcaaagaactttcacctgggaacttttaaaaaaattaaaggattcagccctactatttccttggcttgtgatggggggatttcaacgagattatctctcagaatgacaaaattggaggggccattcataatgattcacaaattgatgcttttcatgatgccattgactcgtgcactcttgttgaattagactttgatggtgatcgatttacgtggcacaataacaaccatttgggagcaaatgtaaaggagagattagattatggctttgtcaacgagaaatggatagacactttaccaattcctacggttgatcaccttgattttttctcctccgaccatcgtgcgttgaaagttatcattgctcagcctaacagattacagcaacaacaatttaagtcaagattcaggtttgaaaaattatggctaaaagaagatgaatgctcaagtcttatttcacgttactggagccaatcctgtggtagtgaaccaatttctcaagccctttgtaatatcaatgtgtgtgcttcacaccttcaaaattggcacatgagtaagtttggggatttgcctaaaaaaatcaagctttcccatgaaaaagttgctggtcttcataatacaaatagcactagtcctgaacactttgctacaatctagtgaaagaattttggatgaacttttgtctcaagaagaggattgttggcatcaacgttcgcgggtttcatggctacaatctggtgactcaaatactagattttttcaccaaaaaagcttctggtagaaagtctacaaacaaaatcaccaagcttcaggatattcatggtgtggagcaaacctctactgctgctattgtagatattattcagcaatacttcagtagcattttcacatcagagggtgttcacaatactgccattcgaacagttcttaatactgtcccacacttagtcacgaatgagatgaatgtggaactaaccaggcctttcaaaagaagaggatgtctttgctgctctcaaaatccatgagtgatgatggtagtcctggttttggatggaatgtctgtcatgtttt

SEQ ID NO: 307432 - DNA, 1331 bp, Cannabis indica
ttaaagtttacatattatataaaaatataatgtataatccaattcaatataatacaatacaatacaatacgatttaatacggcattctaaacgagctcttaattcattttgattctttgcttttttaccaccagaaaacaaagaatgagtcacacgtcataatactgtattacttgtccaaatatgatgcaactcataaatatataaatgtatattatagtgtacaaaatacatgtgaaataatcttttgatgttatcttatgcaaaactccaagtgacaatgaaactccaacccagtccggccactgcactccaaacccacaaccagcctcaccccactctagctatacccatctctctctacatatatatctgtcactgttacataattttatgtaggattaatgattttttttcatttttttatggcttggttgttcctgagaaagtggctagtaaaagaggatgattttgtgccatttattatatgtggatcagattattgaaatatatttttatagcttatatctaaaattattagtcgaattttgataataaatttagaaaagtcattatcacaatttcctagtcaggagtatatctatggttccacagtaaccattctaataatttaactctaatataagaccattagaactgttgctgactaatagctaatagtttaaactattgcaccgtattctatactaaactaactgatcaatctttttgctaatttatttatctttaaaaaataaataaataaacagattaaaaaaatgcgggtcgggttttataacccggttcaattatattgggtcaggtctaactcaccaagctaaataaagtagtcgggtcgggtcgggccaggtccgaccaaagtaatattgggtcgggtctgaaggattgacatatttctataagtattgtttcttttccattctattctatttcattacatccaaccaaataccccttaatttaatttaatataatttgatttgtgtgtaaattaatttaattttcattataatgtttatttgatacccaaattaattgcaaatgatattggatctaattaccgattttcttaaggagtcaattgggttccatccatgttttctgtacaccacgtagctaattttgttggttatatcatcaagtgccttgaaacatatcttcaaatagtcgggtaactgctctttaatttcccaactgaaagtcatccataaatttaattaattaattatggtttatacatatatattaataaaaagggtaaataccattttagaccctgtgttttgcaaaaattacagattggaccctgt

SEQ ID NO: 307433 - DNA, 1258 bp, Cannabis indica
tacaattagttaatacctgattacaataaagttgggctctatgttctgatgccaaataaactatttcttctttttactaccacccgcttttgctttcttgttactgccagctttagcagcagtgttcacaggtgtttcctgtaagaaattaggcataataagttgaaagttaagaattgacagattcaatagatgcagagtttgctgcaaacaaggaaacccaaggagatacaagtataccagaaataagagactgttgctgttacgctataacagaatcaaaattatttgacaaaagaggcttattgatgtggttcgccattagttttaatatggtgataaagttatttctgctaaatactcaccacattcttgagctcgaagggctagagttataagcgagatttcacatcatcccattacttaaagtacggtatgaaaataaagaaaaaaaagtcaaattgtgataaaaatgggacaatgacaccaccattttgtgctaaatatatattatattgcaagggaattcagtaaagagtggctttgaaggtcaccaggatttcaacttcaacggacaaagcaaacacctttggataatgggatagagtgcctgaaacccagatctaatattggcaggctcaaaccgccaatgatcttggtcccgaatgaattagatgctttcaaagagaacaccttatgcttcaaggctggtttaggaggtctaagcacacatttgcttccctgttatccaatgtagtgacaaattatggtaatcggtcagggtgagacttctagaacatttacggaaaaagggacccttccataatgattttcacatggaagcttaaaagttataagacctttcaccttttcttagtcctcaaaaatagggtatagaacattcatatttcatgaaaaactaggcaaaagctcaaacaaatgttttccttgaaaacactagcaaagagaacaaaatacttcataatgaaattagatagtagcaaattttgcatattagcgattagagcaaaaacagtgaataaaaattctcaatagctgggcgtatcaccccacctaaggagggggagggagagaaagagaggcaggcaaataatcgagatataaaacaagatcaaatctgcagtatttaggtcatatcttaaaggtatgagccagctatgtctagtagcataataacaacgtgaaacagaaatgctaatgtaaagcattaaaaacataagattcttaatcagaatat

SEQ ID NO: 307434 - DNA, 598 bp, Cannabis indica
aataatttaaataaaaatttaatagtatttaaattatttttacataaactattgactttatgttatcaaagtagttaactaaaataaatataactagataattatttgtaacaaatcaaactacatagtctcccataattatttcaataagtataaatattatctttttaaaacagggattcttattttaagatcctaataatatttggaaattaaattttaatcaaaaaaatatatataaaaaataaaaaataaatattccaatatttaatataaaagaaaaaaattatatggaaaaataaaaaattaattcaactaaaattttcataccatacatgaatattttcttttgttctattcatactttattatttctcactaaaatccaactttgaacatagtcaaaataaaattgcacaaatctcaacatcagaatagttgcacaacccaacaaaacaaaccagcttaaattatttaagcatggtgttgatcaaatcaaataatgattgataattattgaccaacttgctactattttatggtgtctagtatttttttagacatgtcatattgtgattgactaacaatactttttaaa

SEQ ID NO: 307435 - DNA, 2065 bp, Cannabis indica
atactaactttttgagactaaaagtttcctcatccttattttatgcctaaggtgtgcctaaattcgcatgagtagataataaattatctagaacaagggtttacttaaattagaatgagaaatatttttagcatttatatttaaattgtcatttttgccattacaagaaatatgtaatttattattaattgctaaatttatctccttatcaaaattattcaccaagaaagatggtgattagtgttgaggttttgactttcctttattaatttccaatttcaccaaatcagataccaatgaggaggaaacatcaatatccttaccacttttttcattaacaatcacaaaaataggaggtgattttgaccacatatgtggagatttaccttttttggaaaatccaatcgagcttcctccacaagaaaaatgcatggaattctaacaaccagccaccagtcgtgaagaaccactactgttgttacccacaacctgacattattacgatgaggtaccacccttctccataccaaacgcacgagataccttctcgacatccatacgagacctttttgatgtaataaacatggatagggtttgcccaaataaaatttccatacttccttttatgaccacacgaaagtgaagctggtaaagaaatgcattcccgcaaagggtttctaataatatcacaacaaaaatagagatcgggggacgctcatattttagagtaaatttagactttttctttcccttaatcaaactaactttcatttgtttaggaagaaattttgtaatatcaatttcaaattggacacacgtaaaagactcccaaaatagtctttcaatgagtgctcatcaacctgtattaccgggccaaggaggcccccttattccattcccatctccacaatcatacaaaagataggaacaagatgaatttgaactcagaatttgactctatcaaaggccaaagagttataatcacccacacatgaagggacttccaaagccaaaaattgatgttccaataaccacgctccatcactgaaaacctatcgtttatccctaaggtccaataatctaaacaaaaatatattatttcccaaggccttgacagtcgtcaaaccattaattttccaaaaagcctcaataaattgcaacatgtgctcgcccgagacaacttttgaagaattcagctttcccaccaaacgttcacccaacactactttgtccaacgtcaatgaaagccgccttaaaaatacccttggaaaaaataatcatcacaatcaaaagaatcattcaaagctacccattcatcacgatccatggcgagtaaaaagcccttcaaatagccaaacctcaaaccactagtattgacctcaaaaagttgatcaaccgacagcggtattgtatggatctgatgcttgccatgtgttacacaaataagaataaacagtaaaaaatacaaagatttgttatagaggttcggcccccttatgatagcaggtaatgacctactccccttttcgggttgtattgatacctagagataatactatttagatcgttataggtgggaatctgatatagctctctataaggatacaaagtatgaatcaagtaggcagatctctaatgagagagatgaacaacctcagaggcgtgtgaaagatgaagtgagaagagagaaagagccatattgggcgtgagctaaagagagagagaagagagagactatggctttcaaacttagagctatttggaggctaagtgacttagaggccacttaggtttctaggctagggttaaggcctttatataggaggcctaaaccattgattacaagtttaaatcctagatatttacataggtttttagataattacaaaagactaaagtgccttggatatcgatattattcagccattttgttcagcttttagggtccaatttgcagcccatgccttgtgtccacattttgagttgtacatagaggcttgcgaggttaatatgcccgcctatagacctttagggaagtctatttggaccttctgttttgttaaat

SEQ ID NO: 307436 - DNA, 2574 bp, Cannabis indica
attggtgaacttcgggaaaatttttggtgttttctaaccctaatctttctggttttgtgtgtgtgggtgtgtttagatcagatcattctacatctgatctttggtttgtgtttaatctgggttttctgggttgattgaaacctagcttcgagtttctcagagagaaactctctgctagggtttcgaggaaatcagagagtgagggagtgaatgagaaggttctcgattccttccttggttttgttcaaagacaaaacgaggccgttttggggactaactttgaaaaatcaaagtgaacagggaaaggtcgaaattgaccttaaatattgattggtttgttttgttggtgtagggccaagatagtaaattcctatcttaaatttcctacatatagtttttcgtatcgcactagatgcctcatacttctattttagttataaaaagaaatataaattaataatttagtgtcccgcattgtgagacataaatctcaaatttttagtgtctagctaggatgaggaaactctacaaaaagtcactaattaaaacccaatactatatagtaatgtcactttaaactcatttacatttacatccctatgattatatagttataatttcataattacatattcatttgcttacctaatttttcataagtaattcacaaagttaagtaattctttttttcatcttatagtcactaaaaatgttgttggaacacctctgctcagcagaactgattttttctcttttacaatgaaaaatctggattataaaaataaattgttttgttttagagtttagaaaaaatttctaaatttcaattcagcccctctcttggtgtcattcttctgctaaaaaatctaaccaatgagagtaattaacatacttacgaattcaaattttactcctctaaatatagtatatggttttgcttctctctctctaatataatagtttttaagacaagagtaatatatctacccctgacctaataaaaattaattaggttgtttaggcttttaataaggtaaaataaatcattataatatgtcataccaattcttttggcttggctcactataatacaagtttcattctacttgaaataatattttataagcaaaagtattatcgactaattaattacaatacagcatacatcttataaagaaattaagatataataatgcctcatcacaatagtagtgacatttaggaaaagatttgtttatgaataatcatataaaaatcttaattttttttttttgaaccttaaattttaaatttttagaattggtttctaagtgttattatatatcttaggatcatctcaaaaaaaaaatcttagaattaagatatatatatcaaaataaaatatccataaatctatttttatatagcataataataataataataataataataataataataaaggagctatcaacttattgtgaatggcaagttggggaaatatatatatatatataatttataagaaatccatgtgtctcatgctttgttttccatgtcttctttattatattatatgattttgtcatgaagtaaaccatcataatcccttgattaataattttatataattaatttcttccctatttataggtgccatttcttgcatgttatatataaccatatataacaattgtaattactaattaattatcattcccaaaatggccatgcatgatactcgtagagttacaataagtgtggctttgtttgttttattgggcttggtaattggtacatacgcctctagatctctctttgatactcacgaaagtggaattaacggtgcaacacaagatggagccacaacccaaactgtagtccgcgaagaaggccgaggacaagcccttggtggcggtcgcggtggcggcagccgtggtaaagatgaatatgtaactaatgatagaagtggtggcagtatttggtaatcacggtggctatatatgcttcatgaaatataaaactttgtggttttaaccgttcggaaaagggcttattcttactctttagttagtactataaaaaataatagtacgagtaagacatcatattatattagataagatcataaatgccaacttattgttgtgttcttaattatgttttcttctatatatatacattataagtttatatataagtacgtgatttgaagttgatcaaggtttaaatttgtgttcactaatataaaatgttgaatatagataatgaataaatgataatgttttatgatccttcctaaaaaagaatgttatattgtgcaccctatattattattagagataactaataatgaacaaaatttatatttttttttagggaaattgatacaaattaaaataacaaaagtaaaaaagttatacaactactgaagaatttttttccatctatgaaagtttattatttatcttaaaagcatatagagatagggtaaattatggcataaatacttaatgtttcagattttatacatttaaatatatacctaatgtttatttttggaggcaattacctagtgttacaattctctta

SEQ ID NO: 307437 - DNA, 1235 bp, Cannabis indica
ctaagaaattcgtatttttgtatcgtaatttcgtacttttcatgtcgtatcatacttaagcctatattattcgtgccgtacctaaactcatatttattcatgccatattatacacatatttattcgtaccgtgtagggctcaagcccttattcattcgtgtccgaatgtacagctttaatattgaatacagaaacaatcttggtaaaaatagtctaaactttaaggagtaaaaatccaggcacaccaaactagtgtcctagtcttactccaacttatagttcatcttaacaaacacgagatatgaaatgtttaaaaaaaaaaaacacgagatatgaatgggtttctgtttatgcttatatagcaaacgagtatgtactgtaaagtgtaaaagtttatacagaaaaccactttacagagacgggcaattttattaatttttttctgcccaaaacattcttcatgcaaattgattattactgtccaaaagaaagaaagactagatgagcagtcaacataacaggctagagtccccactggagcaaacccttcagcttgagattcagatatcagcttcttttaacagattggagatgagttcccgtattagattatgatgtataaagaggagttggctctaccttccgcttgatcctataaaagaaagtcaagataaaacaagtgtgtactcaattcaaacaaaaagtaaagcttcaaaaaaggtaaagctaatgtaacatgtagaaacataaaagacgaaggcttcagatacacacaataacaaattactgataatgagaactagaatagccggatgtcaagtatcaactcaatccccaacatcttaaagaaagaggcataaatgttaaaggatttcacagacgccgacaagatgcttaacaatataaatatacatttcttagataactcactcaaaataaaaagcagaaaatggatctgctactacgcaagcttacaagtaacatttttcttaaagatggtaataatatgtttgcgattggtgcacagtaaaaccaatcattttcttggtacctagaaaacaactcagctggtttctttatagtaaatatttgggaacttgtaatgtgtaattaccaattatcttgagcccaagtgcaaccctccgtatctacaatatgcaagccataggcatgccttgatttagaagactggttctctaaactgttgggtgcatgaaaaaaccaaaaaaaaaaaa

SEQ ID NO: 307438 - DNA, 1658 bp, Cannabis indica
aaaaatgacaatggagaacagaaacagcaacaatggagaaaacttcaaactagtgggatcctctaagttcgtccgtaccaatcccaagtccgaccgtttcactgtcaagcgattccaccatgtcgagttctggtgtggcgacgctaccaacactgctcgtcgcttctcccgagcactcggcatgcctatggtcgccaagtccgacctctccaccggaaacttcactcatgcctcctacctcctccgatccggcgaagttcaattcctcttcactgctccctactcaccctccatcgcaaccgactcaacctcttccgcttccataccgaccttcgaccgctccactttcctttccttctccgcagctcatggtctcgctgttcgagctgtagcagtcgaggttgaggacgccgagtaatttgccttctcgaccagcgtggctcatggagccacgccttcctctcctcctataactctcggagatggcattgtcatctccgaggtatgtctctatggagacgtagtttttcgctacatcagttacaaagcacaggagcccgatcactcgggctttttacctggctttgtaactgtgagcacggaatctgacaaactgttagatttcgggattcggggaatagaccacgcagctggcaacgtccccgaattgcaaccagctttcttgtacgtgaagaaattcacgggtttccacgagttcgcggagttcacaaccgaggaggtggggacaagcgatagcgggttcaactcggcggtgctggcgaacaacaacgagtctgtgctaatcccgataaacgagccggtgtatggaacgaaatggaggagtcaaattcagacatttctggagcacaacgaagggcctggggttcagcacttggctctgattagcgaagacatatttcgaacgcttaaggagataaagaagcaaagtgggaaaggtgggtttgagttgatgggtgcaccaccgcccacttattataagaatctcaggaaacgagttggggatgtgttgagtgagactcagattaacaagtgtgaggagtttggggttttggtggacagagatcatgagggtacccttctacagattctcaccaaaccacttggagataggtacaattattattaatttgggctataataagtcttacaattgattaagcgtaaaagcatgcacatgtgttacacgtaaccatgcaaacaactaattaatctcctaattcaaaattctgatggaaaaattatctaagttctaattctaattgcaaatcttagttttacatgaattatttgttacatgtcaatttggaatatttatattggtttaaataatttaagtatattttaataaaaaataaagagtttagtggccaattagtgttttattattaaattaaaataatatatataaaccaatactactaaaattgcataaattaagagtgagatactgttacaactggttcaatattttaataagaaaattactaaataattataagacatatcacattggacatttaaagtggtaaatagcaatagtagatcttcttagtatagagtttagctcttgattgcgagtttgtaacagtcagtagtctcgtgatccgtaaggggaaacactgggtaagctgtgcaat

SEQ ID NO: 307439 - DNA, 1117 bp, Cannabis indica
catacccttcttttttttttgtttttttttttgtttttttaccatcaaaattcaatttcttttataataatgattaatgaatttgataaaagtttacaggggtaaatttgagttcattggtttgggtctgagggtccggatcgcagggtctgagtctaaggtttggatttggatctggagttcgagtctcgattcaggttaggatttggggtacgggttgggtcttggggtctgggtcggggtccaggtccgggtttggggtttgggaccacgtccgagtcaggggtctgggttcgggtcgggggtccaggtctggattgggattaagtaactggttcttgtgtttccatttatcttttgattgttttaggtgtcttatgtttttcttttaatattttagttagttatattaaaaaaaattgttttctatgtttatttaaaatgtttaataattattgttatccgtgtttttgtaatcatgacacatggattttaatcaagaaaggttaaagagtcattagcttcccaacctcctcatctgatgctctgggaataaggccataactttgtaggaagaatcctcgagatagggagttccttgactgatagcaacacgaagggtatctgtaagccctccgttccaggaaccaaagtcgtctactcccaaagagtatggattttcccaaaggggccaaggcaggctatacgtgtcaggctacggacctagtgacaaggctttttcaagtacgacgtcagaggttgtctcccacaacacactatcgtacagagcatgtgtgtccttgtgtacatgaccaaatgattcaacggctagagataaggaaaattcaaaaaaggagaagccgtgggaagacacgagtccgaggcctagcttgtacgagctgacacccttaaatgccatatggaaaaaaatgggcaccgcttagtgcctttttattataattattgggtgacttctttattttattttaataaaaaaataattttattctaagatattttattataataattaaaatatatttttaaattttgatatttgcagttagcttagagttatatgctgtttttaagagtgttggcctttgggtctcataat

SEQ ID NO: 307440 - DNA, 1174 bp, Cannabis indica
aaaaaaaataataataatattaacgtatatgcaatctcttccattgataaataattgtaggtggagaaaccaagcaaaatcctatgaagaattgtcccttgtcaacttttttttgactgcgcacttgaatatgacgatactgtgttttaaactttgactatgctgcgattattaatggtggcagcgttcacatgatttgaggtatcttcttcattaggatattttatatattttaatgggtgcttgcttccatcttgatttgagattctatgaggttaatttgcttaattctgatttcacttgcatttatattttttttgttatatattcatactgaccatggattattgttttttccttttgcagttattttgaaaaatatggagaagtcataggtcgtatagtatagatgcttcttgaagaatttttaattccccactccactcacctaccacctatatcacctatattacatatatatcttcctctgtttctaatgctttaattaatccaaaactcataaaatgttaaactatattttaaaaatattatctaacttatgtaacacaaagttcttccatacgttgtgactcttagttttttagatatgagaatatttttatatgtgcaagctctttgaattgaggcagagacttcctagcacaacttcaacaagtttagatttgctgtgatttgcctttttaatacttacatatatcttctctcattgttcttgcatgctagaatttaagctatcattacgaactaagcaaattttatttgttgatgtattcatatattaagttagaggtgttgactgtcatactcagttgcatttatgttttagttatctaaaaaaatatttgaatattacaatctttgaatctttctcttttcacttttaaaaaagagttatgatttatgagttcaattagctggctccattactcttcaaagtttggtgatacaatatgaagggattaattcccaatgttatttttagtttaatttgtgattagtttcactttgctgagactttactgttggtgagtggagaattattataaagaaattgtcaaatatgttattgctttacttattagattgatttcattatcatttgatggtgagggttttcgggaatccttacataattagcataacacacagaagc

SEQ ID NO: 307441 - DNA, 2741 bp, Cannabis indica
tttctttttctttttctttttttttttgttaagtcttttttctttttcatttattttctctttgattcatcttcttcatcatccttgagcacgcacagacccaaatttgttcaaccgacaattttttttttttttttttgtaagctctatttcatatcttctttctttcttgctttccaccaccactgatttgaactccacactggaggttggctcaccgaacttcgaaaatgcccagggtaaagccatggagggtgacgtttcgacaaaggggatagctacacacaagggccaaacatcacatagagagagaagcggtagatctgttcagatctcttgctcgcccaagtcatctcgacgtcaccgattccctttctctttcccacctttacaactacgtctccactactggcctcatcttcgacaagaaaaaaagtcacagtaagtcgtccttgtttgtctttgtctttgtctctctctttctcagctccatctcccttttctcactcttttttattttcatttttatttttttacagatctggtttgtggtgaaaaaataaatgtgggtttaattgattttttctttactttgtggtgaacgacgaagggagcttcgagaactgcagggcttagggttcaaagtccgacgaaggccatagtggccttgactccagagaaagacgaggaggttcgtagtggcctccatttttcacagtgatgtttcttcgacaacggaagaacttctcaggcccaagaaaaagattatgggcttagagatttaatttctttctacacttttcttccaatctccatagccataggaggattgaatttgaaaaaaagagagatgaagagttgggatcgggtgttgctggaggttagagaagaaggggaaaaaagatataataatactaatttttttatgattttaaaatgtattttttatttttattttttaaaatttaaattatttttaattaaaatttttatttggactaataaggcttcttcaacacgtgacacttttgaataagttaacggtgtagttaaatttaagaccaacggacttacaaagagtgtgaccttaaggattattgctggctatttctcgcgcttgaagactaatttgtaataaagtgaacattttaagaatttttaccgcaaattacctaaaatataacatttaatatataattaaatcagatttaaataaatttaaaaatatcaaatgtgatctaataaacattcatattcttgtgaaggaattacaaaaagtaataattaattaatgcaatttttcttttattttgttcttcgttgtgtgcatattcagtttttattttattctcctgaattttcaaacattctatatgatatatatataaatattttaaaagaaacactatataatatgatacatattacatagttctcaaattaaagagctccgccattataggagaggctaactctatataactagtaaactcattagttaaaacctatctaacaaacattatggacaacaaaattaaatcgtttactaatcttatcaaactgacaatcattcaaacttttagataaagtcttacacccataaacaaaattatcaatctcccatatagacatatcaacattgatcacaattgaagagtcactttcaatttgtagcatcgtgtcgtgtcatgttcaagtttatattttttcgtgtctagtcatacttctaaactcgtattaatttcgtgccatgtcaaaaagttcagtctgtatttataacactactttcagttaacgagtaacacccaaatgatctcttacaaccactgttgccatcatgaactcgtcctcaacttccacatcatagttaatatagtgatagatactaaagtaatagttattatgagttatattgtttcgagttgttcacattgtatccacaattaatataatataatataatataatatatatgattgtttatccacttatttatttatttatatacgagagattatttggaagaaaattgtggtccaaattagggttaagaatttgagaatagttttgcgtaaattttaagttaattggcttaagtagttatttttgttttgttttctaaggaaattcttcatgactacccatatataagttaattgactttgtagatcactcctatttgatatcaacataaactcttattagtttaatttaataagcaaccttatatattttaatttaataattataaaaaatcactagtcacttctaaaatgttacatggcaatagtattatgggctaatagtgatgttttttagttgaaagcacatgatcattcttaaaaatgccaatattgttatatttgactaatatgaaacattttagctaatttaaaaaatattttcccacttgttagggtctgtttggaaacaactatgtaattactatgcagtataattactagggtagtaattacactgtatagtaattaaattgtattttaaaatacaaggtgtgtttggatgtcaagtggtaattaaatgtgaattcctaatatcatgtttgacatgatagttagtaattacacagtaaattaatattataatatttaaaaataaatttcatcaattaataatgtataaataaataataatctcttcataaaataaagtcaaaaactataacaatttagtagcaaaatatttaaaataatttttttaagtactatctaattgctctt

SEQ ID NO: 307442 - DNA, 1010 bp, Cannabis indica
tcaatttttcaactcgatgcattttatagtacatgaatactctcactattattaggaatataaacaacagttaaaccactttatataaatttatattatatatatatacacatgaaactttggtagaagagccataatttagtgagaaggaaattatcatattacattaaaatatgagttaagtttatattacagttcttattaatgggtaagtttatattaaaatttttaattaaaggtatgtttttcattagattttttatgtggttcgatatttagaagaatttttaatttaattttttttttcataatggtatacattatagttaaataaaattttattatatttttttgcacttgtgactattttttttaaacacgtagtaaataactgtttgaactttatttttgttactgtaaattattcaaaatatttaaaaaaatttacaagtactcttaaataaatataaaaatacacaatcataaaaaattagcttttttttttttttgaatattgaaggtctacacaaatttcaaaaaaatccaaaaatagaatttcaaattttcagaaccccatacttaatttgaaatatttaaatcaacattttatgtaatgaataagaaaaaaggaaagggaagttgagatggtatattagtggtgcatttaaatttatatacacataatgtttgccccaaaactcggtaacccaataataaatacaaaagtgatcatctctctctctctctccccagtttttgagcgaaattgaagcaaaatgtgttaaggttaaaatgtccttatcaacttttctaataattacagctgccttacaacacccaatctctaaacatcaaaacatatataaaataaatacatatcaaatatttaatgtataatatccacgtatatcatataattagattcatttgataagattgtattatattatagggatatttataattgttacaaatataacttaaataaaaaaaaaaataacagtaaaata

SEQ ID NO: 307443 - DNA, 1948 bp, Cannabis indica
tcattaattcacctcttgattggctaagatctcgatgcaggagccatgggtctttgaatgcccaaacttgtgttccatctccaatggatttctaaagaccacatttgagcaaacccaaaccccaaatcaaactcaaccaaagataagatgaaccatctttttcagtggcttctacaatagagcaatttggaaaatatttatgtttcagaatttgggtaagcaataactctgggtatagaagtaatctccacacttatttagccaaaagagcttgattaaaaagtttaaaatcctaaaacccaagctcgcctatcgccttaggctgacacaccatttctcatttcacttaaagaatcttcctttgatcaccattcatccccaccataattttcataaaatggacttcaatgttttacacgttgccaaaggaagcttaaggacactcaatttaagttgtaatagcttaaagaatagatttgataagtacctctcttccacaagtagaaaagaaactttgcttccaccctcgaacacggttcctgaccttctcacagatcccctcaaacatctgccttttgtttctaccaattaatggtgtctcaaagatcgcaaccctccaagcctagacggctggatatgtaaaattttcaccaagctttgctctcagcgtggttaaacattgactttgcctttacctagacatggaagcctatctatgagtcgacaaactctataagaaaattttaaaaaatacaacatatatctgatttgtaattaagcgctcatacactcaaataccataagtttgctaaccgcaacaaatatgtataaacagatatccaaacgttcatacgaatagtatgattatccataatacattcctaatcttagtactcttatcatactgggattggtagaattaatctatactattcaatattacccaatatattagattttggtatcttagtgcaactctacaaacacccataccattatctctaatctggtagctacataacaatataatacatgtataataaacatgtgtatatgtgtatttgaatacttttctaatcttaattcttgattcaggtttgccaattaaccttagtgaaaatctgttggggatcggaggccctattggtaaacttgtaagtgtctcactataatactttcaaggtctaaaattcattatctgaagtgtttctatctataaataaggtgaaaataccttaaataccctaaaaatataaaaattgaggtaccccgggaatcctgaatcgggaaactgaatttacaacctagtgctcaaatattctgggcactgccagagcatcggaagcccaattctaccattcaggtgcccaaatctttgcagaaacctacgactcaaaaaatttcgagttctaacttctctaaccttctccaaatcaattcaaacttcatagaatagtttaaaaataccaacataacatatctcatagctcaaaacatgctttaacttaatactcaaatttcactattaaagctctaagcttttaacctaaagcttcaattcatttccaacaaatactaggacagtaatttcatgccaaacaatcaatggtattatggccaaaagttgttcttgacatcacaacaatccactctcagtcaaattacaattagcaagaaatcaaagaatttaaaattttatttaattaataaatatttttttttcacttcaaacttgtttctcttctactaactcaactcttcaataataaatggcttctagatcacttgcctaaactcaaatttagaaagaaaaaacacatatttaagttggattttcttgaaagggggtttggccatgagagagtttaggagacaactacaagaaatgtcacttttgccagcacattttcgtgctggaaaaagttggtattgcgctggtaaaatagaa

SEQ ID NO: 307444 - DNA, 984 bp, Cannabis indica
tagtataaattaaagtttaacatagtattatataaaagtatgatatataatccaattcaatataatacaatacaatacaacctaataccgcattctaaacgaacccataatgaatgtaataattaaaataagttcaaaacaatcgtgtatcttgtaaaaattatacgagagagaaaaattgtcaactcaatgcatacatattcgaatcacatataattaagtgtataaatgaagtagcaggattcgaagttctcccaaatccaatatcatcatcaagttggaagcaaaggatatgtgctgtgtatattgtacttttttttttcactacttgataaacataacgtcaacccatatacctaaagaatttaaagttatatatatttaaacaaattatatgacgtcgtattaagtgttttaatattcatcgaaccacaattattaatcctcaaccccaccaacattattaataaaaaaaaatacagtttattaaaatgttcaaactattgaaaacaccacaccacttataacatatgtaaattataaaataatatatttcatgggatttttctcttttagatattctaggtagatttgggtgctaataattcagataccagaagaatattttggttatgttgcattcaatatatatatatatatatatatatttatatatatagtgatattcaaaaccttagagttggctacatggtatggaaaatgaaagctatatgtatatataaatttcatatatacgtattcatatatgccgactgaatcagaagctgattcttggatagctacgacattgacttaattgagagcctttattaatatccatagaaccctatccaaagtgtgtctgagctacattctccatatgagggccaagtatttttaattatttttttaaattttgtttaattattattttatatatatatttttattttttattaaaaattagaggaaattacactctat

SEQ ID NO: 307445 - DNA, 4013 bp, Cannabis indica
gtaatgggttttatttagggcacaaaacccaacaaaactttgcacgtccttatgcttcctggggaaaggcatgtcgatgaatgctataatcttcttcaagtttgcctcaattcctcaggagctaactataaagcctaagaacttcccagaggagactctaaacatgcactttttgggattaagttttatcttatatttctagaggaccgaaaaggcctcctcgagatctgtgttgtgctctccaaaagttttacactttaccagcatatcatccacatatattttcatattcctccctagttggtttttaaacatcttattaaccagtcactaatgcatggctccgaccttcttcaacccaaacgacatcactttgtgacaatatacccttttatccatatggaagctggtgtgttcttgatctgcaacatgcattttaatttggttgtagtcagagtatgcgtccatgaaactcaacaactcatattcagaaatggcatccaccatctagtctattcacgaaaacgggaagcaattcttgggacaatctttattaaggtttgtaaaatcaatgcacattctccacgtgccattaggtttagggaccaaaactgggtttgccaaccatactggatataatgattctcagaggaagtcattcgtagttagcttatctaccttcgcttttgctgcccgtgcccttaccggttctaagggccttcgtttttggcaaactagtgttgcatcttccttaatgttcaagacatggcagattgtgttggggttaatacccatcatgtcgaaatggttccatgccaagacatcctgattttccttgactacatccacaatcttcttcttcaccattgtgcaagtttttccccactttgatggtcttagtgggatttgaatcgcaaatttgggcttattcaacatcgtctagtggctcaattattatttctatccccactatggggactaactcatcttcaaaatcctcttggatggcttcaacttccacttgagtatccattatgagaacaatattagcttcctcctggacaatgaacacagtctgggcaaaaacattgtagcaactccttacacttttctaatctcccctgaatactccaatgcacccattgtaatagggaaacttcatgcacaagtgtcttatagaggttactgccctaaagtccattaggatcagccaccctagtatggcgttataagttgtgggagaatccactactacaaaggtgcaatgtttgaaggaaaaaacgttgttgtctcccttgagcatgattgggcgctggatttttcccattggcatcagagaatctccattaaagccttataattgaattgggcaaggtgataagtcagccttcgtgagcccaatcacttggaatgcaaatttaaacaagatgttcattgagctcccattgttcaccaagactctagaaacccttttgttggtgatacaggcctcaatgactaaggggtcattgtggggaaaatgtacatgcatggcatcgtcctccatgaaagtaatgggaaagttcatggttcgaggatgttgggctggagactgtaccacttcacatgtttccccttctctgtctaattaccctaattaccttttttgggaatttctggtgcttcctgcaatgtgcggtcctcctgagatcatggccacatgtctgcttactagtggaagagctagacctggagggtatggattccttggtcccaaatttagtattgccattgtaacctaagctggtagagcaggtagggccgaaagttgtgatccaagagcgtgagtgtgacctactccttactgagagtttatggtaccctactatcccgaaatgatcaacgatatatgaacaactccctatacaagtcagataatgggatgcaggaacattgacccaagtgttcggctcttgccaacatctcgatttcatcctttaagtagccacattcatttgttctatgtcccacgtctccatgataatcacacctcttgcttggatctcttttaaacttttccccttaaggcattcttaggggcttcctatagcaaaccatattgcaggttgtcgtgtacacgttttccctaatatccattaggttggtatactatgtgtactttggctcataatccttccccgacttctgaaaaatttcaatttgaccctggttcttttcacttctcttactctcgcaatgacttacattttattctggaacttctgtttgaggcttcaattgtctgggataaattctacatccaatcgatgctactccatacctaaaaaatgggtgtgggtgtctgcacagatgcagaaggtccataaaaagtggggtatattgagaatcgggaataggggcttgtggagcaaacccttgagttgatatgaaaggggttggtacaggagggacttcaaaagcctgctggtaagcatcttccaaatcaataaaactttatgtcctttccatcaactcagacaacgtctcaacccttcttctttgcatccctcccatagcagggagccaactgcgatttcagattgtaaggccacaagcttcatgtcatcagtcacttttattttagttgatgcctccatcatccattgaatgaaattctttaggctttctctggcctgttatttaatgttggtgatagatcccattttcgtgtcatagtcgcagacatctataaattgcttccaaaaggcagactgtaattccttctagctatgaattgatccgggagctaaccttttccatcagttcttagtggacttagtgagggtcagggagaagcataagcacttgacatcttcacctactcttgccacctgcatcattttgttctacatggccaggtgggtcttcggatctctgcactaatcataaaactctatctagagaatcttcaagttctttgggagcagagcttctgtgatcctcctgagacatggcttcggatcctcatcctcatagtcagtgagggcccaacttttctttcgtaccaacttcgttagagcagcaatttgctcctctagccttttagtgtcattgtctgggagatcttgtccgagagatctcatctgcgaaccttgtcattcagataatttctgaggtcattcccttgtggcctcaccttttcacttttttctttttcatacttggcatcaagatgccttcaaagatctactgtggatcaactgtcatcaggatattattccctagtcccatcatcctagtttacaaaattaatggggcggtttttccttcccctgggcctgggtacttttgtaccggtccctttttgcgcagtatgacctttagagcagaagggagtgtctaagcccaaaggcattggtagccttatgtgcatgagcaagtctactggctggatttgcatttttttgaggaggtacgagagcttaagggttttgagggtcacctacttttgcttttcccttgtcctgtataggagcaaagttttcagcattagcagggttttccttattatttcctccgacacattccactaaggggtcatcatttgaatctcccttgtccaaatttccaagcttagcttggaggggagtcatcattatctccattctctaagaaaattttgcttgatgggccaacttctgtctagtctcgagcaactctctggacacccgaaccatttcggggtcatgctcgtagtggtagccatctttgtaatatctatctttgacatattctccatcattgtcttcctcctcatttttcagtatctctctcttcgtcgatgttgttgtgctggttgttcaggtcatcctctcggctgtcaaggttggacgtatccccacctctcgcattgttcgactgggtgtgctctagtgagagaaggtttatatcctccatgacagtgtcaatgtaacaccctaactagcataggcgtattacgtgatttttaaacatactgtgcagctcgttgctaa

SEQ ID NO: 307446 - DNA, 1661 bp, Cannabis indica
aaaaaaaaaaacacagctatatgataaagaaagtgaagatgcagaatatgaagtctgactagatacgaaaagtgaatgatagaaataatttgtgggtcccatttagatatttatgcaaaattaaattatatttatagcatccactgggctcgagaggcaattcaatccacttgggtcggaacatttagcatttctctttaaaatttcatcatctcgactctggattgaacccaagtggctcgtgacatttattaacatttttcgtttctaatgaagtgaaagttacatcttttataagcataaccctactaacaaacaagtaatcatattattgatagaaatgaataagtcctgtccccgacgtatgaaagtcaatttctataggcagcttattagtcattaatgttttgcaaacgagtcataaaaattgagaacgaagttttctttatgaatagcgcgttttcgttttccagtttctgagttcactcaccacatttatatacaactaccagtcagagtagtagaatacacaacctttcaaccggccagtatagaaatatatacacttaccttgttatcagaatttctcatctgaaatccaatcaaaaataatttcgagcacccatggaaacttcaccaaccacaattaacattacgcctcatattctctgaaactaagcgagtcctcatagcccaaccccgccatttcttgaccctaagcctcatcttccttatcccactctccatagccgcagccatcttccccatctactttgaaagcctcttcactctatttcgtttttctgttcaaccctcggtcacttttccaaccaaaacccttttattcgtcctcgcttacactctcttcatctcactcttttccacctcagctatcggaacaattaccaactctgtcatcgaaaccttccatggccaaacccggatcaatctccaatccgccaccaaatctctctccacttcatttttcaggctcttggtcaccaataactatgccggaaaaatagtcgttcttataacctttggctcctcgttcgtcttatctcttttaattctcggagctgttttatatgggtacaacatcgatttctcttcaccaaaatttctgctactgtttttggctttctcgattgttcaactttcggttgcgatatttcttcatgtgaattggactctgtcgtctgttgtggtcgtggctgaaaagatatcgggtttggcgtcgttgaaaaggagttggagcttggtcaagggaaggagattgcttgtgtttaatatgtctatgtgttcaggattaccattggccactttgtggttggttaattttcgtttgaattggccatctcttgaattagcagaagatgaagatggtagtgataagttgataatattattctctttgactctacaagttttattattttcaactattcaaacctcaatattacttattgcattgactgcaaatactgtattatatctgtattgtaataaggccggcgtagttcttcatggggataaggagttttccggaaactacatcagcttaaaagtctatgatgaggaggagggagggaaagtttcttctgtgatgagtaaacttgataattgagattaataaacttaattattatatatttatatat

SEQ ID NO: 307447 - DNA, 2092 bp, Cannabis indica
ttttcaatttattgttatatgttaaccttacttttctgaaactttttttcccttcccaaaaatatagaatccatttatgtatctcaacacagacctctcacttttcccatttcccattcttagcagaaacaacttgaacttaaaatatacatatcaacactaagaaatggtagtttttctttaagaaaaaaaacaactgaaatttcagtatgcattatatatttggagtgagaaatgaaagtctaagccggcctggaaaatctattgtaattatactaatttaatataaatgaactagctgaaaatattaggctagaagtacctgttttttaattctaaatgatactaacaaatatatagttcttcatagttcatatgatcattatatgactctgttttgttgatatttaaatatatatatatgtatatttatttattgcatgcatgacatgtgctaattaagcttcaaaccaaaactgttcaaaagaatgaaaagtaataatgctaacagttaagaagaaaaattaaaccagctttcttccattgcataaataagttttaagtatatagatatgtggtactcacaggtttagaaactaataagtagctagcagtggaagttaaacggtcatcagagtacagaatcttcagtcagacttgtcttctaatctgttattgaaatcagtttaacaataattaccaaaaaaaaagaagctaaatgtagagaagagaaaggaggcgagtggaagtggaagtggaagtgggtgcatggttgtagaaaaatacacatacatatatatatgcttttgaaattttatatatgaaaatataaaagcaaattaattaaaggggcgttttctacatttattttccaccagacactcacttggtcattactagtctcttcttttgacttcagttccttcgatactgaccatacacatgcctcccatttttgtggtttatagcttgatatagcaagaaaaaaccccatgcttgaatttataggagaggggggaacactcaaaactttgtttggcaagtgccacttaattaacataattattgtttgttattgaattttaatatttacacttgagagagtatattcccttttctaattatttttttattgatagtgaaaaaagttaaaatcgttcatgattcacctccttttaattaagagttaattactagaaagaagagagattgtgtgggtgagatactagacaaacgacttttggagcaaagattatctatcaataaagttccccaaagacactataagacaaagtccccaaataaatatccgacacgtagtaggcatatgatacccattacccacatacaagtagcccaaataaaattcagaaaaaaagaaaaaaagtagcccaaataaatatcggacacgttttagtgccatgtgatcccatacacaggggttctcacacacagtcactgccatttgttgtggtgtagaaaagttaacaaattaccctagctagtcaatgtcaacataatataatattattgctttaatttatgaggggactagtttataattaggtagatttaatgtcatgtacttggtgtttcatttgccctaaaacattatcttatttcttgtatttacgaatattctccagaattttatttattccatgtatataaaattgtggctacccatgcatatagtatacttcctaatttcttgatattataactaatacctataatttaataatttgaaactactcatccttattatataccctgtttagtatttttcttttaaaataattatagatatttctcatggcagaataaaatattttctcttgatgtggtttccatttgtgtgattgtgtcccaacatgtaatatatgtacatttaatttttgttgttttcacttgcgatgaggcaaaccatatatgtttattttttttttttgaaggaaaatggtaaactttattagaatgaactttcaaccattacaatagataaaagatcagcaggagcagtactctcactgaaaatacgatctgaatacaaacaagagctacgagcaagacagtgtgcagctttgtttac

SEQ ID NO: 307448 - DNA, 2752 bp, Cannabis indica
actaacctgttcgacatttttgccggcctgagttacgtcagaatctttttgagctggaatttgagcacaggttccgggatgcatgacctgcgtgtctagctgatcatccattcctctcctcctattcagatcgtttttgagatcatgactcatccccaacctttcgaatacagaagagcctggctgcctcagtgattcgatggtttggttaatgggctgaatgacacctttaacatggttggaattactgggtatgacttctcccgatgaattactagacaaggtttttccacctacttcttggcccataggcggaacctgtgaccggagatttggtagctgaccatttatagtctaagaggtattcatagttggatcttcgtctgtttcacctagggggatgacattcgggggttgttgcccggcagtcttgtaggccctccgtatcaggcacaatggcttgccaactatggtcatcagtgactgcttgctgagcccttaatgcttccatctcattgtccctccattcagcaaacatgcgcctctgctcttcgaactcgagattcactgcagcgcggagttcctcctgatcatgatccaaggggttggtatgaccctgcatgagtccaagagcagcatggaggttttggatctcagtgtcatccccaatgattgtctgaacattggtggcgggcggaatggctgtggtatgattgccctggtcagctgctgaattggtattcccagtctcttgcacaccaggtgcgatttcatccacaggattcgtcacactgtgaccagcggttgacggctgtctaggattaacagctggcaaaaacttgtgtttcccgatttctgcagtgccagatccaccgcctgcaaattttttggatttaccacgcgcctatgagtctgtaacaccatcgtacttgtgatgaaatttggaatgaagagcgatccttgagttgaactctcaatgaaagcaccaaaatgtggacctcgctcttagccaacgacagtgagtctaattttgtaagcgacaggtagtttataaggacaggaatataataaaataatataaagacacaagaattttatagaggttcagccccgagcagttcggtaatagcctaatcctcgttacttgtattgacttaagaacaaggagaaaggttccttttcttatagctcttacaatagtgtttctgaatatgaattcttagacaaaatctctcaactaaaatgttttcgaccctttgcccagtgaatatgcatcactatttataaggctatgagcgtggagagtaagtatttcccttctcgttacaattgatataagcagaatgattgccgtatctctgtaatctgatccccaagttatagggatttctttgatgactcacgatgcggaagctgaattccttaagtgtttgtcgctctgcacggatttcttattgcttcgtcttgagcatgcatgtgaggtatcctatttggcctgtatcttgtgagcagatacctggagtcggttccacgtgtcaccatcgcatgatgccacgtcagagtacaaaaattaagataacaaatgtattatatagtttattaatataccatcctattaaacattaaacaaaatgttatactcctttttttagtaccaattatacccctcaaacaataaaactaaacacatctccattcttttgtattggttatggttacatgttttgacatctgggatggaaactattaatttggagagaagataccagaagctttgtgtggattcgaaaagccttgtgtggaagatcttatagaatccataaggattttccaaataagcttgtaccgcatatgaaatgtctctcccggatagcttgttattaatccagaggtacattcccaaatagcttgctgacaatcttgaaggtccatctgggaaggaagccatgtacgtacccgaaaggcttgtgtgtttataaagctttcagattgtccatattgaaagcgtattttttaagatgacgtgaattattattgttggtgatgagctggatcatttaaggcagtataaatgtgccacgataattttggagataatttggccaataatacaaatatatagatagctataaatgtttgtaacctatgtttgaaaaagagagagtttaaactagagagagaaacttcgtctcgtaatctctgagagtttgtgaggattcttgaaaccttgtaaatactgatatcaataaagatatggctattgttgttccgataaagatatagagcattgcacatggcttgaactcgttaatcctggtattatccttttctattttactacttaattcaatacttgaatcttgagatttcttgttatataatttctttattgtattgcctgtttgttggtacggtaaactgaatcgtaagtcattaatattttttatttagccaacattccacctctcttctccctctctctctctttctttctctctctctctctagaaagtcacacacacacacacccagttggagcaccctttgtcggagcatccttgccgaatttcatcaacttagctgttttatccccttggcgcccatgcattccgaatgcccaggctgcaatacagtccctgggcacgctggtgaggctacatgtagcttgggcacttggacatggtgctttatcacctaaaaatgcgattttcttgggatttttccttttttttttcgaattttcccaatttca

SEQ ID NO: 307449 - DNA, 974 bp, Cannabis indica
acgtatttttataattaaaaattctaaacacataaaagaatgatgtttttgaaaattcccctaatctttgatactccatgtcatgaaagtgaatgattttagaatctctttgagagtatatttgtgatttttctactcattgtctattatcattctttggtgattctttaaatatatgatattttaaaatattatattgatgattatttaaactttaaaggggtatatatgttgttgctatatatgtaaattttgatggagtttgtgaaggcattattcaacaatcttttctgtttactagagtctacactactctacaggaatattcacataacttgtgtgattctttttactatcctgtctcttattacagcaagaagcaataatattgacccatatatgaaaattaattaattaaaattagtagattgtaactggattgtatatatatattaaattgaaaaagactttttttgttaaaaatactaaaatagaatattactagactattatgcaattatgatgttttaaaagtagtaaaagagatagatattcatatcatattcacttttaattgtaaagaaaaacttgagcctgattgatcatttattggaaaacacgttaaaggagacctttgataaatgcaaggataattattacaacataaatgactaaaaataattactccaattatgaaatatgaaaaagagccggaaaaaaaaatataatgagtggatttgctttattattagtttatccatcacttttaatatagtattattttatcccttatatagcaaaatgaatattattttatcattaataaaattaaacttcaaaataaactaataattttaataggcataataatcttttatcataaattttttacttaaaaaaacaatataatagtaatgagtgtgtcatgtaataatatttacataataatataaaaaaaaaaaaaagtttacaat

SEQ ID NO: 307450 - DNA, 1730 bp, Cannabis indica
tagctcgtgagaatcagaccaactttgagaagcatctaaaggaaaacccaaatgtaactccagggattgatctaactgtcactgttcttaccactgggttctggccaagctacaaatcttttgatttaaacctgcctgcagagatggtaaacatcttactttataggaatgtactaatgctaatggaaacaaagccttgaatatttttagccttccctcatgtttataccatttaaatgtagattttgttccattttgcaggtaaaatgtgttgaggtgttcaaggaattctatgaactaaacaaaacatagaaaactaacgtggatttattctttgggcacttgcaacattaatgggaagtttgaggctaaaactattgaactgattgtttcaacgtatcaggtatacaaataggtgacatcttctcttcattgtatagtattattagaatttagaaagaactgggaccacattatgtaactgaatcacagaatcacgagaagcatgcttttcttcttttcaggctgctgcactacttctattcaattcggctgataggttaagctattctgagataatgactcagctaaatgtaaacaatgatgatttggtgagattactgcattccttgtcttgtgcaaagtacaagatcctcaacaaggagccgaacacaaagattatttcaccgaacgatatttttgagttcaactataagttcacagacagaatgaggagaattaaggtctaatatgaatctaaaagatttgatgcaccttttttgttctttgttaaatattattttttattaaagatattgactttcgaaaattattcatcctaagattcctcttccaccaatggatgagagaaagaaggtgattgaggatgtggacaaagacagacggtatgctattgatgctgcaattgtgcgcatcatgaaaagccggaaagttttgggtcatcaacagctggttctggagtgcgtcgagcagctgggtcgtatgtttaaggtattactcactcactcttgcattttgacatctaaaaattgctcttttagtttattgtttcactgctgatgctggtatgaacatgcagcctgatatcaaagcgatcaagaagcgaattgaagatctcatcacacgggactatctcgagcgagacaaagataatgctaacatgtttaagtacttggcgtgatatatgggatgttgggtgattggcattgcggattctccaattatagatttgctgtaaatgttgtgcagcttgtttttactatttctaggattttgaaataggagtgaactcagtgagagatttattacctttgaaattcatttttgcgcacttgaacacttcaccaatccttgagaaaaggttataggaatatccattttatgtgaacgaatgaaagttgttatggcagattcttttaggctgggaaattcgagcttttatgcctaaagattctccgtccgtaaaaatataaaaattatttttgcggaatccgtataacatatttgtcaaaattttaattttttttttaatgaaaatagaatttgtctaacaaaatagacaaacattctgcaagaatgtcttttctactaactctaagaacaagaaactcgagctaagagaactcgcatttatatatatatatatatactaggtgaatgtacgtgccgagtcacgtattgctagtttcatttaagattttggtcttttt

SEQ ID NO: 307451 - DNA, 1525 bp, Cannabis indica
tccattttaagggagtgcattgtagaattttcccttcatttttttcccttataattattattaaattaaaataaaacagttattttatatactatttttttaattttttttttatttttatagtttagattgtaaaatggtggttgctatatagatttaagttgtaatttaagttgttttattgattgctatgtaaatttaggttgcgatttaagttactttattgttagttgttatgtaaatttctctaaaactataaaaaatatttactttaaaatgtaaaaataaaataaaaaaaatcctaaatccaatatttaattaggcaattaataatatattatagattcgtttgatacaccgtattacaccatattatattctatactattacatttttttataaagtatagtattattttgtactattttaaaaaaaaaatatggtacaatatatcattaattagtaacttttgtaaaacacaaaatctaaaataatattaacccattactaattaaaaaaaaagtcaatttactaaatttatcattaagctttctactaatcaaaatcccaaacagttattattttatttttatccttctaattttaattttggaaagtgaatattactcttctttcattaattaaaattgaactgtactcatcaagctatcaacaaccgaaagctactcaccacattttttcacacaattagactagtgtggtattagatactattatatatgcattgtttttttctcaattttaatttgtgtctagtgattaattacaaattaaaaaaaaagtcaaacttactaaatttaccattaacctttatgttttcatgattatggaattattcttctactaatgaaaattattcttaattttgtaaagtcaataaatattactattcttttatttttattaaatttgtagtcttttatcagcaaccgaaagctactgaccacattttttcacgcaattaggcatgatttgttattatatcatatctttatatatttatatatattcacaatgtttttctattttatttaatttctttgtatttcttgcaacctaaaattcagtgttacgtctatataacgatatatcttcttgaacttagaagataaaactatttaaatggtaacaaaaaatttgtagagttaaactaaataatttctttctatatagaaataaacacgtttatttatgtagttgattgagattttctaaagtcaatgagttttttggttgaagaagaaaattaataagaatttaggcattaattaattaattaattataattaatagatagacaaaatgtaatggttgtagtttgattttgatatgatatagagtttgaaaatggtgttaagtgtcagaataagcgtggttcgtggctgatgcaagcttcgtacaaaacaaaccctaaaccaaatctcaaactctatgttttttttttttgttttaattaattcacctttctttcttccaatttattatttatttattttattgttt

SEQ ID NO: 307452 - DNA, 697 bp, Cannabis indica
tttttttaaattttcttaaaattttttaaggtagagttacccatggtatcctatacctatgggcaccctatatctattatggtaatattcgtaccctaattgtaagaaataataaaataataaagtagagtataaataattttatttttttcacagagtaggattgtgaaataagcatatcttaaccataatctgttagcacatttccaagtgcgacttgtgaataaataaattagattgactttttctagaaaaataagataaactcagatatggctcaaatattttttctatttttattagtgaaatataagactatttatgattattattgttattacttgcagcataattattatttatttttttaatgtaatgaaacttttttaatgaacttggaatgtagatgatgcaatgtaattcaaggttgtcaaatcggagtataataattgtgttattaattagtaaataaaataagaaatgtcttaatatattctcttagagcatctcttatactaaattttatgtttacttacactatcactaagaccatcttaaatatttcaaaaggtcctaatctaaatttagaaattagacccctgacaacacaatttaatagttttaaatattttcatacgattatatattttataaattatcgaaaaatttgattccaataaaacttcaaaaaaaaaaa

SEQ ID NO: 307453 - DNA, 2674 bp, Cannabis indica
catagttttcggtatgttaaatttttccaaattttttaaaattttgcaaaatgtcttaaataactataacgtacataatcatgagaaaaaaattgactaaaaaattatttcggatgctaaaacaaatagggatgcatcaatatatccattttaaagggtgcattgtagaatttagtgacatttgcataaattaataattttaatatttagtatcattttcgtaaatgtcactgtttatatattttagtaacatttttaaataacattaaataaatatttaaaataaactagtgacccttttccaaaaaaaaataaaataaattattgacatttttagtcaaatgtcactaaaatatattactaatgacatttttttaaaaaaatgttactaaatgaaaggttatttattcttattaaataatatattttaccaaatgtcactaataaaagtgtccctaaacctatattttgttgtagtatactgttgaataataggtttaattaagattgatttgtagataaacacaaaattaaaggtagaattttctctttcctatttctctttctctctttcagctcacctaaaactaaaggaaaccccaactacagaccagatttttcaaagttaattattcctccctacctagttatccaaactaagaagtagtgttcttgattcaaaggaaacttaaggtaattcttagttcatctctttctttaaatttttcaagtaaaagtttggttttaagcttcactttgtggtttgtgggtttgtaaaaattaagggaagttgaatattatttttttaagtttgtgcttagtttttggcaattgtggctgttgtagcttgagttgggtgagtttgagtttgttaacataaaactcactcaacaatggagaattttgattcttggtttaattttgattcttgagttgtcatatatgtttagaacttgtagtaggattgttctgaaaagtttagtaggttttaatcaagtttggagtagatttgatgtgttaaaactcaggttttgaactttagaaaacagttaaccaaaaccgtttccctagttattcagttatccgtttgggggatctggttaacagtttggagtattttttgtgtgcctatatttttatattttcttaacctttagggtattaccacactatttatcgataggagaactttcaattttacgttttaggttttagaatgaattaaattgagttctttacctgttattactgacatagggcgtcaaatcgtcgtgcgttttccataagattggccaacacacctaaatgtagacgaggtaataagaaaaatataattataccacttagcatgtcaaaatgtgatacgataattattgtttttaagagagtgttattactctattttgaaactaatgttaggtttcttatatatcggttgtcctattagataacgatattgacattgcttgtctcattaggcaacaaaattagaaagattgtctcattaggcaacgatattcgaaaggttgtctcattatgcaatagagaatatagttactttattaagtaatagccaccactacaaaaggcttattttggtcggtcctcaaattggttttttttcgaggactgatgctaataaagttatgtaattatttaaaattgtcgcttataattgggtattcttgatacacaatttttactacaagcgtacaatattgttataacaaagttttaattctaaaaaagttgtcgaacccacagggattgattattaaattttcactatgttgaccaagatttttagcaactattaattagtgttgtttatagtaattaatggaagttaaagaagggaactttttttattgatgagtgttttcttacagagtattcccaagtgtccccccttctatacaacatggaggtattgataagctcataatggttgtaaaaaggccaccgttattgtgtttgtatgagtcatgctttgtacaattttccgaattcaatcataggacatgatcgcttactttttatgatgtacatagactttctataggcatttgatgagactagacttgtctcttgcttctgatttaatagctcgtaatgtagctgtcaaatgatgtatagggcatcgtgcaattagagaattatgagtttaaaccattgagcacgtatctttttcaaagtaatgtgtaggatgttcttatgaagaattaaatgtgtgcacagtgacttaacctcaaacagtgcgccatgctccgcctatgcctttatctcttctccgagtctagttcactcacaaagaggaagaagcaaaaccatctatcatctaggtggaccctcccaaaaatgactaatagttcccaattcttgcaaattaacagtctccagaagtagtttaatatggcacgtcttgtagtgtaggtctcattgccacttggaaaattatcatccgatccaatctaaaatccaatccaattaattactaattgaattggattgactttttaattgaatattcaattacacacctaaatttcaatattaatttaaattaagtattaccttttatttaagtttattacttcataaacatactatcgtttacaattgtaatgtcgtcaaaattaagttttaaataattaacacaacaatattcctaagt

SEQ ID NO: 307454 - DNA, 1803 bp, Cannabis indica
tttttattatttttttttttatggaattcagcatttttcaatcaatgctttttagttcaaggcaattgtgtggacccaaacaccgtgaagactgcttccaaattaaaattaaaatgcttgcaaaacgcgaagaagtgcttttaccatagattttgtccttcttctattctagacctaatattatcctatttcttcgtttattttttatttatttaattaaaatatatatataataacaaaaaaaattattttttttcatttcttaaaaattagtccaatcaatttttttggtaattttagcgcagaagttttaagaatttatcctagaaattaggagtgtctatttttatctcatctaacgtttggtatgttaatctatccaatatattcagctagccaaaacaaaaatctctccaatatattccaattatcaagtaaatgttgttagattttgctgatctagttcaattaacttgactgtctaagtttctttttttttagcaaagaaaatcttttattcaaacaaaaccaaacaatacaaaattagactactaaatcaaaacagcccccaaaagatacaactcataaagtccttataaattcaattacatgaacatccattttctttagatagcaaggttaagacccaaaactctaattttaatggctagcttaacggaaccattaatggtattaacagagttacaaacaaattcaaagacacattaattttggttacaccaaatagaataccgtataaatagtggaattgcatatggcttctattaaatttgagaggtgattcacattccgctgcctccaatcagcacaatctttcggccaacgagttagacccagccaagaagtaatctctaatatgactttctttgtgaagagataatcaaaaaagaagtgttagtgaatctctatatcagcttcacaaacatgataaaagcaagaagggagcttcaaaaacttactaaggtgaaaccgagtaagaagttggtcattgatcattttccaagttatgaatatgtttggaaatacacaatttgtgctaaatagtttttgcatagtaaattttttcagtcgagattagggagtgatataaatttctaacttttatttctcccaaatcccaaaatgaaccaaagatgatctgtctatggtattccaaagcttcgaaagcttcttaaaatatcagctgtaattattttttagatgagctagccatatgtcttgatctttgatctttgaggtagatagaataaatttattttacccaaaggctatcttgcttggtcgaaatgacctaaagaaattaggccatcatgacaatattctacttttttaccggtgcgaatctagaaatattcgacacgaatgactgaaccaacatactccaaataaggaacatacatctcaacccaaattgaagggaaagtacctccatagagccctagtctagaggtattctcctatggttcatgcaaacaaattccagacgcagcaaccttaatttttaagacttttttcataaatgtacaacaaaagtaacataattataaaaaatatacaaaaataaatttttaaaaacttatatattttgaaaacttattacatgacattatacattttaatcattaaataatataaattattaatgattaaactaattactacaaatagatttatataattattgtttgtaatattattttataatatcttatcattaagtttattatattaatgttttaaaaattattaataataaatatatttattaaaactcaaaataaa

SEQ ID NO: 307455 - DNA, 1486 bp, Cannabis indica
tggagctgaagatgtgaaaactgccccttctagtggtagaatggtctttagtgcagctgggaagcagggctcaaaatcaaataaaaccaaattagataagaagggtaattcagatagattttatgatgatagtgatggtgaaaataacttggaagctgaagatgacgagtctaatgggaacaatgaaagtactgatatgcataaagaagtcagtcttgatcctagtgtacttcttgaagtttctggtgctgatcagaatgctctcttcaaggttatacaatcatttcttttcaattctacattttgaagtttcttatatttagtttcacaagcatgaaacgtctatctcttgctgttcacagagctttgatgatgttggaggcccaggtcctaagacaacacatgaagttgctatttttgcatcaggcacatggaaaaaaggttttttttttcctctctctttatttttatctaatgattgattgaagggttctgttatccaatagaaactagccaggctaggttcaggcttaatgttagcaagtccaagtagtttatttgcaatgtatgaaacctctgtttgtatgaacaaatagatctaaacggtggggctaaatcaaaatgggaactagaaaaaacagaaatttgaacgtgattttggctggccttgtcatggtaatcgagcatgttgcagaatttcaaatactgccatataaaaagacagttgtcttagtaaaacaaaatcttcgaaaaatgatctgttctgatctgcacaaaaacctgctggaacttataaatgctttctttttcacctgtggctgtattttcttagtggatttcaatgctgactgctttatatgtatcaggtgaaaggcaaaaacaatgatgctagcagcaaaaagtctcttgtttcagtggagccggtttcgcagaaacaagaagtacaggtgtgagatcttcgtatttatttaattatatgtgagttatgtagttgggtgcttctcttacaagttcttccatttctgttctaggaaactgagaaggagttgggtgaggatagtgattcagaaagtgatggccagatggtagatgggattctttcttcaggtccaaaatcttatgaacttccttctcaagctgaacttattcaccaagcctttgcgggagatgacgtggaggatgattttgagaaacataaacagatgattttgaatgaggagaaccctgaaccagaaaaacccgttttactccctggttggggccaatggaccgatgtacagaataaaaaaggtttgccttcttggatgctgaaagagcatgaaactgctaagaggaagagagaagaagctgtaaaaaagaggaaggatgcgcaacttaaacacgttattatctctgagaagttggataaaaaggtaatttaaatggaaaggaaaaagaaaagagaatattatcgggctgtttggctttataacttaaaaactgtttt

SEQ ID NO: 307456 - DNA, 1011 bp, Cannabis indica
tagattcgtacatcactttttaaaaaatgttagcattgtaaaaaattttttcaaaaaattaattttaaatttttacaaattacaataatataatattaaattgttatatgccgtgcactgtacataaaacaatcaaaatagttgcatgatatgcagcctcccttagaacatatatagacaccataccatttatttacagttctccttggagctgctcttaacacaataacaccataacaacctctctaacttataatttgttaggggttttatatattatttagtaaattaaattacatgagacgctattaaattaaaaaattattttatatatatatattttttaatttttttaaaaaattttactagtttaagttgatcagatgatttttatgtgagttttaattgtaatttaaattacttcgttagttactatatgtattgttatgtaaatttttcgtaaaaaaaaaaactacctataaattctaccaataatagtatgtcatacttcttacttaacatttctctaacaaatgagtagcaaaagagtcttcaatgatcaaagttactttagcaacaaataagcaagattgataacaataaatcattataatgatgatatctctaataagtattgcaatcatgaaaaacattagtcaaaaaatattattattaaacattagtagaatctaacactacttaaaggtgacactctataattaattaataatatttttcaaaaaaatttatcttaaattatatagaatccgatttacatcaataacaatattttgaagagctagagtgtcaataaaatggaaaataatacaaaacttcaaacttgataaaatggccaaaactaacaatatttctattgaatagaatgcgtccatgttgcaaaaattttgaccgagagtacactaatttctaataatcattctcaaactaatcttgttgctaatatcattaactacggtgtcgtttggtaacacttttgttttttaatttttt

SEQ ID NO: 307457 - DNA, 1430 bp, Cannabis indica
gacacaacaaacacagtccattccaaatactgaagtgtcaggcaatgtcattaatccagaagacgaagatttatcacttgtgcaatctgtttttggaagacatcgtgggcaccaaaagggttatgggcgtctaattagcacaagagagatgacaggaccacctacatttacccaacctcctccacctcagactggtgcatatgttggagctgatgtcatagctgatatgcaagagcggattagacagctggaggaattggttagggaaaattgtaaaatgatagttttcttgaagcttatgttctcagtaaaatattatatcgaggataatgtcctcagtataaatgagttagttaggccaaaatgaaagacaactaccgagaacgtatctaacttttgctgacaacatttgttttcagtatagtctttaacgagaacatcatcattgtccttgatagaaagtaatttttaacgacgagtctctaacgatgattttttaacgaggacatgtccttgttatatggttttaccgaggacatttgtccttactataaaccctattttttgtagtgacaagtgtaaattttagatttttttaatctaatttaattcgcacaagtgtggatatttatactttgcagattgaatttgatgaaattgtgcagattgaattggattaactattttatgaacaactttattataaaatttaaaatatcaatataataataaatttttgaaaacctttctaaaatattaaaaaaaattaatgcaattggattctttaaatattaatagatatttacttagaacatatgatggtagtgtttaaaatttgtgactatttggtcaaagattccaaaatgcttgtatgattcattattgagtattctaatcataaaaggctttacaagttgagtttttaaaatgaccccacgtgattaaaacaaaatttaggatgtttattatagtcgtgaattattagtttattgtatgacagctttactaaaattatgtaataaacaaataatcagtagtacggcggctaatcatgtttggataaatataatatttttttttggtaactaatatatttaacaatgtcttttttaattattttttttaacatgaaatttacggtacaacacatttttgtgttgtattcgtacattacttttttaaaaaacatatgagtctattcttttctttcgtttgtcacagtattcacaatagtcacggatcttatttgttagcttttaaaattgaataatttacagtaataaaataaaatttaaatcagggtaaaaaaaatatttttgagccttatgatatttttcaaaattagtaataaaatatgtatttttaaaagaataatattcttttaggcctataaactaggtaaactctaaatacagatatagtttgcttat

SEQ ID NO: 307458 - DNA, 2551 bp, Cannabis indica
gatcatttaattgaaaaaattaaaaattctgacaaaataacataattcgtaaacaccggtaatttgacatctgaattttacatatagattggaagtattattattaatgcacgaaactttatttcccatgaaattgataattagtaagagttttttttttattattttttaataaataatgaaatcttattaatgaaattaactaaaataatattctgcaatctatcactctattaatggagagtcaaataattagccttctaattctcagtacgttttgacaaaaaactaaaataaaattagataaaagaaaagtgcagcattacaattaatcttaagaatacttatatattctgttccatcaaccgcttagaaaacataaactgttccagctggttcatttaaactcgtaacttgagcactcaattatgtgtaattgttagttgcttcattcaatctcatgtcttgtcatgcttgtgccactcaaacttgtgacgaatcaaaaagtttaactcgcactatgtaattttataacaaattacttggtaatcttttatcaaacaaattttttaataattcagaaaataattttagaaagatattcaatggtaaagtttttgtagagtaatttaattaaattaaacgaaatctaaaatttatagtgatttttcttatttaaaaatatttaaatagtacttaagattgatgacatttatagttattaatttgaatgtgttgtttgctatcattatttttatttttagccacataatatttatacaaaagctaataatttgctgaaatcattatttatggaagtatttttttagtaacttttaattttaatttgttgctgttgttttttttcttaaatgacattaatgcataacttactttattcctatatatctagcctttgatcattgataatattgggctggtgcttaatattttctaaatgtatatatacatatatataaagtcatcaaaagtgaaaacctagctatgattaatgaacaatataggttgaaagtgtgtgtaaccataaccttacgatgaggttgaggaccaaaaaaggctgaacagaaattatattattgcagagtgttgagatggcgttgtcatagcaaaacatcatcattgtaatcttacaagctgtatagcaatttatgatgttatatatatgaatatgacaaacacatttttatagtcaatcggtagtgatcgatcaatattatatacaagctagtggtagtgggatacactgttcgattattattcacagtgtatcatttcagaactcgacaaaacatcccaaccaagttttctgatgagataaaagataaatcaaaaaccaccaagctagctatatagagattgcttatgcataaagtaatatatatttctaatataataatttatataaattaaggttaagttctaaaaattcgatctgattcctttcatcatgactttaattattttcccttttcttggtcactgccatcattcacttgaacaaaaaaacatgtatataaaaacacacgtaaagtaagatgcgatcaacacaccaaaaaagaagagatcgattattcgatatgatgaatccactcactcattttttatatatataaattaataagttctcgttcgatcacataccaaccatacaattttttaaatggcccaaccacaattataaggccaggcctataaacatattttcttttttcgtttacttcatgattcttttttacttattacctctaaacacaatcttttggcgggttgcaattcataattattatagggactttttttttgaataaaatatagaactttattaattcataataattatagggatcttaattaaatatattgatataatacttttagactatgatgatgagcccgatatataaaactttcattaattatctatatggaccacagagtatatatatgggccatatgatatgtatgttacatttaaatgagtacacagaagctataatcaccattgatcgtgggcttacatgggcccaagctagaacttaatggagttctcagccatatttcatttgtgaaagctaaataatgaagatatatatattttaaatcaaaataatgaagatactaatatacagaagtttagtagctagcttcacaaaatttattccatttattatccttatataggtttagaattaaaaaaattacgaatactgatttgatttctaagcctatagttaatttttatagatcctaggctataggtaaagcttagcttctcaaaccatggacattaatttggagaaaactatatataattaatgtactaggccctttgcctgtaacatcacctaagataatgatgtaaatatgagcattgctattgggcaccagtggtgcctagcaccttctaaatgtgtcgacttgcaattggctagcgatactctataaaaattattatattaaactatatgagacccgatacttaattgcaccaatagcgatattgacacgtaggagggtgctaggcaccagt

SEQ ID NO: 307459 - DNA, 2263 bp, Cannabis indica
atatcggtatgtagagacgttttttttttactctacttaaacattttccaatactatattatccatacaagtttaatacaacaataagtttgaaataagtaaaacaacactactaaataataaagtagaacaaaacatcataaaacaaatacataaaacaagtaaatattacaaatttaacaccaaaaacctaacggtcagtataaatataattaatatatatttgtaatatattttactatataaataaaaataaatataataactttttatatatattaaatgtaattggattttgagatcgacattcaataaccgattcaatttaattagaatctaactttttaccatccaatccaatctaattgtatatttaatttttggtgattagattagattgaattctatccaccccttatacaaaaccgtacatgtttaaggactaaaaatgcagagttacattagcccaaaattataggcgggaggaagctaatcacatctttagtacctaaaacaaaataagaaataaataaaatgctacaaattgacaaataaagagacaccatggacgaataagtacccatacaaaaagacaaaaacatggaaattaatccatgaagatgcaccacatgtatcaattaaaaggatctcatataaacttaatttaccataaatgaaccaagcataaaaaatcaactctaatcttgtgagaacataataaaaagagaaacatgaaggaatcaatgagagtcatatatgaaaattcttctggtgtgcaacaaacatgaccatgaccatgtttgcaatagaaatattaaatctactaagaactacacaaaagtttaaacaggacatgaaaagctcaaaagagaatacaaacttccctaaaaaaatgataagttgatcctcatctttgaaggctaccactactacaactcaaaagtacatcaacacaaaaagtcaagttctcaaattgttcatgctctgtcatctaaatcaataccattgtgtccactaacaaacccaacacaatattttttttatttgtccttataacatccttaaatgagctaactaaaagaaaactccctaattgagatgaaaaattcaaaaataggcaatggttagctattcaaaagctacggacaacaatgaaagaaaactttggcagaatcaaatgtgatcattcttataaagaagactaagtgaaaaagctgaagagtaaacaaaggaattttatcaaacacacttcctatgcagttgtattaatattaagtggtaacatggaattcactagaccctttgttagacttacattggagaattcagtggagcacaaatttcaaataattaaattaaaaatagtacattcaataccatcaatgaagaagcaattttggatacttaagaaaacctgtcactaacaaaagcaatatttttggtactttttatagatgtctcaaaaatgcatcatgagaatagtaggtaaagcttctatggcatcaagtagtattcgtatgtatatatattagtaatttaaatagataaaaacagaaagccttgtgatgcacagacataggatttaatataagaatatttcaaattaattattgttaaattaattctccaagtgattagctttgatgccactcacacttcaaagtatacaacattccaaacttgccaatcaaatctttcaaagttcaaacgctcttctaaaagactagctacaatctaggatcaccatttagatccaagttcatcaaaagtaagataattaaaatatctattcagaaaaatcaaatatgaatcaaaaaggacccattgagcgagatgaaaaccatggagagagaaccaatattaaccaactcagattctttttgtggctatgagtattagtatcaagtattcacggtgaatagtaagtgtcgtcttataattggttagtaattttttataatatttattaaagtaaaataaataaaactcgatattgaattacactaataataacgataatatgtctcatacaagtgttaggtactataggtgttttttaacatttctaaaatataaaagcattctaatatctaaaatatttcaatttttatattatgaagaaaaagttacaaaattgagtttgcaatgtatagataattattcatttaaattcattttagtattatatgaactatttatataaaataaataaaatgtattaaaaatataatatttaattattatagaaagaaaataaagaagt

SEQ ID NO: 307460 - DNA, 1776 bp, Cannabis indica
tacatgatataatcaatggaatcttaatttgataagctggagtaaaaaaattaaagtaaacagccatgggtcgcttttttttgtttttttttttttttgctattttttggaattgtggttttattgttagagaaaaataaacaataccgaaaactgcgagtattcaagctatacaagaacacccacgagtagaattgcgagtattcatttaggagtaattaatagaatataaacgataagtatgtaaaatacataacagaattatagtagttcaactagaacttgtcctgctttgtatactttaagaagatagattgtgttgagaaaactgctaccgaaaataaaataggagtgatattaccgaataaattttttggattgagtcgcggactaggtcgctctctttaagacgttcgcatcactgatcaggaatgtgcaagcagtcaaaaattgccggtcgtccccagaataaaataacccaatcgtcgtacactgtatcgcagggactgtaggttggttgcctcaaggtgaaaatcgagcgttggggctatctacgcctgagtcagtaggtgcttagacgctgggatccgttgccagaggatcttgtggttcagttgataaggatcttcttatcaaaaccatgattgtcgattcaaaagtaaattgaagattgtaggttgatgagagctaggtactaattcaggcacttaatgaaagtactaaaatagtgatcttacttttagctaacatcattgagtctttaaagcgataataattatagagtaataaataagaacaataagaacaataaatgacacacaatgtttatagaagtttaacccctagttatggtaataacctacttctcttttagttgtattactatgaagatttatcaagatcactagatccggtcaggtaagtttcttaatagctcttgaaaagcatacaaatatttaagcagagtgcttactctttaagaatgcaaaaagaaggtcccttttatagtagggtggcctcactatttataggagacataaaaattatcgtttgctaaataattagaaacaataaatgtgattcccaatgttaaagggaataaagtggcgtgtaaattcaaataagacccattaatttcttagtctggcgagctaatcctacagaaatagagatttaattgagctataattgtagaagcagctaaggaaaatatcttaaaatatccttcaattagtcagaccattgcttatctcggatagttgatgttgctcggtgcagggtgaggtaaaaggcctatgtaagtctttcaaacttgtcgacatatagatataccggctagagtttttctccttgacacatgtcacccatttacttaccatgacatctatgcaaattttgagataacggtatttaatgcttgaggatgtttgatcatcactatttaaatattttatgattttaattcaaaatttaagaagtgataattaaatatgatatatagttgaatagacattaaatatgatctctgaaatacactaaataatgaacttccttcaactattgatgtgtgctcacttcctcctgaaatgagtctttgacggatcttctcccgaaagtatatgttcattttcttccaaaataagacttaatctattcccaaaagaccaaataaatacaaagggaaatttgaatttatatacatatatctagggtatcttaaattttttaacacaagcttacaaaaattaaaaaaaataggcacactttatattcata

SEQ ID NO: 307461 - DNA, 1378 bp, Cannabis indica
aatagttttattctccatcacatatttatatttatacttttttaaaaagtcataaatccaaatgaagatagagaaaaagacagaatttttcctaggtggtttggaattatgttcagaatttttatctccaaggtctggttgacaagacatgcaatttctgtcaaagtaaaacaattatttgttatatggaagtgtgtatgttgatgacatatcaacttttgcttagagactgtgatttagcctctcaaccccttaatgaaattgcagagacatcaaaattacaagccaaaaaaggtcaacttaattatgaataaatacaaaattgtagatacataaaacaaaacagaaaagtcctattactattgataagaattaagatatataagaaactcacaagactaccaaatccgatataaattggttttccagtagatagtttacatctacttttggacccaagtctgcaaatgaattagcataatgatctgcaaacaaatagaagataatacatatacaccaatgtgttgtttatatcattatcatttcctttttgttttttaatttacaccaatggaatgagttacattggaagatattactatatcatgtttgtgaggcattttgtcgaacatgttgttacccaacaatcacaacctgtattgtatatgacatggaacataattaatgattcaaatatcaccatcaaaattcaaatgaaatctaatgaagttttgtcaagtacgaaccattaattgcagagttctgaagatccaattcgaagatcccatagttgtttaggatgatcaatatcgcaagcggtggaactggaaactttgaagacattaggtcaaaaattaaaggaaaaattgtaattagtattttcctttaataaaatataattcgaatgttgaactatttaaatttcatttttgacattgtaataaattattaaaaattgttcggaggttgtttatggtttttgttctcgaactatgatattgtggcccttaattttttatcacttaaaaaatagtttctcaactattaataataataaatgtaaaagtattgagtcatccactcattaccaattggttttgagatggaacccatgattctaacatgatatcagagtcatattcctagcgggctttggatctacacatgtccatatggttagccagctgcacgagatccagatggtgcaaagacgcttgagatccgaacaaaaataagtgagcaaatggtaggactgttcatacgatccaatccgcacttttttggtcaaataacatccaatccgctaagtgcggatttcattttttggatccaatccaatccgcacaatagctcaaatccaatccacaaaagtgcggat

SEQ ID NO: 307462 - DNA, 2093 bp, Cannabis indica
ctctctctctctctctctctctctctctctctctctctctcgacgaggcccactgtaacccacgacgacaccgtgtgaccaccactacaacgacaccgcgcgaccaccacaactggttctccctctctctctcgctcgcaccaccggaccaccagttctacctctctcacgctcgcaccactagcaccaccgactggatgacgtcggagcaccactgcgcgggtttctcccatccatagcgacgttagaacactaccaacaccaactgccagtgaaggtatatttatttatttatttataatctaaatttatgtatatatatatttatttatatatatatatatataaataatgacaccatttaattcggtcataagccttgaacatattcccacacacttcatgatcgatcggataaacctccttttagaaaccaaaagccaccatagtctttttcaagaaacaccattagatttggtgataagccttgaacatatcctacttgagactcacaaaactagtgccaccctttagtcacatgaaagaatcaaagatttcatgagctatgctattttcagcaatctagcgacccgagacaaaactggactgataagcaagattaaatacaagagaataggccttaatctattagccaaaaaattaaagataaccttataggtgatattacaaagcctaatcggcctaaaatcatcaaaactggaagtgtgagccttcttaggaataagaacaacaaaggtttgattaatttcttaaataaaatccccagtaacaaagatttgtataactacctttatgacatccgcacccacaatctcccaatgatctcaattgaattttctcagcataccatgatccaaacttggagccttaagaggcaacatagaccacaccacatctttaatttctccaatagagggaatatgaatcaattactgattccactcatccaatatacataggctaaccagcaactcaagttgacactattagaaaaataggctttctcttcagtttttaagttggttttagtaaaagacaccattaactccgccactgttgagccacaaacccacgaaaccttaatataaatatccttaaacaatattatttttaaaccaccaccgttaacaccactatatttctgagcattgacattgattttccaacaactatcgtagattttctaaccaccaccgcgatatccaaaacctatatcatacacactaaaaaatattataggctaaacagaatatattatagtgatgtatacctcaatgcaagttaagagacaacttcaaaagcctcaaagtctctgctgttagctgactgtcattctcgataaatcttagaaaattatcggcctaaactcttaggtctaccctcatatcttaaaataaattaattttctatagtgtatatgcattttgggtgagaaaactagaagaattaaaaaaaaatgagggaaaatgattgtatatggagaaaatagaggtttaagagagttggtggcggcattttttgttgagagaaaagatggagaagaaagagaaaataagagtttcagatttgaaattaaggttttatagacctatatcttccgttatttcaaaataaccaaagacataggcgtccccatatatctgatatggggctacggttgtggagacctatgtcttcggttattttaaaataaccgaagacaaaggttcacctatgtctttggttatttccctacacaactacaaatttaccttttagtgatacttttagtgacccgcacaaaattgcgggtcaataaaatgttaggagtgaattttagtgacatgcaccaaaagactttaaaaatacagtatttttgcaatgcgagtcactaaaaatatgaagtgtcactaaatggtaactctcataatttctataattttttttcaaaaaataatattggtctatagtgacacgccaagtgtgattggataaacatgtcctaacgtgtcaagcacgtcactaaaaagtaattatttattttacttttttaaaaaataaattatttatttctcttttaaataataataaat

SEQ ID NO: 307463 - DNA, 1621 bp, Cannabis indica
ccaaaggcggagggaggtatcgggttttgttcttttcttcatatcaaccaagcgctcctcgctaaacaagcatggcgaattttggaagatccacattctcttctggcgagagttttgaaagctcgatactttaaaaatggggagttcctgactgcatcaaaaggtactttgccatctcttacttggcaaagcatttgtgatggtagggatctcttagttaagggcctcagatggaaaattgggtttggaaatcttgttaaatgtgtctcagatccgtggcttccaggaaatacgactttccttccatacacctactgtggagaccttgagttcactgtggaacattatatctcctcagatagacaatgggatttcagcctccttcagcagcactttgggcagattgatattgacagaatcctctctctatcccttagtccctatcaaagagaagataagttaatttggcatcactctgaaaatggttcctacactgttaagtcgggttaccatctggctgaaaacttggaaaagatgaatgattcctctacttctaataccatccgaagttggtggaatagactatgggctcttaatctgcctaagaaggtcaagattttctcatggagagttattaatgatgctctgcctactgctgtgaaccttatgcataggaaaatttctccttctacagcttgctccttatgtaattgtccaagggaatcttctggccatgctctctttctttgcaccagagctaaacaagtttggtctctttccaagtttctcaataataatcaacatttacatagattaaatggctttgagattttctctcccattgctgccaaccatgtaaatgctgaaatggaaagaattctttgtcttatgtggtgcatttggactgaactaataaggaaattcatggaaccaaaccaaaaccggctgctattatctgctcttttgctgaagcctatgtccaacagtttataattccacattgaagcctgcttctcaagaggccgactgtccatctcaacttgaagcaagcacaagtaatagtcaccctgcacaccatactcgttctgtccctgttcattggactcctccaccggctggttcttttaaaatgaatgttgatgctgcctttgatgaagcaggccgaattattggggtaggggaggtcattctgattattttggtgatgttttgggagctttttcgaagcctttcagggtagtttttcagttaaagaaatggaagcaatggctattatacatagtttgcaatgggcaatgaatactggtttgcatattgactatcttgggacggattcgcttcaggtagccacgaccatcaccaaaggatcttctaggggcaacatttctcttttttatgatcttattgatgatatctctcttttattatcctcttttcctagagttttagtttctcatgttaagcgtgatgctaagggaattaaaaaactatactttaaaaacattaatattttattcttaaaccaatacagttcaaactaaaaatatatgacacttttatctaaaacccgaaatacccctctcataactcaacccgattttttcccaacccgcatatgcat

SEQ ID NO: 307464 - DNA, 1667 bp, Cannabis indica
ccagtatttgtaaaaatctaagatatgatctattgcaaaactatcacactagaacaacgattgtcaaactcagttttcataagttttatcaaaactgatgggccctatccatatgcatgtgtatttatttatagctgacctaatgatattgaaaggattccacccatttgatactgagttgtatagagataatccagcatattattttccttctcttctgataaattatcatttgctttaagtagacacaagtgttccacaacttttctgagtgaataaatataagagtcatattttttttttatatatatatataataaaaaaactacatagttaaagatgataaaaattaagaagccaagtcaaaatacatgcattggatataaaaacttataccaactagaacacttatttatttagtttttgcattagcataaatctggatcatatgtctaaactaacattgttgagttccgtttataataagataagaagttaaaaattaagtaataagcaatgccctcaaagtgcttgacaaaatgccacatagaaactctcaatctcaagataatcatcagatataaacacaaatcatacaaattaaaaaaaccacaaaccttttcttgatcacatttgagctcgagttctgctccaaagaagctgaaactctcgtacccaagcttctacttctgtcgaaccgcatttttggcactcctttaaacccagaaactaaaaaagacgccatgaaagaacaacacccaagtcaaagtttgttccgaagaaaaacatttaatgaaatcatgggaaattgaagaaatgttttcttagtaaagggcgaggtagcttgagttactttgtttaaatcgaacaggaggggagacgaggtatatgggtaaagagggtcagaagcaatgagcttgaatgagcattgtagacttgtagtagtggaggcagcgactgtgacggtgattgtggcggcggcaggtgacaaggctgtgacttttgttttagtggtagttcttaggtagtttcttggtcagtatttatttgtatttgataccacaaaaatcgttccaattgtgtagaatgggtggctaaggaaaaacaacattttaaaactggcgccttttattaaactaaaaacaaagataaggaaaaacaaggaaaatcgtagggtgcatagccataatttttttagtctaatgaaatgaaaagtatattttaaagtataaggtctagttatttaaaatatattgtaaaattttaaaaatttggaatgatatagaaagtaataaattttatcctgtcttttgtttttttaattttaaaatagaaatatttatatgaaaaatataaaaatgtaaaaatattactcctacacttttataagactacttttatatttttacattttatgttttaattatattaacacctcttatatatatgatattattataccaatttcacacattatttattttcgggtaaagttactgattggaccatgtgttttgcaactgttaccgattggaccatgtgttgtgttaattgacaaaacagaccatgtatttttcaaaatggtaaaaataggatcctgagcttaatatttgacaattttttttaatataaccaacttgaagcaattcctaataagaacagatata

SEQ ID NO: 307465 - DNA, 2225 bp, Cannabis indica
gggacaatacatataaaaagaggtatgtttcaattaaatataaaattaaaggtagatttggttaattgataaataaaaaaggtatttttcagtaaacccctttacaatatccctctttggcactttatagacaaacaaaatatattttaatgttcaaactcatacataactaagttagaaaaatcacagaaacaaactcctcttgttacaccaataacacaaaataaaatgctaactttaacaaaaattttaacacaaacaccaaacttaactccccttagaaaaaggatccagtggagtatacaatccaaaaagttaaacattactccccttttttgtgtatcttttagagccaaagacaaaagaaaacaaacaaagttcagcataacttaatgaaaacaaaacaaagcaaatgaaagaaaactaatcttgtagttcttaaatctgaaccaatgtgatcaactgcttggacatctctgctgaacttcttccatggcagccaaatgatagctcatcaaagccacaacctgcttgacctcttacaattttgcaggagcagaattggtacttacagcagcagaggggtcactagcaccaacataaatctttattcgcttgagaaaagttccgtcaaagtactatgagggttgaaaaattataccagtaagagggaactcacacgggcatcatttgaatgaccaatttttttttttttgtgggagcaaagaaccttataaattagatttgaaaaaataagcttatgagttggctttttacctcgaggaaaataaataatttgctccatgatgaatgaagccaaatcaattaatgcactcgtggtgattcgataaaaaagaaagaccaagtcttgagacaccattgtcttgtttgaattgaaaaactaattactaagagtaaaacgcatgagagaggcatgaccatatgtgagaagggtgattcggacactatgaccgaaaagctattgaacttattaacatgtgatctacaatagaagaagatgacattcagaagaaacaatcttattctcaacatatatatttaggtaggtgcaatacattttctatgtcatcgacagtaaaagaaaaccaatgcctcgaacataattaaagttgtccaaaaaactaaaaaatttcattaagaaaatcattagacaaatttgcataaaattctttaaccccaccaacatacctatcaaaaccagataaagggccctcccattatcttgttgcaaaaattttacaatcccataaactcgatgagcactcaaaataaaattcttctcactctcaaattttcgggtagcatacaattttccatccctttgattttcattataacaaaacctaaaattatgtggataaaaattagaaaagttaccagatgaagaacccttaattggttgtttacccttatccttggcaatggcacgagatgtagaggcagaaagtggtgttactgctatagattcgggaatagccattttaggagagacaaattagaggactcaagttctttttcatcttcaaagattgatggatcttcttcattcctagataaaacatcatcatcattaccaaaagcacctttttcaaaaagaaaaggtttgatcctttgaattggactcatcactaggattcttcttaatcattactagaggatgcagataaagggttttgtttgagccttttagtagaaggtaaaggcttatcatgatgtcttttggttcgttcttccttttcatgagatgcttgttgagcacgggtctgaataaagccttgagaagatgaaacttgaggaattgttgctgcagaaacacgaccagcagtaacaaatggtgatcgccacccaagagattgagaatccttattagtgggacgaagattgaggtctagtgttgataaagacttggaaccaaatggagaaatctgaggaatgggattatagccaactgtttttcaggcttaggtttttgtttttctcttgctcgaagatggattggtggaggaaaccatggtaagaacaggagccaacaattaagacaaaggagaaactactaaaaaaataatttttcccaaaaattttaaataaccagataatgtattatcgtaggtcatgtaacgtctccgctttaagcctccattgggcccttacacccacggaatgatggctcttatacgtgaatacgtcactctggctccttcctg

SEQ ID NO: 307466 - DNA, 1567 bp, Cannabis indica
gggcccacatcctatggtcagccactattgctttatttttacatttattttatttttttaatgccaaataattctaacctaaacctaggttgttccatataaatagatagtgatggcctcaaatcaaaagatgatgaaaacacttgccttcagtaaaaagtttgagccatctattctatgccattcgaatctctcttctctcttcctctcttcataattccaaaccctgtagtgatagagtaagtgctcacacacatcaagtggtactcaatcatagtgtgtaaggctgtaaagaatcaaaatttcagagaaggagattcgggcttagatcatggtgatactctgctacagacaggatacaagggttagagatctgagcggaaggagccattataatttcgatgcacccactgttaggtttctcaaactttagatgtgtttatttacattgttttattatatttaggatgttaaacaacatacatgatagtaaatctagatcctggtaagacatattccaacagttaatggccctcgaatttagattggttgtaggctccctactgtggggagagatgaagaggaaaagagatgaaaatctaagtgaattcatggcaaaggcacaagtaatcatcaaccttgaagatgcctatatacaagcttttagagtttctctagctccatagccttccacgaatgctccgaattacacacctccagttctggctccaactttgcctatacgcagagcttagtatatcacaactgtttatgggcctaccacttccaaactagcccctacatagaccaacttttctgggtacggagcgccacagtttgggtgtagtgttgtgctggaacaggcaaagactggggtccgggagtccaatctaagccactcccagaacaaaagagggggataaagccataaccataacgactcttcgaagaagccaagagaggagtatgagccaaaacatactgagtacacaagcttagtcgacacagaggagaatgtctataaagccacctgtagcatggtccactacagggagcctccacgtatgtcgcatggaggaagaaatagacatgaccagaataaagaatgcaagtaccatggagagaagggtcacactacaaacgagtgtgactatttaaaggatgagattgatatgctagtcccagcaagacacttggggtagtgggtcgcgcatcctgattatttatctcggacagggggtggctcgtggacacatgatagtcccaggacagtggaaagtaatcaagattatgtgatcaaagatatattcctagatttatcagtacacagggtttaactgatatgacaatctacaacatagtttacttgcaccttggataagtgttatgttctttccagagcatttgtcaaagtaaacttgggtcggatgcatggagtaagcatcggaagggaccgatattgaactttgattcagatatattaaacttaccgtaatatatattgaattcaatatcacctagttgatcctcgatctaatgatcttaatcctgatatggttaggttcaa

SEQ ID NO: 307467 - DNA, 618 bp, Cannabis indica
cttaaatttaaaaaaaaaaattaaaaaactgtatatagaatttaatgtataattcaaatggctcaataaataattgatacgtacaaaaatattaggaaaaaaaaaaaagtcatttgggtgatattatcatgtcgatcaacatatgatgtatgataagtttgtggacatactcgaacacgatagtctacacaagaatacaaacaatattagattagggttaagatttttatgaactcaaatatgataaagtataaccattttgttatatagttaatatgaatgtatcaagccgtagatctcaaaatggtagctgtcgaaatatgatgagaggaggatgaagacaaaagtaaatttcacacaatgggtaagaaaatgagaagttgtaataataacaaaagaaaatgcatattccatttttgggtcaactacctattctacagtctacctagaccttacaaaacagtatcacttcttcaagaaagtattattagtggacaacaataaatgtatttaaagttttatatgaagtgtgtgattcacatttatttatcaaaaataaaagtattaaatgtgacataggtacagcttgaagaggtttcgtaaaaaaaaaaaaaaaaa

SEQ ID NO: 307468 - DNA, 1481 bp, Cannabis indica
gtaaaataatttccaacactaccatgacaaaccatcactgcaaaaacttcctgctttccactttttgtttttacacatcaatctatgtttctatagccacctgaaattccaaagctacaccagaatttccaaaatctcaatgtacccaaactaacccactcacaccaaataatccttcttccaagcagctaagacactaacagaatcaacaacaaaatatttagcaatttatttttttctttgacaaaccggagggattgctagtggtcagcggatccgttgagtttgttcgagacgaaggtggaattcgaagtagtgactggagctggttcgtgctggttgtgtggtggtcgaatgaacaatgggtggtgatggttgaagcttcgacggttggaggttgaaggatggtgacatcgggtggtgcagggacaaagtgatgctcctaagttgggcaaatggaagctactggtgctagtaatttggtgtttgaagggaggttacgggttcagatgcggttgggagcgatttggtgaatgagggttgctttctggtgaaagtcgactggaggtggtggctacaggtcgagtttgggagctgggggcttcggagttgagttgttggttcggcttggtgagtgagttcaggtggaggtcgactggacagtggttcaaagatggtgaatcgtgaaaggcaggcggttgggaatcgtgaagagagacgaaagtgatggttagggttgatgatgattgacttggatgttcctcattgtgggctaactaagtgtgagggtcaacacttgcttgggcccagttgaccaattaattgggcccaaaactgattaactaaaagtaaaatagggtccttgtctctccataatcggcttgggctctcaaaattcaaaatgaagtacagcctcaaatgatttgtctaaacaaaaatagacatccaatgattgcatcataaacaacatttcaatcacatgttctttttttatcagaccactttttttttttaaaaaaaaacccattcatttgatcagcccaataccaaaacaccttttgctgccaaatgacgtagttcaccgaaatggccaccatatggggctgaatgacaatccaagatgcttctaacttcacttgttggcacacatctctgcattatacaatccggacattgcttgtacaagtatgactcatcccaaaaataaaacttgctatcatgaaggaactttttgagttgctgcttggtaaaatcaggtggatgggcacctccaactaagtaatcgacaatatctggataccatggcacccgtgcttgctctaccactagcaattaatcatctggcaatgagtctcgaatttttctccctctaagtggctgttgtaattgttggtttccaacctagatagatggttcgccactttgttttctgtcccttttttgtctcggatttccaaatcaaactcttgtagcaacaaaac

SEQ ID NO: 307469 - DNA, 1976 bp, Cannabis indica
ttattaatttaatgtgatgtaagattataatgggcaaattttaatattgtcaactattgaaatatttttttaagaaaatttgataaataggtggatgaaaaaaaatatatatttttaaataatgtatgtattttgataactataaaccctctaataagacttctctaagttatggttatgaacttataataatattagtggccccactttcataataattttattttacaaagtcaacagaaagatagaaaacaaaaattgtttttatttacataagaacaaactaattattatcattttaatgataccaaacaaatcaaatatgaatcaattaatcaaacgattttcatggtttaattaaaaaatttaagaacaaaaataaagttcggataaataattaaaagagagagatagagaaattacattaaaacgcaagaactcgttttgaaggtgtttgagatgttgttttcgccagtgctccaaattacgttcgttatctttttcaaacaaatcactgctcttcctgaatgaacttccttcttcacctttccattttcccagattttctatcaaacatttctcatccactccaactcctttttttaattatttacatatataaaaaaaaatattagaatatatatctgattataataaaattcatatattggaaaaataaaaataaaaataacctttgaaagcatcggtgacaatttgaaccgtgtcggagagagccatattgatagtgttttggagttaattaaagaaataagaaatagagattatattgtgagacatttttcaaaaccagctgcattgctaatttatatgaatggacaagggtattttcgtcacttttaacttattgttgtttttttgtaacgaccaaagtaattatgaggttacttttgtaaacggatatccagcaaattcaaccttctggttcaggaaaaaaaaacgttaatcatttattccgttaataaattttactattttgtctttaaaaattaaataaagaaataataaatgttctgtttttcctttataggaacatttaatttaatttaatttaaattataaacgtataatataaattactgaaataataaagcaagctttgaatgtttaaatgttgaagtttcgaacctggagaataataataaatagaatatttctttcttgtataatatttattaggtaatttataatttttatgagcacttgttttttattttttaattaaagaatatttgtttctcattttgcaagcatatataaaatattaaatggtaattaacttgtcttagaattagtattaatggtcaaattacaggatatatatatcactgtattagaagaattgttcgaagttacatcaataatgaaggcttaagaaatttcaatagtctataggcttagaacacttttatctctttacacaataccatatattagatgttttttatattttttttctatattatttaaatattattttttaaaaatatataatatcaattaaaataaaatagaaaaaagcaaaaataataataaaataaataataggggagagacaggtaaaaataaactaaaaaattattaaaaaaactaaatgaagaaccaatttcatctcattgctacatgtagctacaagtttcttggtgtaattgcatatgtaaattacttaaatgtttgtccatcagctccttcatagataagtgttaattcaaaaatttaaactagaattctaaaccacactctctcgctagattgacgagaatgaatagaaatagttaagtgattaagagagacacatctaatttatagtaattcaccacctatatcgcgatagtaatagagttacgactatttcgagtttttattttttacgagatagtaatcacagcaatagattaaatgtcagaaactccaaactctagagagagaaagtagtagagagagaagctctgatcttg

SEQ ID NO: 307470 - DNA, 1365 bp, Cannabis indica
gagctgaccctgatcttgtacttcttaacacttttgtatggaatattattattagtatcagtagtgtttatcacctctaaatatgttgttttgctattggctagcgatactctttaaaaattattatattacttaattaaactaataataaaattaacacataagaaaatactagacactactgatacctttcaacatttctcttttatatgttattatttcatagtcaaaatattgaaaaagaaaaaaaaacaagtcaaagacatgggtgtgatgattaataaatggctaaaatgaatataatgaaatggttggtgcttgagtagtaaaaaatagtcttcatggtgtttctcttctttgaattttcaacgtgggtgttgtgagtgcaatcaaaaaaaagccaactaattatgtccatacaataataatgccataccataatattttgcatattatttactacccatttaataaaaactagttgtatattaataatttgttttgaaaaataataataattgggagtgtgtgtgcatttttgacttataatgaataccttgccttaaatatctctctatcactcttaattatagcttttaaagttttgagctccattaattatatctctaaaaggaattaaaattattggatattatattaattaccatgaaatgcaattattatttgtgaaaatggatatataatgtcattttgtcaatgtgtatgtttggcttaatttctactatatgttcttttttagtttttaaaattaaagaagtttttctaggagtatttagataaaaaataaaaaactaaaattaaaataatttatataatttttaatttacacataaaagaatttttttttaataaaatccaaacattttaaagagtacttttcatttaaaaaaatattcatataatagcatgcctaaccattcctagggcccaattaggccaaaaaaatttcttttaaaattacacattttttattaatttaaaaaatatcacattttattttaaataagggctcaaaaatattttttctttcctatgacctactaaattttaaagtcgaccctgtatatagtagttatccaaacaataaaaataaattaaaatttatacttctagctaaatagtgttaacatatatatatatttatatttattgcactaaaattatcttttcaacttgaaaaaaataaataaaggatataaagaatagtagtaatagagagcttcaaaaaagtatgtatgactatagtgccacaaggatgacaattaatgataaaataaaattataaatatttaaattataatagttttttattataattatctgtaaaatattattaaaaaatta

SEQ ID NO: 307471 - DNA, 1707 bp, Cannabis indica
ctctctctctctctctcattcatctatggctaaaatagatagaaatctcagttcttatcttgattttgtatgcatggtttctaatttcttacatggtgtgaaaatggccgataagaagatagaaaaattgaagcttaagatgatcacaaatcaaaagaagaataagcaaagaacaaatgatcataatgatcttactaattataaaaagtcttataagaagactaagattagaaatcaagaattctataatctcaattacaaccattcattactcaagagaggtttcattaggactataatgatcttctctaggttacttgatccacaagattctcatgaagattattactacacaaactcgcaaatattcctacaccaacttcacaatctcctccctctaaggaaggcgaaaaccaatgatgagttcttacttgtgatgcaagaaatcaggagttcttggattaaaaatgccaaaattcgtgataggaagataaagaaattggcaagggctttgaaagtcggtattaatagttatgatgttgatcataaaggagttgaacagaacgagtggactatgattgatgttatgaagaagatgtatggatttgcaaaccgtgaaaaggcgaaaaatgaagagaatatcataaggaagttgaaggaggtagaattaagtactctgtgtttgtcaacttattgcgagttattatcacctgagattgatgaaattctgaggagaaagaagagtaatcttggcgagttcttgaagctggtgaatgggatcaaaaactcgagtgagctcgatgtggagatagaggaagctaatcacgagttattgtggtggttgtactatgttgagagagagatctttcttcttgttaatgatttgacttttgttaacaataagtgcccattaattggtttaattagaaagcttaaagagcttaaacaacaagaacaagggaaggtggctttagtggtgtataggatactatttttactagaagaaaaaatgaaagttgatcataaaggcttatacatggatgaagttgaatttggatatttagtgcttcagctatacaagatgattttgttgtgcacacatgttttgaataacatctccaatttaaattcaaataatagtaatttattagtattagaaaatgtttgtaattattctaagaaagaagtgtttattgagtcttttgaacttgttagaaaatgtgatgagaaaataagtgctatgagaagagaggttgatgagttcattagaagttaaaacatttttttttattcataatgtaaatgataacaatggttgaccataatgatacaagttgaatataattactttaaaaatgtggtatttttttttttatcgagaataataatctttctataatcaaataagccatttacaactaaatagggactacacccacaaatttacatcaaaacttacaaacttttagcatttctaaggataattctctcaaaactagaaagctttctatcttgaataagagacaatctagttttaagattctctttaatgcttctatctatatacaatggggctatacattttccttcaaaaacacacaagttccgattgagccatattccatatatggcactagctagtgtagcatagtagatttctattaataaacttctcggtctttttccttggatccactcaagaagcaa

SEQ ID NO: 307472 - DNA, 1372 bp, Cannabis indica
gaagagtcgcgtgaaattagctcaatcgaattcaggagaatcaagatcaaggacacgcaggcacagtaggttaaccgaagctcataggaatatgagagatgaaggtggatcacaacgttctttaatgatcgggaaagtatgagtaactatatagttaccaatctgaaagttactcaaggactaagtccgtgagtaattataaccaaagacgtcatcgtcttgatctccgcgagcagtcaaactaaaaacaacatgatctatgtgagcatttaaactcttattatatttactgagcaaatttatcaaaccataaacaatattatataatttttttttaataataggtattaaagatttcttattgttattgctggtacatataacgttttttggtatttttttactaataatatttttttttttttgctaaggattactaatatacttttgtttagttgtaatctctctcaattagaatataatagtttagccctaagtatattcttaaataaaagttttaatgtatatgcaacacacaattagactttgttgagcatgctgcgtaagactaccgagtccacagttaaaccaggcccaatacctataagaacaccccactccaatccatctccagtggtggatttcctttcctccaatgaccttttcctcaaacttgtccattacaaaaagcacgcacgggctcgacatattcccatactcactcagcacgtgacgtgagtccaccatcttttctttctctagctccaacttagcctcaatctcatctagaatggcacgaccacctgtctgggtgtacaatccaaaatagggagtttcaatcactaatcccaataaaatgtttgtagaaattaactcaggcaagctcttgtgtaagtgatacatttgccctatccaataataatgctcgctaaaatataacaatacactacttttttaatactatattggagatactctcacaaatctaacttttaaaagtcaacagctaatttgattttctcaaaactttattaaaatgtaaataacttcccattataacaactcaaatttatctaaacaaacttccatcaatgaaaaaaaaaaagagttaaatggccaaaaacccgtatctacaaattccacgtaaaataacctttgactgtattacatgagttgagtttcacaattatcactatcacaaaaagcatgccttcctttttactttgacatatcttaagcaaaagagatttgctaaaaaaacattactagtgtctagcacactcttcaatatcatactgttattggtgtaattaaaaattgggtctcatataatttaaaaaaagtaattttttagagaatatcgctaatcaat

SEQ ID NO: 307473 - DNA, 1623 bp, Cannabis indica
ctttatcatcctggaaaggccaatgtagtggccgatgccttgagccaaaaaagtcaaaggacaagtgagtaacatgaagcagatttcaaagttgttggtagatgcaatgacaaaggctaacaaagagttagttgtgggaaaactagccaacattaccctacaatccatgttactagaaataatcagagaagcgcagtatgaagaactagatttcattaagattaaggatagagtactagctggcaaggttgaggatttcactatggatgacagtggtatgttacggttatgaactgtgtatgtgttcctgtgcatactggtattaggaaggagattctagatgaatcccataccactccttattctgttcaccctagtacgaccaagatgtatcaggatttgaagaccatgtattggtggccgggtatgaagaataaaatagtggattatatttctacttgcttgatttgtcagcaagtaaaggcagagcatcaaagttctgtagggttgttgcaaccattaaacctactggaatggaaataggaggatattaagatggacttcatggtaagattacctaagactacggggcagtatgattctatatgggaaattgtcgataggtatacaaaatcagctctgttttttcttgttcaaacaaacttctccattgattagtatgctgagttgtatgttagagaaataattcatcttcatggcgctccaaagtctatagtatttgatagagatctgaagttcacatcaagattctgggagagtttgcaacaagctattgggtacacagaaaatcaacacatcatttcgtcctcagacaaatggacaatctaaaagaacaatttagtttttaaaagacatactatgggcatgtgtgttagattttgaaggatcttgggtaaagtaccttcccttgatcaagttttcttataataacagttatcaaccaactatcaggatggccccttatgaaccactctatggcgaaaagtgtagatcacctattcgctgggataagttaggtgacacgaagtttcagggtcccgaagctgtttagaaaacaagcaaggcaattgataagattagggcttgaatgctcatagaacagagtagataaaagagttatgctaatccaaagcggcaaaatgttgactttcaggttgaagatatggtatttcacccatgaaaggagtataatgcttttgcaagcgagaaaaacttagcctgaggttcattggacattttgaaatcatggagagaatagggcaagtggagtacaggttggctatgcccccaacgctaacaactataaacaatgtattccatgtttcaatgcttcagatatatgtggcagactcatctcatattttgagttacgaagctttggaacttcagctagatctttcatatgagtaacaaccagtggaaatacttgatagaatggagaaagttttgataaacaaaacattggtgttagcaaaagtgttatggtggaacaacaagatcgaagaggtgacctaggagttagagtctgatatgacaaaaatattcaaagttgtttaggtaaattttaggatgaaatatttataaggaggggataatagtaat

SEQ ID NO: 307474 - DNA, 1369 bp, Cannabis indica
cctggtaaaatattccctacagtattatcattatgattttttttttatatgtggaacataaaactagtgactcttataattggaagggtattttggaagctcatgaaattattttgaaaggctccgtctctttggcagcatctagaggatccatagatgtgtggaattagccttggatttcttggtttaattactatgatttcaaagatctaatgtgcaatttaaggctaaatcgttatactatgagatcagtggctgatatatcctctaactctgagtggaacaaggaaatgattttccaatttttttggtgattctttagctaaactagccgtgaatattcctagaatcttggtggagtttgatgatcagttggtcaggaaacataggaggaatggtctattttcggttaaagatgcgtactttgtagatcaagaacagagattttctcctaagaaggatatttggaaatggtttttgcatcctgatattcaacccaaagtttccattatgctttggagagttctaaacaaagctctcatggaaaaggattgtctattgtgtgggaatatggctgaaagctgtctgcatattttttgcgactacatttttgtgaaataagtttggctctctggcttgtttccgtgtagaattgatgcaattctcggagactccgtgatctagttttttgaagctttctttttggtattcttgacttcaaatcataacatttgttttacttattttggttgtctgcctctggaggtttggcagtagaggaacatgttatggttgaaaggaggctttgcaaaccttgaggatgtgtgtagtaagatagttcatctcttctttgagttttctgtgtcgcatggtgatcgtgggttacctttgattaagctgaaagaggatggaagcttgcctagtagggatgatattgttattgttttatgcactgatccttcttgggtagattttattgttggtttttctgctataatgacaaattttgatgatggatcctgggctcagctctccgttcaatcttgagctggttttgctttggaggcgaaaattggggtggttcatatgtgtaataccctaactagtttaggcatgttaacatgatttttaacttactgtgcaactcattgctaatcaacgaggttattgaaaattgtgattaattaaaatttgcttatttaattaaaacataaaatatcatacatataaacatccgggatcccattttcaaaagtatttacaaaagtttaactgtatataacaaaaaatttacgcctaggaactatacaaaataagaccttactgtccaacgatcgtacgctccaggcctaaccgcccccgaacatgt

SEQ ID NO: 307475 - DNA, 1928 bp, Cannabis indica
aaaaaaaaaaaaaccctcaaaatcaattttattgatgaatgacgtggaagcctaatagccacgtatagagtagaaaaagaacacgtgggaaaagcctagcctggattgtatgatacaactaagctccttcatccttggaaaacctcaacacttagatttacagcttctcagccatggcggccttcatagccagaaagccaagaatattattctcatcctcactgcttcttagagcaacggctaacgattcctcttcatcagttacggcggcggcggcccatggcggcggttcctcattcaggcgagcttcatcttcttcatcatcatcatcatcacctccatcaagtaattcaacgaagccggagaagaaacttgtggaccgattatccggcgtgattgacgccgtcaacgatcggaagctcccacccgagctacgtggacaacgaaacgccgtcaggtgccgtgccctgctttcggttctgtacccactttttcattcaatttagggatttcaaagatgtaaataaagaaaccctagttctttgatttagtcctattttgttgtaattgtgaaattgggcaggtcagagactgacataataaatgttgtggagcaaagaatatggcattcgatggaagaaggtgggtttgagaatttagcagggaaagggaagcctcttaagcttgatagtagtaatcctcatgctgacccagctgaggacaccttgtatagaatcctttccaagaataattgtgctcctgaatgggttgaactcaacaaagagatcaggaatcatatatgtgagtggagatcttctttgaagaaagcttctagaaaatacaacaatggtgatactggtggagattattcagataactctgattggattcaagcttctgaggctttaaagatgcaattaaaagacatcaataacaaggtcagcctttctcatctcaaacaatgccattatttagaagcctttcaagtgtaaaattaatttaagaagtttggatccttctcttaatgtgtaagatttaatgaaatactacattgagtttctgttagaagatttatagagacaacaacagatgattaaccttcctccattaaaaaaaaactgagaatataaatattataaggctcacatacaaagttgaaagtacaagattcttgtaatgaaactagaaatattgtgactagttactattttagatgagaaataagtttaagccatgaatcatttttcatgtgaggattgaattaattatgcaggttttccggtataacttaattgttcctttcggacggcaaatgtttgggttcaaatgggagaaggagttggatcgcttggatgcagaagaataattcttcactatttgattttgtgtattatagatagtttatgggatacagtactttgttgtgttgtaatataagaagaggacaaagacaatgatacataaaagagagttcataatgttttaaatagtactagtgggtaatgttgtaattttatgtataattacggtgatagccgcaccatagaatgagaattatggaaataaccacctcaaatattgaaatttgcaaaatgactattttctttatttttgtatttcttatattaaatgtggctatctaacgtaaattatcagtttaacggtcttcttttcgctaaaagttaacggtcaccgaggttactttgcgggtaaacaagtgataatttacaatgaatagtaatgtcaaaagtgataatttacaatgaatagtaatgtcaaaagtatttttaattataatgaaagattaaacttagactaaatgaatcatatgtttcattgatttaatacttaaattaagttatctccatagaatttaatatttttttaggttaaataaattacatgtttcgcaaatctattccatggta

SEQ ID NO: 307476 - DNA, 1680 bp, Cannabis indica
tatattaaaaaattaattaaaaaaatgataaaaaaaaaatctcacttgtataggattatttatctcaccctgttagatgagataaattattctagacaaatgacgatagataaattagttatccagatttctaacataaccaaacgctgaattgaacaaattaacctgtttaatcaaaatcagtcctgcgtattaaacgaactataatttaaagacttacgttacaaataagtcataaataaaattagacaagcatcccaatcattataccacaccactttaatttaatagttaagtagctatatcattctcattaattttcaaagatggcgtgacaccatccttaataaattcataaagtaattcacatttaacaatatattaaagttaagtctaagtctttcttcttccaagttcatgcatatcatagtaactatttttatttttatttttggcattttcacaaagaacatataatacttcaaactgacgttcacgttggcccaccaattcactatgtggtattactattaattaattgttggttttgctaaaatataataatggagatattttgtattaaaggtaagaaatctaatcgtaattcagtcattttcattgttgttgaggtgttatttgaacaccaattacaacttaatttcaaataactaaaaataaataaaccaaattctaattaataatatcttccattctcaattgattatcaagagataaataaaagtaaaactagtcatgcgtcatgatagatggatacattttaaattttacactacattttaacatatatatttattaatttccttggatcgaaagtgatcgataaaactaataatatatatatatttttttgataaaacataatattaaacttgtaagatttatatttattaagcctggtttctcacgcataattagattaaatagtttgtccaatgtaatatttgtacatattaaaaatctgaataattaatattcagttaaaaaaatagtccaacttattcaaaaactatatacaagattactttatgcccacaatttaaaaaaaaaaggaaaaaaattactttatactaatgtatagatttatcagcttttaactgaattcggatttaaaacttctattacatcaaaattgtagtgtgataatcaagcaggtcttcaattgcctcaaatcccgcgttccacgagtgacctaagcacaatgagattcattgtcattttgttcgtgagaaaattcaacaaggtctgatctccactggatatgtgaagatcggagaacaattaaaaggtatttttacaaaggcttcgaatggggtgtgtgttgtttatctttgtaacaagctgggtatagttaacatctatactccagcttgagggagagtgttagaatattagttttaaaaattaaggtaacttgtatttagtagtttcctatttgtatttagtaacttttcatttagtctcttagctttgtatataaatatatgctattctatgaaatacaacacacaattcgattcaccattctctacagttatagaagctatagattctatatctatgattagcgctcccactcaattgcacaaccatgttcccaagatgtaagaattgggcagatctacgaacaagttaaaaaaacacaaataatacatttaagcc

SEQ ID NO: 307477 - DNA, 1941 bp, Cannabis indica
gtggaaattgatcctctaaaccatatatattctatctcaccaactaacttaactaactttctgttatgttagttagttagttggtaccggttttgtaccttgttttatggggtgaggtgcaactatatatagtctactctgttcaccattaaagaatgagaataagaaagaggtgtatgagagagttgcttagatttttaagctgagagttttggttcttgaagagggtcaagaacaaggggtgtactcgggtagggagagagaaaactgtgactgctttctctggtgtgttttgagtactacagagctgagattgctcttgatcttgtgattgtattgataccctcttgttccacatattaatgaagaattggtgatgtttctcagctgaagtatggccagggatcatattgatctctaggaccggaaccaggataaaatcatgtattgttctttgtttaatttctggttttgattcattgtgttgttaattgatttatgttcattattgctttcaaaattgtaagtttattgtaggcttaagattgaattcttgttgttaatgtggagggaattactacaaatccacatgtaaaaaatcatgactaatacacattaaaaaaactgatgaagacgttgcaaaaggaatgagaacaagaaattggaaaaaaattatatgtatacactaaaatagaataaaaaaattgacaattagaagaattttcttctaaaaagaatcttatatatatatagttcacttacataattaaaccagttatatatttctcaattctaactttcctccctttttccccttctcttaatttttgaaaaatttcttacttcccattgaaaataggttaattttcattaatatacacgttataataataattaagtatcgtgtgtggtcatgtcttagactttccaagatcttgcttggtggtacaatttcttattcaatattatcaatgttaccattaatttaacactactatgaaagattaatgtaggccatggtgatcattttgaaataataaaataaggatataatgataattatactttatacactatctttttataaataatataataaagtcttcaagaatttgaccaaaacgagctgatttaatagtggaaaatgaccaacaaaaaaaaaaattggatatacactatttgactagaacaaatcaactcggttagacaaaaaatttaatatctatattataataggatttccattcaatatacaataaatacaatatatcattaaaaacactattttaagctcattattaattaacattggaccatagcataacaaccactttattataattttcttattataagtagatgatcacaacacaactcacacaattcatataacatcccccaaaaagaaaactttcttagctctaaaattcaattaattcagatccaactctctctactatttagctatacataaaagatgaaacgttttgtctatttttcaatatttgttctcttagtactattactagaactatctcaatctcttccaacttcttcagatgatcaccaaaatcagttacctcatcatcaccatcatcatagaagatcatcttctgatcaagctctaaagcttcagatttacgttcgaagaagaggaggcggccgcagcattagaggtgctggggctgcagccgctggaggtacttctactcgaggcagtagaacatcctcgtcgccaccaatcagaaaagaacaaacttttcttcatgtcttcttgtgtttgactcttttctttggagttgttttgttctagtttgattgattcattcatgtgttcatatttttttttagaaaaaaaaaaagcaattacatgtttccatgttatgttccaatagatccaaatattattcaagattgattttttcttttcttcattatttt

SEQ ID NO: 307478 - DNA, 1476 bp, Cannabis indica
ttttttacttttagttacaatttttattgtgactataagaaaaaaaaattgtagtactattgcaaattctgttagtgtctaaaatttgacacatataaggttcagattctaaatcattaaggacggacacgaatttaagtcactaacggaatctatattgacaaaacgagatgaaaattacaactttactaacatttggtatttatgttgttaaaaaataattaaatttatgccgcttataaatttaaaattttaaatacttatgttgcatagatagacgaccgaacatagaaaaaaatagtagaaaaaactatttaatttctgcttacatattaaatgtaagttacatttctctatttactaactacttcataatctgctatacctcatctttctctagatatatattaagaaaaaacttggtcctgttatatacaactttcatgaatttcaggaatcatgtgcttcaaaaagcctttaaattgaaaatttggttgatatggtatatcatcatatcgaatgtaatgataactcttagaaagtgggatcaaaaaagggtatattgggagatcaaacttttggcttccataataaagagagtgattggttttaggtaaagtttatatgtctgattcttaaaaattatgagtctctatatggagaaaaaggttacagtgacggatgggtccagtagaatgaaaaaggtaataataatgcatctctagggtttacctggaaagcttatccaacgataaatttatatataaataattattggtgattatataaatatataatatacatctttttaaaccaataaattgggatttttcactgttttaatcttaatcatgttccttgaaatcatattgcctgccacttaactagctagtactatttaaacaaatccacgcaaagatatatattaccaaatgttttttcaagatatgtgagaaaaatatataataattaaaaaagaaaagaaaaaacaatcacaatctctttccacttttagggagtccaaaaactgattttatttagtgaaacaaaagttttacgaatgatttctaattattcactcttgtatgtgtgtatatatagggtaaactatttatatagatagatccttgtcatcaatcaatactcttaaaattctccaaacatttcactttacaactctataagagtgaactgtcttatcacatgacaatataaatgctaacacaatatatataatgcacttcaattactatatatataaatatgtaaccataattaagagtactatttgctacttagttataaaacccagttcataatcttaattatttatggatttatttggtacgccgtattatatcgtattataaattattatattatattatattttatgtaaaaactatatgtgatattaacttttataaaccacttaaatatataatattttaatataaattaaagtttaacatagta

SEQ ID NO: 307479 - DNA, 2351 bp, Cannabis indica
aagttgtaaccacctaatttaagaatattctattttaaagtttaacaacttaaaaaatatctctagaatcttcaataaccaactcctagatggagtgtatgggagcttctgatatcacgtcttagcttaccattggtaacgtgttcaaggtctccagagaaagtttcagagaacgtgtttgaagttctggtttagagttacattgttatggcggatgcaaacctaagctctttgtttaaggactcggttcaagttactactaaggatctcacgtgtgatcttaacccaggtgaagtcgatagaaatgaggaacctagtcgaatccttctaggcaaactttattgccacaccagattgggacggaaagccatttttggctccctgaacaatgcttggagctcactaacgggatggagttggaaggaacgggaagatggccttctccagttcactttccaaatgagttttgatgtagagaatgttctaattcgaagaccgtggcttgtctgtgggttcgtactagtgctcattccatggccctcttggctcacccctgccgaagtgtcatttgatcaatcacttatctgggtgcgactcaagagcataccaccgttctactggaacaaaacaaatctgcaagaacttgcagggaaagtttctgctgtgtatgaacttccaagattcattgagaagaactttgagcgaggatcgtttggtatgggaactcttcgatttcgggaagagttgatgttaataaacccctgttctcagggttctttctacggaggaaaggtatcaaagatctctggatccaataccaatatgaaaaactaccgagaatctgtttcaaatgtggggctctttctcatgagcgtaaatattgcttcaaaacaccaactgtgataaaggatgacaagggagctttctttcccatgtttgggtcttggatggatgaagacgtcgtggagaaatcgccgttccacctgcctctcccgaaatggttcaatgattggatatcccaacagcaagcgctcattgatccaactgttaggaaccaactgaagatgcagcaaagatggcgagaggctgaatctactgagtggagggaattgcgtaggcaaatgccaggtaaacggagacaggtggaggtagtggtggaaaatagagaggagtcaggtgaagtggttttaaaccgttttctggttgtgtatctacctgggacgggcaagattatgcctttcgagaactcgacagagggagtggttgaaaaagtgatccttgaccgtccacctgagaagatagtgacagagcagggcgccccatccaacaccggtagtgagtcgacgggtacggagaaagaaaagcttgaggaaagcgtgttgtctctttcccattctggggaagcaagtgatatggatgcagctcccaatagtctgacccaatgcaagagtggaaattaacctggaaatatcaagaacaaactgtgcacgccgaaagctcctggtaatgaacttgttttaggagatgcttctcatatagccattactgataaagaaaatattacattaaataacaagtataaagtggggcttttctttaactctctccttcggcctgaggcccacccgttagaatggccctctagtgcttgttgggctagagcatttggacccttaacaggatcaatcacggtggacgaatttcaaagggagcccacccttttcaatccaattttggatatagaagacattaattgccaagaaattgaacttgggccaaaaaagagaaaggctatagatggtttttatatggtctgaggagtgattcctactcactaaaaagctgccacttctactaatgcctcacctgcaaagagtatcactgaggagcctttggcagttagagatgatcttctaacttactcccctgggtccaatgaaggccatcctcaaaaaagaaagaggggtagaccaagaaagcactttgagaccctggagactcctgtgtcttcaccaaccaatagaaagaaatcggagaaattgaaaagttggactggagtcaattcaaaaagtttcaagaagaaaagcgagagactctcttctaaaggaaaaggcaacctctatcgtaatctctggaattctaatggtattgatttggccattgacttggataaccagtttgtcattattgagaagaacaaagaaggccaatcgtcttatgttattgaagaaattgtgcaaagtggaacccaatcccatctagaaggaagatgcagagcaattgatgaagagaaaaaatgttgtgcaggattttcagtttggggctatggagacttgcccagaaaagtctcc

SEQ ID NO: 307480 - DNA, 760 bp, Cannabis indica
ttaaaaaaaagaaaaaataaataaaataattatttgttataaagtattccaattttaaagtacatgacttaagttaaagtaatatatatttaatcaccacaaaattaattttataactaatacttttaaatacgataccaacttttcttttaatttttttttttttgagaaatcagaaagcgaatttcatgaaaaccaaccttacatcttaacaacacctcatttaaataagcctaaaaaagctatacattatttcactttgtttgaggctatgcatctgtataaagagactagagagctagcactagtgtgccaatccatccaatccttagttgcctttatgaatttcaaattcacatgacaattaaaaaataaatggttaacatttcatgttttgaacaacaaaaccaaacaatcgcagcatgtttaggactattaaatctattccatacctcattgttccatttaactcttccatcttgtagacaaagaagtcggaagcctccttgatgtgaaaatgatccaacaaaacatatctcttacaactactatttttctctagtactaactactctgtaaaggtgcagagatgtcacaccaatctgcattttgtaagtaaatactataaatccatttgatccataaattacttttttttttatgctatggcccaaaagaatttccccaaaggagcaatgttcattacaagaaatgtcacttttaccagcatagttcgctactgcgctggtaaaagttactt

SEQ ID NO: 307481 - DNA, 2059 bp, Cannabis indica
catagaaaaatgcatgagctgatacgaagttcgggtacgtcgccaagcctcgtcgggctatacattaacaaaaaaattgtttttatcctgtctaactaatcatctacaattttcaaattaaggtaataaaaaggaataaattaaaaaatttgaccaaaaaaaaaaaaccatcaattgcgcgtttcctttaaaaatatagttgatacatcattcaatacttgtgagacaaagtgtattaggcaatttttaggtactagttccaaataagatagcatacttacacctcttttagtttaatcatatataaaatgtaacagggtaatgaatttatctaaagaataaccccagtttatacacttaccctttgtttttgatagcaatacttttttaatttaacttctatttgcaaatacgtggcatcagttaaatttcactttaaatatcaattgatgctaccattctatgtacctacccatatttttattggtccaaatacttttaattattcaaatattataaattttattttaaataatttgaattgaatgatgaaatttaacccatacttggtttgcaaataaaagtgaaataaagaagatattaccaaaaaaaaattataaactatattacttgggttatattactcttgatgacgcagcaaaagacttatataaattaaaccattgctgaagctcatttgccacccaaacaaaacaatatggaaactccattgttaaacagatccattgtgtccctcttctttctcttcttcatcatcttccaaccttctttctcagcagagcaatgtaaccctaaagacaagagagttcttctccgtatgaagagagccttgaagaacccttccgtccttgattcgtgggacccaagcacagactgttgcaacgaatggaatagtgtcacatgcaaccacgaaacgcaccgtgtaaactccctcaccatctcaggcggtctccaaggccaaatcccacgccagataggtgacctctctttcctcgaaaccctagtccttctcaaacatcgtaacttgggaggttccatcccaccaaccatatctagactcaaaaggctcagctacttaaccatcagctccaccaacatctctggaccaataccgaactttcttggccagatgaggagacttcgttccatcgatctttcttacaacgccctaagtggaccaatcccaagctcattggctctcatacccaacctcacctccctccacctcaaccgaaacaagctgaccgggccaatcccagcctctttcgggcagttttcgggaagtgattttgacttacacctctctcataatcagctgaccggtagaattccggcctcattgggcaacaagcttgacttcaacgacgtgaacctatcacggaacaggctcgaaggagatgcatcgtttttgttcgggcgaaggaaaaggattcgcgctcttgacttgtcgaggaacatgttgcagttcgaattgtccaaggttaggtttcccaggaccttaacatggctggaccttaaccataacaggatcaatgggacccttccggctgggttgacaaaactgaattttcaaatgttgaatgtaagttataatcgtctgtgtgggagtattccgctaggtggggagctacaaaggctggggtacacctcatatttccataatagctgcttgtgtggtgcaccacttggaggctgcaagtaattattaagtatagttaattagatggtttgatatatctaatattgtacgtacgtacgttagtttggactttggagagtttttggtttgaaatgtaaggattaaaataaaaatattttctttgcaagtaatatatatcctctcagcaaaccatccttttgacatctaaatgttgtctgtgtcaggacccgagccctaggctgtggcagatgtgtaatatccataacttgggtggtcaaaggtcacactttgacccttgtaggaaaataaagcttataaatgatcattttatttatattacaaaatactaatttaaaagatatggattaactcctatat

SEQ ID NO: 307482 - DNA, 1682 bp, Cannabis indica
gtgttgatatctctttacctgtattcacacaagtatattaagcaaaataactcagaaacataccacttatgcaacaagtcgataactactaaactccttttaaaataactagaatctccatctaaccctataataatatataagtaaccacgagagactcgaacctcagaacttgtgagagcaaactacatgcctgaccatttgagctactacctcttgtgttaagcagtacaatgtttagttaattagagagactgccctctttcaaagactaccaaaaaatctaactctgccaatatcttcctcatctaacaaccagacaaacttctagcagaataaactttgcaattagtcactcactgccaaccctttttttcttaaaactcttcctaactaacataagtcattcattggaggcttataactagcttaagatgaaaagtgacttgtttgaagtaagaagcctctcaatgaccacccaattgaagaatttaaaaaagctcttatgctaacacaacaatgctaacaaaattcaacaaaacttatgtctataatttcaataatcattaaaagaaaggaaattttttacttaaaaggcataaaatcatcttagtctaatggtgctccaaagagtcatttaaactttgtggaggcaaatactctagcatattcaatggggaagcaagcccacaactctagatactaatacacaaactgaatagcttgagcagaactgaagtggtcttttgatactaccataccttacaattttacaaagtagccataaaaatgtaggcataaccgttggctctatcaaataatgaattcgacagcaatacaaaaaaaattcatgaacagaaaaaaacggaacaatacctatgcctagaaagcatttcatctcgagtttcccccttgtttagatttgctttttcagtaatttcttcagaggacttgttatccagttcttgagggtcttccattgaagaaaactagaaacccactacaccgatgcttgaaacttcgcaggaagtcctcttcacaggtttggggttgtgcggctggggttcttcaatggcctgggctctgaaatttcttggagatcgttggagaagacgctttattttgtttttagggtttttcaaaaactaaaataattaatttttcttaggcaaataaattattgttcacaataaaattacatcaatgaacaatctatatgacgtggcagtccaaaatggagccaaattgtctatcccacattcatgtcccaaaccctgtcccaaccacttataacttgacaactcaattatattgtcaactatacaactaaagcatatttgacggggttgtctattggagtggtattgtcacatatgcaatgtggtctaattttcaagaataattttatataaagtgttgctcaacaagtcaacatagataatgactacatacatgactttaatttttttttattttagaaaagttattttgtatgtaaaaaattattaattcaatgtgatatgagactatggtggacaacttttaaactttaactattagagtatttttttataaaagaaaatagcaaatttaatttagatgagagaaaaataaaatatatatatagcgtaatatatatctattctatataaagtgtgcctatataactgaaattcttggtt

SEQ ID NO: 307483 - DNA, 1637 bp, Cannabis indica
tactgttaatcaagattagttaattctgttattactgttagttaattcttaactaactcctctgtatcttaaaagtgtataaatactctgtttgcattgttctccaaatcaatgagaatcatacacttttctgcttctttgtcaaactttacatggtattagagctcatgatcgttctcagctatggaggctcaagctatccccacaaatggaggttcgtcgatccctccttcctcgtcacaacagaatccaggttctactgttcttaatacaaattctcttcccaaaacgaatttaatctccttttctcattcactttctgttcgccttgatgaaacgaattatctaccatggaagcaacaagttcttgctgcaatcaaagggagtcgtctgcaacgatttcttgatcccctgtctgcgcctccgatgttcctctctgacgatgatcgccgcacgaacaagatcagtcctgaatttgaagattgggagcaacaagataatgttctggtgtcctggctgttatcctcaatgtctgaaaaggtccttactcgaatggttgggtgcgaaacagcagctcaaatttggactacccttcgtgaatattacactgcactcaacatagccaatgttggtcaatacagaaccttactgaggaacacaaagatgaaaaactctttaagcgactatctcctcaagatcaaaaatcttgtagacactcttgcctcgataggtcatcccacctccacacaggatcatattgaagccatttttaatggcttaaccagtgattacaacgttttcattacatctgttaatactcgcaccgatgcctacagtgtagcagaaatcgaagctcttctcatggcacaagaagtgttcttggacaaatctgccagagatcttgacattgtcaagaatgaggctaatttagctcatgctaaaacaaacatgggacgtagtcattctccttcaatcccttacaaccaatttggttctggccaaaatcagtcaagaagtggtcctggacacttcttaaatccaggtaatggactacctggttttcctccttatcctgcatctcgtggtcccccatccaacagaggccaatatggtaattttagagggggtccatcacgtggcagaggcattttcacagtctggggtcaaaaaccacaatgccaattgtgtcacaaaattggtcatacagtataacagtgcttttacaggtttgacaagaacttcacagggcctgaatcctttcaaaatcaacaacctaatgctaatgttgctgagctacaagcttattttgccacacctgaaaccgtgacagacacaaatcggtaccccgactctggggctaccaatcatctcacaccagatgcaaacaatcttgcttcaagttctgaatattatggggagcaacagatacacatgggcaatggagctggtttgaacatcagtaatataggtcaatcctctttcctttctccctatgaacaacaatatcttacaattaataatttgcttcatgttcctgacataacaaagaatttattaagtgtttcataatttgctaatgacaacaatgttttctttgaatttcatccctcttattgtgttgtcaaggaccaggatac

SEQ ID NO: 307484 - DNA, 2654 bp, Cannabis indica
aaagaatattccatttaattactgatattgttagtaccgttattttataaatatgaaaatattaatattattttatttaagtttttttgaatttatttttactatatgaattattaaaaatttaatattttaattcgattacataaccaaatagatataatttagagttcttaccttgctctttaataaatttattatttaattttattaattcaaataatagtttttaaaaaaaaatgttaaaataaaattttctttgaggtgatattattaaaaaaaaaaattagtcaaaagttgggaattcattaacattaaaaaggtggattggtttatgacccaaataataataaatataaagtgatgttagtattttattatacatagtagccttaatatattcgacatataaattgtgtttattttaacatatatatatttgtaacattatttaattttgtaatattttaaaaaatatatataacctcgtataaaactaaacattggtgcatcgaaatatatatagatagatatttgtattgaatcatattagtatcaaaaaattaaatttaattgaattagtacattaagaaaaaaaaaatgaattagtactaaatattagcatttaaaaaaattacaaaaaaatcaagtaataattataaataaaagaagaatatagtgtttgggtagtgggatgtacaaagtagaataataaatgaagaacaatcattgtcaaacactaataacatcaccatgatagtttaaaagaagttactagggtactgcatgagacctctaatgccaattatcaatactctaaataaatgtaaaaataaaagtgaaagtatactaagtccgagttggtaattcaaaacgacatattgggcaagtgtgtcttttctccaaccacttaaggatacaatgagtgtgaaataagtgagaacaaggcaaccgactcagctcagtcccactcaacacctcacaaaagcaaatcgaacacgtcatcttttcaccactcgacgaaacgacgtcgtcgcttttaagtttctccaaatcctccaccgacgcgcccaccccaaccggactctcgggctgcaccactatgattaccgggctttcgcgttcgggttcgggttcgggttcggcaacgggtacgggtaggggccgtacatggttctctatcgtgatctcaatcgcccgattacccgaacagaatccggattcaagcattcgggtgagaacactgccaattttgttcaaaactccctccatgctcatcggttttgatatatagtttccttcggaactcgcgattttccagtgcatatttgataagacgaaaggaatgttgggcttaaatatcatattccaaacgaatacgcgcggtgattgtgaatctaagaggtctaacgggtattgatatcggtgattgtattctcgatcgattatgggggttctgccacctttgaagacctttcgtaaaattttgaagtaaacgattagtgagggaggaagagcttgaattcgagggtttggagttggggaacagtagatttctcttgcgctaacataaaccctagactcaccaggaattattggatccataattacgttatggttattcgatgctattatatccctatatatagagagagtgttatattctaattttaatttaaataggatatctttttcaaaaaaaaaataaaaattgtgagggtttaaattttaaatatttctcttttaaaaaagattaatatttcttatttaaatttctataatattttaaagattaatatttattgttttaggtttaaaaataactacgaacaattttatagtcttctctcgtatatcttttttctcaaaatttttattctattttatttttattctattttcttttaagaaaaaaaaaaaaagaaaaacctacactatgaagatttttggggaaaatagtcaaaatacggttatatagattttatgaacgggaacattgattttgtatacttacatatatttactatgggattattatgataggaattggtattttacctatcaatagggatagtgatttatagctcttgatttaatccaatgactcaaatcaactcttgaaaactacaccaaaattaatatattttttttatttataattaatctttaatattattaattgtaggttcaactaacaaactccaaacctaatatttttatctttctattttatttctatttaaaatttagttttaattatattttttatttcaaatttacataaaaaaatattttaattaaatttatttttaaaacaataattatacttataaaaacctataacatattcaacttataataattttataataatcactcttaaaataattaaaatgtcacgagttcaatactttagaagtaatattttcttttctttttctttacttatatttaatttaagatttcaattaatttaatagtttgaaaattctatcatattatattaattaattttatttttcaagattataatgttcaatgtatttaaaatttttagatataaaattaattatttacatcaattacatcatttataaaatcatgcatgaactagtaaataatatacattcatagtatgcttattcttcaacttagtt

SEQ ID NO: 307485 - DNA, 2241 bp, Cannabis indica
ttcgatttttgtttttttttttttttttaattttcttataaaaatcttttatttttgtaaatataccttttggtttctaagccaatatatatctttgtcttaaatcccgttgaatctcttcttagctagttttagttatgaattttttgaagagggaaattgaaagtgttgatcgagtgatgagaaggttgacataattttgaatgtagaaagaaaaagaaaaaaaaacatttgttggttcttttaagggatttgggatatttattgattttgtttgttatgacatgaaattaatattaatattacatgttatttatttacgattttgtgacaacttattctgtttttggtaaataatttgcctataatcgcggcttcgattgtgacatgttactgtatctttcttatcttcctaatataaatcattataatttgtttcgaattatgttaaactaataaatttttaccttgttaaacaaaatcaagttcgaatcccctactcagtcctaattatcacaaatatatatatgatgaaaaaactagaagtcatacgaaaatgatgctacaatccaaacacaagaagttcaatattggataagatattttggagaacaaaatatattctaaaaaaagtttgttggattatttgccaccaaatggatttccattatttttagtcatcacttaatttttgccatttggcggaatacattaatatagttacataaacgacaatcaccgttgagccaattaatagtgcttagaagttaccttcataatataaattataagtttagactaatataacttgggagttgggctaatatattaatatcaatttgtttagcctaataattaacaatttatattgagtttcatatcttcacaatgataactgataatataaaattccaaacgcaagttttattaatatttatattattttcttgagtttgatgttgacagcgtttgagattataaaataacattcaaactaggaaacaagagaagaaattagttagctaggttttatactgaaacgactcgcccaaataacttgaacaaaactccattttaattaaatttagacttttcattgttaggttagatttgagtcaatattatataaaatgtaagaacatatttttttttaagtctcagctacccaaatttcggaccaaataatgaagatacatattaggacaataaaaacagcctatactattttttttattttttttattacaacaagtgaattcaaatgtttcgtctgccattaaattttgcagacaagactgctacttgaggaaatatatatatatgtataattataagtatatgtgaagggtagataatcaaacaagtactaatcccttaaaacaaaaaaagtacaaatggaatgattgttccaacaaaagtataattttcatcggtgacctaacaaatccaggtgggtattgcattaactttgtgaccaacccagattcatgccacttaattagttagggtacatatatgccaaaacagtttatgatctcatggggaagcccatataatagatacctaccccatcactaattaggtatagagttagcttgtttagtaaattatatttctcactctcaaattatttaatatatacgaattcatggtacaactactgtataggtatttaaagaaataaataaatatgatatattttcttgattgaaatgtttatataacttgagattcaattgcaagacctacatacatcctgcaaacctccctattgctatttgagctaacctaaacaaatatgataagttacatataatattataacccttatataaaacattatttatattgaaataatttccatgtaataatagacattcaaaaaaaatgatcacacctcctaattcggtccattctaataacttagtacaatcttcttgtttaagcaagacatttgttagctatattattaaagattttattacaaatgcaagaaaatcaacacattacaacactattgcaatataatacaagaatgaacaaagagattaaataaatgttacaatacataatatacaatatatatatatacactacatatattatatataagaaatgtagaagaagatatatagattacacaatattatataacatatatataatatgaagaagaaaagatcactcactcacaaccttgagtgtagaatagtagggatcaccatgacttgaacaaggtat

SEQ ID NO: 307486 - DNA, 1100 bp, Cannabis indica
cttcatttcactctctgagtttcttttctctctggtttttctctttggtgctctgcaccagcaaacttgttcttgtttttacagttcaacactatgcactattgataccacataccaccttcttgcttgctagacattattttaaatattcttttgtaaaatagttttcttattcatggcaaacacaatactgctatagctgattataatcatgagatattattctgtcttattcctactatattgttgtggtgaggtatcaagaaaccttgataaactttataactcttttggataatttttttaaaaatatatatatatttagtactttttgagaaaattataaatgaatatacatatcgattttgtctttatataaaaaaatcattataaaaagtagaaaaaaaggtgtaaacttataaataactgaaattaaataatgtaaatatatgtgtgtatgtttatctaagtaggactatttattgtcgcaaattgttttctcttgcataccttctgaagcctgataagacatcttcatatgccttattgtattctttttacaatcatacaagcaaactgcaaggggagttatttcaattatttcatatgcacacacatatgtagtaaagtatttcaatagttatttttggtatatgttgtttgtcactaaaatttgatcttatatgtataagctttgtcaaattatttatttatcatatctatcattgtttatctgttatttttttggtaaaaaaaaatgaatagatattatctaacttatgttgttttagttttgtcttaagaaaattaagttttttcttaagaaggaaatatatactgatatataaatatatatttatatttacatatatagaacaatctcaataatgaatggttactaaacaaatttaattataaaaattaattttaaaaaacttaaactatcaaattttaatctaataatgaataataaaagagaaatttgaatttttatacttaatttaactacttaattaaaaaaaaatatctcttttcacattaaattaacaatatgttcatgtaaaaatatataagtcaaactcaatttttacttttttttt

SEQ ID NO: 307487 - DNA, 783 bp, Cannabis indica
ttctttttgttttttgttttatttttgggttctattttcagttaccaaacggccttttttgtcatctatattactcctttaacggatggttgaccgtcaataaaggcgcgattatgtattgtcgaaattgccggctttcgcatactctcctttttctcttgatcaggggtactttcgtcattacgtactacttatctgttacattagaatatacgaatgcgtgtgtttttgtttggtccggaaatttttaaaatgtaagaatttttttcactaatgtgttgtatgcgttacgttaaaaatattgtccatgccctttaaaaaaaaaattgatattgtccataaatgttataatgatctcttaaagaatattatattgatttattttgaaatatgttatatacattaaaaatgtaactataacaagttactaatagtaaaatttttattattagaatcaaaataattataattacttatttacttaattaattttttaattctttttattttatttataaggaaattaataaaaccaaattagtatcaagatataagtgatttattaattatttttatttaatttttaaattaatcataacctatttaatgatgattcaacaactaaaataaatgtgactactataattatatatttaatataactattaaaacctctttcatacaaacatagatattatccttattttaatttgttttcatgtaattattttgttaattaaaaaaaaaaaaaacaatatgcatatagatatatatatataataa

SEQ ID NO: 307488 - DNA, 1118 bp, Cannabis indica
tataaaaattagtgttttatgtaattatctaattagaaagacataattttagcaacattctaattctactctgtagaatccttatataattattttttatttgtattgagcttctaatctttattttatagttttcacaatagaatctgagatggttgtcgtctcttagtagaatatttttctttttaaaaaagggtgatacttatttaatttggtactcgagttttatcgaaacataaattttataccttatatttctaataataattatttaatatcttataatttaaaataatgcatacatattatggtgattaatatgaatgttattccgaaaattaccccatagtgtggcacgaaacaagatgagacgatatataattatgcaagaggccgaccacccaaagggccttgggctgaataactgaagaagcaaaatatcgatcatagcatctaccgaaagggtcgcggtcgcttggagagaatatataatcaaatattctcgatcagcttagaggatgctcccatggtggcatgcccgaccaacaatgtcgccaagatggaaaccaaattcgccttaattgctcaatctttgaagacttagtcattttggatgcctaaaaatagtgggattgagaaaatagtggggttgagagaatcaagaggattgagaaaatcgtggtattgactcaattaaccttattatttattctataattaattcacttgtggccctataaaaagtgggtcattctcactattcagggggaattcaaattctttcagagagcgattacgctccacaatattatctgtaatttctaaataagaatattaagaaactcacttgatgaggttcttgatatttcttagtgaaatacatgataaggggagtaggtcattaccaatatcaggggtcgaacatttataaatttcgtatattgtttattgctttcgattattattatctatcaaatatttaaagtgttattttattgagtccgcgttgttggccagaaacaagatcattgttaaaaaaataaacctccacttacactgatattaagaccaaatacaaccagatacaaaggacagaaaaggaaatacatacaaaatcc

SEQ ID NO: 307489 - DNA, 1703 bp, Cannabis indica
ttaatagtaaacgactacatactactatactttgcagcctgtgatttgtgcttttgactttattgtcgttgacaaataaagaggaatatactttttgaactcgttaaagttttttgtgatctctacttaagtttttatactttgtgatttggatttaaaccattaattttttacaacacatattttgttcatgtgggcagcagtcaacactttggacacaaaaaccaacaacaattatatatatcaaatatggtatcataagaactaaaagtctcgtgtatgtatagtggttaaaataacgtactcatcattatgaacgaaagtatacatgcatataaaatatggatatcatatataatttatataaatatagaagaagctgacctttgtgtcatcagctcgtccatcacctttggctccatagttcaagacattgaaaacggcaacgtttccagtagtagtaccactaagcttttcaactggtgctattttgtgataattgttttttgtccatgttgggatatttggattccattgcctagcatggcaaggttttaagcatgaagaccacactagtgaagcaatcatgaaagcaattatgatcaatgatagacttcgctttaacatactcatattttgtttaatatatctatatatattatatatatatatgagagagaaagagagagagagaaattgtttcgtgtctgtggctaataatgaaggggattaggatacatatatatagtagagctttgaactgtggatacatgagctatacagttaaatgaggacaagggtacgcatactttttagtttttatacgctttatagtgttgactcttttccaatttttgaatattatatataataattatgattaatattattgacatgttttaatttgtttttacatatgagcatatatagcattggtgttgagtttacttgaaacaaaaaaatacttaaagaagaaatactcaataagatgacccgccacttacctctatataggagactgataagatacattgctgatctgaaatttcacatccaacattctttatttttttgttttgtttttcctgttaaattacccttaaaatctctaatagtgatctgcgtttttctcagcttagattatgcaaaacaatcacatgtaatttatatatgtacggcgtataataataattgcaccaatcatggcaggcaaatatattattctataccgtgatgaaggccaaaatatataaaatgaaatgttgggttttaaaaacccgtaaaagcctagcacacttagtcatacacattaattcacaaggtcatttatgacttttctaaccaaacaagatgaaactatgacactactagactcatcacaagaaatgtcacttttaccaacacagttcgctactgcactggtaaaagtaacttttaccagcgcatttcgcaaactgtgctggcaaagaagttaaagttttaccatcgtacatttgttgtggttaaaatctaacttttaccaacgcatttacgcgctgggaaaagtcatttttgccagcacttttcattttatgtgtgcaaaagttctaataccaacattgatttgccaacccctttttaccaacacatcacaagtaaattctattttacgagcacaatactaattttgccagtacaaaaatgtgttggcaaaagtgacattt

SEQ ID NO: 307490 - DNA, 1128 bp, Cannabis indica
ttttttatgaaatcttttcaattttttgttggtttaatatatttagaaacaaaagaagaaaaatattacagttcattcagcataaacaaattgtaattaagaaaacataatattgaaattataacttaaaaaattattagaatataatctctttaaatatttcttaaaaataataatgcatatattttgtttataataacatataagtattatccatcgcaaaactagagaaagatagagagtgctgtaaatatgggcaaagctttttgacacaccaaacaatcacaatttggcacgaaaaaatatatacttaaacacgacacggcatagtattgtaaattagcatatataatacgccacgacacgatataacaagcccgaaaatacgatacgtaagtacgaacagattaactcaaaaacacgacatattaaaaaacccgataatttaataataataacaatgataaatatttaattattaattaaaataattttaatatttaaattataatacttataattattttttatatgattgtattgttgaagaaagatgtaaaagtaattaaaattataaaacataaaaatgtaattagctattgatgagctattttagtaattagttcatcaattgcaataaaaatgtaaaaatatggagcacgaatttgagcccatataagaaaatgtgttggtctatttaagaaaaatagatcggtctaataaaatgcgatacgaatttgagcacaacacgaaactactgggtttgcaagtggtgtcgggtctattctataacattattgcatgacacggcacaatctatatttttttatggcacagtacgatacgacccatacttttttatggcgctacacgacacaacccgtattttaaaaagccaaaaaatagaaacaggcctaacacgggacacaagtgtcctaacacgggacacaagtgtcaaagcaaatgaagtctatcttttactattatcattgatgatcgattgtccattaaggaagtgggtcttaagaaatcagcagtcattgtcctgttctctggttctcccctttccacctcactcacttaataccagtttcgtttttctcatataatcataataataataataat

SEQ ID NO: 307491 - DNA, 2012 bp, Cannabis indica
acaagtgtttcaacgtccaccacctccaccgctaccggagccggagccagatccttggccactaccagctccaaccccaattccaatcccaataccaatcccaattcctcctccacgacacccccacttccaccaccagcaccaaaaccaccaccatggcccgatcccctccaacacctccaccaccaccggcaccaccaccaccacctcctccaatacctcctccggcaccacctcctacgccaccacccgctccaaatcctccaccatgaccagaaccacctcccgctccaccaccaccgcctccccctccaccgccacctcctccaccaccaacaccacctcctgcaccaccgcctacacctcctccagctccaaaaccacttccatgacctgaaccaccaccaactcctcctcctccaccaccaccaaagcctccacctccaccaacaccacctccagcaccaccggcaccaccgcctacaccccctccagctccgaatcctccaccgtgtccagaaccacctccaacgccaccgcctcctccgcctccggcaccaccaccccaccccaccaagaccacctcccgcaccacctcctacaccacctccagctccaaatcctccaccatgacctgaaccacctccgagaccaccgcctccaccacctccagcaccaccacctccaccaagacctcctccaccccctacacctcctccagctccaaatcctccaccatgacccgaaccacctccaaggcctccaccacctccggcacctccgccaccgccaagaccaccaccacctccgagtcctcctccaccgaaacgagggccgcgtggtccacgacgaccgcggcacggtcctcgtcgaccccattgacaatcatcatctcggaatcttgctttctccaccttattattgtcatgatccgcaagagtatatgaactcaaatggagaccaatgaagagcactacaaggctcaaggacaccgatttggaagtccccatcccaatcggccgacgatggataattttaactaagcttcctttgtttgctttgagcttgttagtgttgcagttcttgacgtactgatcaactaaaaggttcatctatttatataggctattgattaattaatccatattataataagccatagctaactagttgcactgctaccattgtgtagtactgctctactaaacagctttaaatgttgcatattcatgcgacgcgttggggccgttggggaattattgggtcgaacattaaatggatataactagaagtcaaacacgatctggatgattaattaatacacactataatcaaatctgcataatttcttttttgacttatctcaaacaagcttatatgatatgtatcattatcaatgtgtgtgtatacatttccatagtcagctgtagtctccacagactgctactagtatattgatctttatactagtttgccatattgaataatggcatgcatgcagtcatatataactattagatctttatatatataccggcttattaactatgcatatgtaatttgaaacacagccaatttagtaataaaaatatatagttacattatatatattatcatattactcttataaaataatcatttttaatcacaatatatataaaaaatatttttggattttggtgtattataggttccttctagctttagtacgtactatcaatcatgctatgtgaaaactaataatttgtaggttggattatttgttttcatgtggactgcatatatagatacttaaaaatattaaacttaatttttaagacctgatcatcataagtaactctcacttatcctaaaaaaaaacctcacttatcttatccgatctttatatatacactaggttaacgttatgtgcatttgcacctataattagtttttttaattaagtttaattaagtcatgatattaagtggaatatatgtatatttaattttttaattaaataatatatattt

SEQ ID NO: 307492 - DNA, 1611 bp, Cannabis indica
agagagttcaaagagttttgtttacaaaatttcttaaatagttgaagaaaaattagactaaatttatttattttttaataccgaaattgaatacatcgatgctcttgttgttggtgcggtagcgtttaatgatagatgaattcgatacttaattacactaataattatgataaccgaaaaaaatattaagtaccagtaatactttttagcaattattataataaaaatattaaaacaacgtgatgggaatcaacagctgcttccaggcaacttgacctttctttggctcatatctccatcatcatcatctcttctctttcttcctagctagctagttgggttttttttaaaacaaattattaaaaaaaaaaaaagtgtatgaataaataatggcaacttgttgattgtttgtttgttttgttacattttttttatttaatttttaaaagatagttgaatgctgcggcttaaagaaagaagaaaagaatgcaagtgggttcttttcttttaagtttttttttttttaaataaaataacaataatgataataatgtgaaatttaattaattaaattggggagtgaatgtgaatattggtggtttgaattgaatttttttgaggtgttgagttgggtttgagtgaggcaagttgggagaagaatgaggcaagtgggttgcttttaatgatcccatcccattcttctatttgtctacttttgaatcccttcacgccaccctatatattttttttatatataaaaaaaaaaagaaaataaaaataaatatatgaattcttgtcctcattcttaacatcaattatttttgtttattttcttggtataatatttgaattgactatacaataacttacttctttggctttacactaaatatacaagttaaccacccctatatatatctctactctcaccattaattatttgtcttattttgcttttcttttttgtatttttaggaataatacatagtgaatatatgcttgtgtttgtcttattattaaactttcttaattattattttactgcacttaatcttttaaatttaaattttaataataaaattgctcattcttattattaataaatttaaggtattgtttatatctatctatttttttttacagttagctgttaacatgaactgtctatcatatgtgtacaaccttgtacacgtaaaatatttatattaatacacttaatattattatttaaaatttataagaaaatttcaaaatttatattattttttaattttttatttttataattttaaaattaattttgaaataatattattaagtagagttatttgcggcataacctccttaagtggccagatttttacaactaaccccaaattctaaaattttggtggtaaaaccccctaaactcatgaaaaattaacacttagtcattttcatctatttttaggtgttaagtgccacagtgtattgtctacgtggacaatatgtacacatgacattatattattggtccacgtacataaatattttaaaaaaattaattattttaaaaataaaaaataaaaaaaataatttaaaacaataaatttaattatctaaaataaaaaa

SEQ ID NO: 307493 - DNA, 1282 bp, Cannabis indica
tttttttttttttatttctcttgtatgataaaaacaaaaataggaatatatatatactagaattgtttattgcaatagttgaaagttaaaaccgtcactttaacaataatatagcttgatattattcgaattttctaaattatattatattcactagtactttatcaaggaaaatctgaagaaaaaaaattgccttgtgattctgaaaaaattctgattataaaattaacttttatttacttataagttttatttattaatgtttttttaattagttttttatttttaattacaaaagtaaaaatgtttttacattttttataaaattatttttattttttaattgagaattaaatttaaaaattttgaaattaaacaaaaaattacttttaattttttttaaacggttttttttcttaattaatattttggtactccaattcagtctaaactttgggaacttcggcctcgaccccacacaacccccaactcccagacccgaacgtagatttactaaataaaattaaaaacaaaaatagaagatgaaagttatgaacacaaaatatttttttaaataaaattcaaactcaaaacaaaacctaaaacattaattaattaatttgctttatgatctactttaactttttgtttattttctgacctcttaattagtacttaatgtttttctttatagttaatttactgttagtggttttagtttagctagcctccccatgctataaaataaatatatgttatgtgtaccgggtacgtatatatatgtgtatctaatttggtataagatcgaataaatgcatttaatggtgactgagtttctgcgcattggatctggaatcacccaaaaagtgtactgtttttattatatattattctatttttacaaattttaataattaatgtcaacattcaacaaacctaactaaatattgttgttgttgtcttgttcatttgtttcttgcttggcctcctatttgctcctatcttttgtattaaaaaaatgctaaatataggagaaaaggagaaaaaaaattatatatatatataggacagatttaattgtaatcgtgacattccatgtatgtacattccactagattaaacttcttaattactttatgatttcaaaaaattaaaaaaaaaaatacttattatataaatcctcttaagcaacttcagttctaatacgcaggtatataggcctaaggtcccatcttacgagggttcgaaaataaaaaatatatatttatatataataaatata

SEQ ID NO: 307494 - DNA, 1514 bp, Cannabis indica
aagtgtcctctttagctggaatcaaaccctcaaggcccttaaaaccactgaaaacattcttgatcaagcagtgcaacttggcctagatggtgcttgtttcgattctctaatggccaaggcactctccgatcctcgccttctcggagaaccaatcaacactgacactagtagtgaggaggaggaagatgaaatcgaagacaaagacaaagagtttcatcattggccaagtgcgagaagaagattgtttggactgaatttgcaaaatgaggatcttacaacgctgtctctcaggctctatgaacctctcatctgtgaaatggtgaagagaggagtgcccttaagctatgcgacttcttctcttcttaactatgttaagaagtgggtgtttcccactttcacatcagctgcaacagtggataaagagaagctttccttatatgagagcaattcacagagagaaatcattgaagctgtggagaggcttttgccacgtgaaagaggactcatcatcccttgcactatattgctccggattctaaagtctgcaatgtttttcaatgctagcttggagtgtagagatggtttggagtttaggattggaacaagtcttcatcatgcaactgtcaaagatcttctgatactctctcaaaaccaagtttgcagcagggaagttaagtatgacattgattgtataagaaggattttgaagcaattttatgggaactactcaagttcccatttgtcaggtttgattttagtggctgagttatttgaagagttcttggctgaaatttctagtagtgacatagatttgaagttagagacattcattgaattggctgagctgtcagttagtctatctatgggaactcagaaaaagtctgatggattatataaggccattgacatatacttggacaagcatagatatctaactgaatcagagcgagagaaagcctgtcaacctttggatttcaacaaaatgtcagaaaaagcttgtgatcatgccgcgaaaaatgagaggctgccagtgagggtgaccgtgcagatattgtttgtggcacaaatgcagctcagagactcaatcatgaaggaggttcaaggtagccgtcggtttggcgagaaagaggatgagttggaggaggaagatgaagaagaaaaagtagtaagaggaggatttggtgaggagaggatgaggacagagatggagaagatgagcatgaagctggtggagcttgaaaaggagtgctgtgtgataaagaaagagattgagagagacgagagtttcagaattgagaagaagaatgagaaagagaagaagatgagtttgtggagagaaatgaagagaaaatttgcgtgcattagaaatagtagtaatgtcagtgattccaactgccatggaaagaataataataaaaagaagaaggtgtaataatcataatagagatgatagtataatgtaaaagatggtactaccttttgttaggatttataaaacacttaagaaatatata

SEQ ID NO: 307495 - DNA, 999 bp, Cannabis indica
attaagaatatggaggacagtagtcaatccaaatgaaaatatacttttattctttttattttttttgtcaatacaagatagaaatatagaatataatagggtaggttagaatacggaaagagagcaattaataaaggaacaaagatatgagtggtgtaacaatatataccattgttataatcgaatcctagtcaagaagaaggaaacgaaaaagactatcatttcacaaaccttttttttggccaggtcaaataattataaagaatctttccaaaagttgtcatattaattattttttgaaaacttgtcaaaaatctttgaaaattgaggaaaagcacacacaataataataataataaaaataatgtttggtgtaaatgaaataaaaattgcatactcgagtacgaggattgatttgtgatcgtatttcttgagtgtttataattctggaggtgtgtgaaaagttatagtgcaattgaatttgagtgttgttagagttaattatataatttgacatttttatttcacgtataattatactaattgtgtaattgaaggtaattgagagttccaattacataattgaaggtaaatggtattaacaaatgatatagttacaatttttattaaaataatatctctaaatatcaattttgaattagataggtgttttgacacctttagcttctctttttaaaataaattatagaaaaaataatttctaaaattcctttttgtagtagtgtactctcttcaattctcatgccccataagaattaagagtaattatattctgtaattatttaaaatttttctattttaaatatttactactaaaaaatattatttttctttataaatactaaaatattaagaattcatgtataattactatttcatatccaaacccatcttatatttttagaagagtacgccttattattaaaaaaataaacttaaataatttttaaaaaatactcttaatttttttaaaaaaaa

SEQ ID NO: 307496 - DNA, 1612 bp, Cannabis indica
ataaaaaaaaataaaaaaacgctaattccccaattaactatttgacaactccccacttcatatttataactaaaataaaaaactattatattgtgttgtaggatgttgttgggcattttcagcagtggcagccatggaaggagtaacaaagttatcaactgggaaactaatctcattatctgaacaagagttggttgactgtgataccaaaggtgaggaccaaggctgcaatggtggattaatggacgaggccttcaaattcatacaaacaaaccaaggactaaacactgaagcagggtatccttacaagggagttgatggaagttgtaatgctaaaggtgaaaccaaacacgttgctaagataagtgggcacgaagacgtgccaacaaacagtgaaaaggacttgcttaaagcggtgtccaaacaaccagtctcggtggccattgatgctggggggtttgacttccagttctactctggtggagtgttcactgggccttgtggcaccagcttggaccatggtgtcacagctgttgggtatggggttgatgaggttgatgggaccaagtattggttggtcaaaaactcatggggtgagcaatggggtgagcaaggttacataaggatgcaaagagatattgaggccaaacaaggactttgtgggattgctatcgaaccctcttaccccactgcttgatatatttattttatcatatatacacatcctctcttcaaacctactgttactgtgtattatagtgtgtatgaatactctacttgaaaaatacatgatattatgactttttaaaatcctatatacatagaatttttcagaatctacataaaataccattttggatattctagattctctacacaaagcttgaaatgttcagcactattactataggatacctaacatttttaatttattttctctaaatttcttgtactcctaaaataagcgttaatatttctcgattttcacactgaaattggaaggactttaagaggtataatcagatctatcaaatttttatacttttctaatctaacctaacaaaggagagagagaatattgtactttgaaaaaaataaaaaaaaattattactattattattacttcacaaaccttgtaaaatggcaaagttatcttcgtgtgcttaattttgcaaatatctttggtgggccagtttggagataaagtcctccaataaaaagattttgaatatcttttgagggtaccactaaatacagtagaacctctatccaacaatacatttgggaccaagaaaataatattctaattgagaggttataactaaatagagttacactaaaaaaatcaaaatatcaaaaaatatcaatgtaacaaaaataccaataaacaattcttaatactatattatattaaaattattttcgagtacatataatatttatacatgtactataatttgaaataaaattattaattctacataagtaaatttataaaatatatgtatatatttttttaagtatgtaattattcttatatagaggtatattttattaatacgggacttaaaaaaatgtataactaattacaatatagaggttattcttatt

SEQ ID NO: 307497 - DNA, 2008 bp, Cannabis indica
  modified_base (229)..(229): a, c, t, g, unknown or other
tttttttttttcttttgaacaattatccaataaatgtgtttttgaactattacatttaccgctactaaataatcacaatctatctatatatttatataaagcagaaagctaagtcggtgacgtgaccgctttctatgagcttattttaacttttatctcatttcttagcttttgtaatttgtaattttcatcatttttctaatagactatataaactatacaatcatgntcccgtcccagtagtcataaataataacatttgattgtaataaagtgaattcatgtaatattaatgttattaatgttagtcaagagtcctttaaaaataatgattgtagtattgattatttttatcactttatctatatataaaatttttaagtaaactagtgattattgtaagttgcaagttcatagatttgaaacttgaggagaggcaaaccatagaaaaaagtacataacaagttaccctatataggtgataataagctttcataaaaattatatgtagatcattataagtgagtattgactcgctttgagtatcataggaaacaatattttctccaaaagaatcaacacttaatgaagaacactttgacgagaggaatcaacaaaggaatcaccatttttcaaatattattatttatttaacatatatataaatatactaaaataatgtgattgtagaataatattactgtcaaaagtttcattaaaaaaaaagcataacaattatattatgattaatatgcaatatagtcaaatttttgtatagaaaaatacaatttttgtaatctattataccatttaaatttttattttttatcaacatatacatagatattagtgatttttttatgggtttattattgtaattgtattagtaaacatatatatacataaatataattaaaaagtatataacaattatattatgagcagggtaaattgtaatataaatacctaatattttagattttatatacttaaatactttatttttatttttagaggcaaaaatacctgatgttacaattccttacacctgttactaccacttccgttaactcataaatatagacacgtgaagagtccaaatgcattacatttatttttttattttaaaacttaatattcttaatatcaaaaactaaaggctatacttgtttaaaaaaaaaacagtacgtttcataataatttttaaatatactatacactggttcactcagttatagtaatttaattttacatctctcttattattgtttttaataaaatttaataataaataatatgaccttctcccattatttgttaataaataataaataacataataactacaaaggtcattatttttttttttttaccttcttcaattacagaagaaataaagatgatgtacatgtaattatttgatgaaaatgaagcaaaacgttatttctatgaattatgatataaagtcaaatcatcgaagtaggctgctaaaggaatctaaaccagattcttgaagaagacaaaaaaacaagagagagagagagagtggaaatgtgaaaagggtttgcttaatctataactgattggcaaagcttttaatttatatatactcaggatttacaaagctaaaaaaataaagcaattgaatacatttgaataatctttaccgaaaaaaaaaaagaataatacatttgaataacatcaaagggaagttaacgaatttatatttctaactaacttatgtatgttcaaaaaaaaaactaacttatgttattttatcattcccctcaagttttataggtctagaccaaatcctaacttgtaataccttaaggtttaataatgtgattaactagattaattatgtattaatggattatattattatataatttaatatgtgaaactatattgataaattacattttaagactctatttgtgtgttaagggtattttcgtaattttgacccaaaaaggtaaaactgtaattttatgatatatcgtgc

SEQ ID NO: 307498 - DNA, 877 bp, Cannabis indica
acaacaacgtcataatggggcttctcggcagtggaagaatggggagattagtgtagatagctagattgacatagcaatggaggagatagaagaagattaatcgtaaagggaagccttctattttttagcctttaattttttatttttttaaaggttaatcgtcgtttatttctaaaaaaacgttaaaaagttgttaaatcaacaaatgtcgttgaataactaactattttatatataaagatattaaaacaatttcttcataatataattttatatcattgttattttcttagttatttaggtgctaataaagtttagttattatattagaaaatttacacattatacttaaaaatagattttttttttttattttacgaatattttttatttatatttttacagttttattttgttttaacgtttcatgttatcgcaatattataatatattttccccacttgtaaacaaggatttcatttagaacaacgtgtaaacaatgacctgtggctgtaacaaaaaaaaaggtcccaaaacatgtgaaaaaaaacttaaaatttcatcaaaatgtaaattttttattattttttagtatttttgaaataatccttattatatatttttgaaggtgttgattttttatttgggctttctttgattactcagagacttcataaataagttttattttcaataataaatattctgaatttttttcctttctaaatattgtattaattcgtttgttaattttatttatgtttttaggtgttttatgaagttttttgtgaatgtgaatgagcggacccgctagttattgttaagggttaatttcacaaatacacaaaaacaacaaaaaaacaacaaaaatacggtt

SEQ ID NO: 307499 - DNA, 809 bp, Cannabis indica
ttttttttttggaaaaaaaaaattaaagactatatgttaatatttatttatttattttaaataatgatgttactatttattgttattcttcataaagcacacaaatatcatgccccttcatcaagatgacaaaaagttttgagacttatgtgtttcgtggatttcgtgtgactctcaactgtaaaaatattaggaaacccactcaaatcaaatgcctataaaataagtacataaagtaaaaggttttccaaatcacaaacctagatatatatgagcaatgttagatttgagatagcatacacatttttttacacatagtgatacaataatgtatattaaattttattatatattatatataacacattatatattattgttattattattatttgtaatttcagtttgttactattgttactcgaatatatacataaaaaactacttgtttaatattataatagttccttttttaaaataaaatattataatagttcgaaagtcatacaaatacaccctaatgagaagctgtttcactacttgacataatcaacaattaaaaatgctgactaaagtttaaaacaaaaaattaaagaatgagctttttatcttcctttagggtctatttggaaacaactgtataattattatgcagtagtaattacactgtatagtaattacattgtattttaaagggaaatttgcggcaaaagtccccaaaaagttcacgttgatgctgattagtccccaaggtccaaaaatagcggcaatagtcctcaaggtcacactttttatttgtccgttggtct

SEQ ID NO: 307500 - DNA, 1380 bp, Cannabis indica
agagctgagtgaagctctttaggcatagaaccagagatgaagaaatccttgacaacaaaacatatttcagctcctatgtcaggcctaaaagttttttttttaaaaaaaaaaaaccaaaccaaacccatcacctctcggggatttaacctctgatatgctgaaaaaaattaccttgatttcctttatgagaaaggttttaaaagccccagctgttgacataattctagcttagttccatgatcaaaataggcagtatttaatcccatagaaaccaaatttcttgttcccatgataccttgaaaatgagagacaaaatgattcaccacctccaagtaattatcaacaatttctccctgctcattagtgtaattagtgatattgttttccaattttcttttctttaaacaagcatgaaaaaagggtgagttttcatcacctttgtggagccaatttaccttacttctttgtcttcaaaaactgatatacattttttctatataagaaaagttgcagcaaccttcttttctttatcaaggaatctggcttctttaagatgagcttgagcttgcattctaggttcaataaaatctgactttgcctcttgaaacttcttccctatatcaccaatgagattatgaataaactttctaagacaatgctttaatctcatcaacttgagatatatagcttgaacacccttagcagtaattggtttcttccaactaatgagcaccgtttctttgaactcaggatgagaactccataaattatagtatttgaaaggtttaaaaccaatcttgtttgaaatgacacttctaacaatacatgagcaatggtcaaatatggtctcccatctaaacaaggcttcagcattaggaaactcatcaagccaatcctcattagcaaacacatggtctatcttagaataaattctacttgttccatcttggttattagaccaagtaaaagaagaaccagctctagggatgacttcaacattggcagtagcaagccacatagatgcatcatgagtgtcattgaaagtaatagagtttcccccaactcgatcatctatattaatgatggcattgaaatctccaagcactacccacggtttcacaaccatcttgagtttaagaagatcctcccaaaggctctttcttttatctatggtattgatcccataaacaaaagttgcacagaaaccatactcacaactagctaatttgacataacaatgcacaaactgttgggttttgtgccctaaataaaactcatttcattataatcaaatttactaatcaataaagatcaaaatctgcattttatgttgcatggttcacatactttatttcatgattatatttaatgtataaattc

SEQ ID NO: 307501 - DNA, 1373 bp, Cannabis indica
attatgtgaaataaaaggtaattttttttgctttgcataatgacatgttttgcaatgaaattgagaagaagtatgttgagacaaatgaaacattttattgattttatttgtaatcaatacagatggatgaccaaggcggaatgccattggtttttattacaagagacattgcaaagaaaagggttattagcagctatctcttgttggatgtagtagagtttgccaaactttttagcaatcccagtcttcaatatctgagaaaactcctgaataaaacaagagttatatgtgaatatcatttttctggaagaatggttctgcaataaagaacttactgacagtagattaaatcgaaattgaggtacatagaggacattagtgagagtgatctctggattaataataacagtaccaatttttgctattttgacagaggtgccatcgggtagggtgacacaattagcatgttgttttgattggaaagaatggaaacatctatgatcaaaacaaacatggtgggttgccccactatcgataatccagaaattatatggaaagtcggatttgttaccagaaaaatttgtagaggcaggagtattgttcgaagttgaaggagcaggctgaatctgttgtgcaagcatagagattagttgttggcattgatcatgggtgagttgagaggggtttaactctgtagatgaatctgagacttgggaagcatggggcaaacttttattgttctcaggtttcttggaggatgattcttgtggtcttcgattaccatatcctggggggaagccatgtaagaagtaacatttgtccttaaagtgcccaggtttacggcaatgagtacacataggtcgcatctttttgttcttggaagcaagatttgcagcaggatctgtatcaattttgggagaatgagtgctggtttttggtgtagttgcagcagcaacgggtagattgggtcgattaccaagacttctttggcgttcttgatgaacgatcatggagaaaaccttattcaaaggaggccaaggatcatagagtaaaatctgagctctaacagaatgataagattcatttaaaccagttaggaattgaagaacctgatcgtgatcaacttgagcttgtctttgagttgctgcagcacaggtacacgggattcttgggcgaagttgattgatttcgtcccaaattgcagtcagctttgtgaagtatgtactgaccgagtcttctccttggtgtaggtatatcaaagattcattgagttcgaatatccgagggccatttccctggttgaagcgattattgagttctgtccacatggctgctgctgtttcgagatacattatgctgcttttgatttcggg

SEQ ID NO: 307502 - DNA, 2953 bp, Cannabis indica
aatgtatagaaagataataaaatatataagaggaatggactctaaaaaagcagcttgtgatttgaagatagtgaactaaaagagccacttataatcgagtcgtacaagattgatgagaaaaaaaaatgtgtggtggttttgagatagaacttatttatctttctaatatatcataattccattgttgtcaatgatatgcaatttgataatgttgctgtaaagggatccaatttttttcttcttctgaatgagtgataattaatagtccttaaataattaattggaggttaggatcataatatataatttttataatatagaaaaaagtttggtataatattgttgttgttattatactattactaccagtaagtacattattgtcgatgatgttaattacatgtatatagatatataaaaagaaagaaaaacaaaaacatgataatgatcatgatcaagaatagaaatcaattcagaagagtaattataatgtattgatatttgaagtttgtggctataagcatagatacttatccacatggattctcacttattattttagaagaaatatataaaataaaattaaatgaaagtagtattatccaattttacatagagacttccaattaatgattgataattagttgtactagcaaggtgaggagtcttttagtggaaaccaaaaaaagaagaacaagaagaagaagagaagattggattgatgaatatgaatataaatatatgcttatacatatatagacacagatacatataaagatagatgatgtattgcatgtgggtgccatgtgaagagcattaacttttgaacaaacctccaccttccatcaaatacttctaaaacttaattccaatatgatataattgtggagccaaataggaactccatgtgagaaatcattgaccctatgaaaccattaagaaatataaaattattaatttgtatatatatagactaattaataaaaccaccctctatacaatgattatgcagaaaatgtttaaaaaacaagttgttagaatattatatcgatcactagctatatcttaaatctcagtacaaaacataaagtaagacaatataatataataagtgaacaaataataaaggtttaattctttttggtttttaaactataattaaggatgtatattgtcttataggctgagattcttaattaataagccaaatctcatgagccgataagccaaacatttaagagtttatcaatttaattaagtcgatttgtaattgtataattattatcttaatcattatgtattattattattactttagcttgaaggctacatatttatatatattatttaaaaatctaatggcagtgagataataatcacacatgattaattagcttctcatcaatcatcatgatcctgctaatttactatttgctgagtaacttgttacttgcataattgcattgtccttaacctgccatcttattatttcattccaatttgttgagaaaactaaatcgaagttggaaattttaactcataataaatatatagattaagaaccgaaatataataagctataggaatatttacaacaatttaatcgagtatgtgcataagttttcgaatgaagattaatgtgaagagctcgaaaaagccattagtcaactttccaagaaaaagtgaaaacagttaaatataaagcaatatatgacaaattataaaaagtcttaaccctactacctattaggtaattggataaaaattatatttagtgtgattctattaaaaataaaataaaataaaatatatgcatgcagtacttactatgaatatataataattagaaatagaaagtaatttgacactaaaaatgaaataaaataaaatttgaacaactttcttagggtgtacaatataattaccctatatacattaacatccaccatactactagagaaaaatctttgtagtgaatcaacaatatatatttaaaaaagaggttatgatgatgagtacgatctcaaatgatgatcactactactctttgggcataaatagtaaaatggctttgtggccaccagaattgccggacatctaccagaccaagtactccaaccgcatgtatttgatgacatgatatttggctataatattcaaactctcataaatggtgtttaaaggccctatactacattatacaaagccctattcatcctcaagcctcaaaaccccacaccttggttgtccatggcttggtctctgaatgtggacctatcttctcttagaaattattgtgctctaataaaagtatgaaaccaacaaaattataactcaatgacaaataatacaaaggacaaaatatgtattaaataatatattttttttttgatcaatcatgaaattcattactccaaatatcatattacaacctattaagctttttttttttaaaaaaaagagacctgaatatcaatctatacaatcctttgtaatctttcccaaccatctatattagttacaggatatgactataatatgagaaaccactcttcatccgccggttgcactctcttaggccaggtgcaagaaattcggttcttcatagccatcttgatcaaagttgctactttttttggtgtttgttgtattaaataatattacaacattaaataaaatatacacataaaatagagaatagagatgaagagatggattacaactcaaagcaataagctacacatgaaatacaatatatattacatataaaaagagatgtgagagcaatctcaacaccacatacgtgtataataggggaatcaccaaacttgtacaaggtcttacacctttgtccaaaagtttatttccccctaccacaagcacttagggaaaagaaaagaatggaaatagctttctggatttatcaagccaaaagtgtttctatcaatgtgct

SEQ ID NO: 307503 - DNA, 1099 bp, Cannabis indica
ccactaataaaaatcattgggtttatgccgcttacaaatctaaaactttgggtacttataccactatttacctattaatatatatatatatatatgtaaattagataacatatataaataggtacaaatataatcaaacaatattaaataaaggtggggaatggccactataactatattggtccatgcacttccattggataaagagattactctacattccattctgtgtaatgttctaaaggataagcaaagataaacttataaagaaatgttaaaagattctgaatattattatcaataatacaataaaataaattaagtgttaactcgtatatatataatttaatataataattttaaagatgttatttaattagttataaaagaaaaaaacatattaactacctcataataatactcaaatttataataattagaagaaaggaaaatcttaattaattattttataaataaaataaagaagagtctctctttctttaaatttacatatacatacacataattttagtatttaagtgcgcatatgtattattatttttttttacatagtgggcgcatatataaatattattaaatttgttgataggaattattattaaaattaaaaatgtgattaagtaaagagtaaagcgtgttttcttctggtcggtcaaatataaatatattccatccaatatctaaggttgacggtccaatttaatatattacatatatatgtataattattaactaataattgcacaataagggatatctttagttgctatatatttacttaaatattgaagcctaaatatatagtgtatatctgagtttgatcactagctagagctccatcacaaaattaaataatgaatattatctgcctttcactttctatattcctttaattcacatatatatatatatactaggtgaatgtaagtgccgagccacgtattgctaatttcatttaagattttagtctttttaagattttaaatatattttatttttaaagattacaaattttttcttgaaaaaattaaatatttatatttgaaatatgtttatatatttgaaatatctttatatt

SEQ ID NO: 307504 - DNA, 1651 bp, Cannabis indica
ataccatgaaaaatcttaaatgtgaaaaaataccataccataaaagagtggcaaacctataaatgccatatttttataacttttttacaaaattttatatttcatgtaattttcaccaaaatttaaggtaatatgaggatatcttaattttgaaatgcctaaataagatatagagcattaagctacaaacaaaaactatggcttcagccaagaacggcttcaagaaagcttcttgggggttaaccattaacaattaccaaacacatttttacttttaaaaaaacaaatattgtacttttatttgtatgttgaaaataattaatctccacaatttatacacaaaataattctgaagtttaatatgtttgctcattgcttcaaaagaaagtgttagtaatacaaatgcttaagcaaataaaagtatgttaatgtttgtatttctatttgttaggaccattgtacatcataataattcatattaataatagattattattttcctaaaagaaaaaagaaaaactagatcataaaaagataagacatgaaagtgtgagaatatttttctaaactgaaatgaattattcaaccaacaaaaagattgtcctcattagacttttacctcatctacttctgttttatttatttttttgggttggtactagattgaaataggttgctacatatgtgtgctcactcattctgatcatctcttttgtatggtagcttagaagatatcaatatttattggttaggtttcattaggcaaggccgataaccattaagacctagcttagacacatacatacgacaagagtcgcaccatctttaacaaatttggataaaccaaacaccacccatttgctatatgctataaataaaggcacaaaacaaaattacccacaaaaggcagatattctaacctcagtccttggagaaacttggaccgttggataggtcaagttggtaaataaatgtgtgttccccaatgaagtaatatgtgagtttaggcaaatacaggagtcaaagaatatttggtcaatcaatcgaacggtttgatttcacgaacaaggtacatacataatgcatatcttgacaaaagctaccatttcatgggccatactactttgctttattaaaatgaaatagtttacttagccatactctaatttcgtggagagtaaactacactccccatgattcgtgtgactcaaatttgtacagcatactactctgtcactcttcctatcaaatcaaattaatagaagtgtgaaagggataacacatcatcaacacacatacttaaattgtagtaattgcattcctattaaaattaaaaattgatatcattctttaaataaatatgctaaaatttttatatctcaacaattattataaggtattaatgttacatggtactatttaagagtaattcaaaatgacattaatattgtagagtaataatgtttcaaattcgacatttatattatttacaacttttcaattgtcaactatatcatttaaaagagtgctacggtgctaccgttaacctcatattacaatcttttagttaactttcacgtctgaaaacatatattggtatatttttttaattttttttttacgggagtattcgttatgcttacaacatcat

SEQ ID NO: 307505 - DNA, 1114 bp, Cannabis indica
gaattttagtaggagtcaactgccatttgaatactttggggatcccaatttgtgcaaaaaagatttcggcaaaagaatgtgagcttttactagaaaagattattgcaagaataaggatttggagctcgcataacctgtcgcatgcagggaggatcactttaatcaattcaattctaatttctattcatgcatattggtcacaaattatgctcattcctaaacaggtgttgaagagaataaattcaaaataccgagtctttttatgagaaggtaaggctaattttgatgagcgggaaatgtagcatgagaaggcttgtagggcgaaaagagaaggaggactaagcttacgagacattctcaaatggaacatagactcttgagaagtatttgagttgtggtagaaaaaaaaaatttgagtcaaatgagtacataatgtatatattaagatggaagattggtgggctcacagagcccttttacaaagtagttggtatagaaaaaaaatagtagaagtcaaagaaagatttaaatatctaattgacatttctagatttattaagacagatttaaatatctaattgacatttctagatttattattcgtgaggagtataccataaaaaatggtcactaactactttgtaccaattatacgaactcaatggtgttcacaagtgtgggggagacttatcatatcaaaatatagtgttataatatggttagccattcttgacagattaaaagattaagcaaagattgctgcaattttagatggtggataactcaacatgcttattatgtgatactcatgaagaaagtatttttcttcttttctttgaatgtcatagagatgtttacaaattgtaaaagataatgtgctaggaagctaaaataaaatcattaagcactctgttgcggtggatttctcgagctctcatgtgtaagttctgaaaatttgtttatgccgcttttgtgacagctgtagtatattatgtttggaaggttcaaaatgaactattttggccatctaaagtgagaaggataaatttaactgtgcataatatttgtagtaatgtaaaaaagtagagtgcagagtgttatgccaaaatcaatt

SEQ ID NO: 307506 - DNA, 645 bp, Cannabis indica
taaaaaaaaaaggtaaaaatgatagactttaaaaaagaggataaaaataaaagatgacaatataaaaaaggtataaaatgtaatttcctcttatttaaaatgcaagtgaaaaccatttaaatctcactgcaccatttaaaaaatattaaatattttagtcattgaattatttttattactattatattatcttgtttgcttatcattattttatactaaatttaagtggatatgaactaatgttgtgcatgcatgtcaagtctataaagtactctttagatagaattataagttcatacaagttgattatttgaataagacaccttaattgttcataaatcttagcatttgtcccatcaattagattgtcacccaattaataggagaacacaattgtacctcataaaattaatggttaatatgcattgatgggttactcataaaattaaagtgggttcccatcacctactcactctaacacaatcattaaacaactaaggtatatacatcccttcaataccaatatggtctacttagacattagtagattaaataataatgcccaatatgataaagagaaaaataaataatatggaccactcttagtctttagaagttccatcaatttgcaaaaaaaaaaaaaaa

SEQ ID NO: 307507 - DNA, 2305 bp, Cannabis indica
gccaagataaacaatggtaatatatataatgggacacgattttgtctcgttattatactttcacagaatgtatttcgtgatgtacggaataattagatggatctcagggtacgtaataattggtctcaggtacgttacgtatttttaaccctaattacccctagattaacggctgtcgtacatcacggaatacattttgaatccgtgaaagtacaataacaggacaaaatcgtgtaccataatataattaatgaattatattcgtaactattacttaaaagaaaaatactcttaaattttaatttttttttttttttgtaaaaaactttgttcttcttatttattcttaaaaaaaatatactacttacaacatatgaatatgcattttaattataatcactgaatcaaattttcttttcttttttccattgaatgagaagttctagtatttttttcctcattttatatttaagttgtatctaattaataatatgtcaaaaaaaaaaaaaaaacttaattaatatctatattattgtaatttgcgatcttgattcctcatcactattatagcgaaaaaataattttatattaaaaagtttacccaaagtaggactggataatgcaattttgagatctctttctggttatctcttgattctgttatcaaaaagagagaaatgggagatgatctgcaaattacggaaagatttaggggttaaaaagtgaaatagtaaaaaaaaaaaagaaaagcaagcaagcaaccaacaaccggttcttgtttgtggtcctaacaaataaattgtggtgtctttctcttttatcatgtgcgggaaccaagatgcggtgaaatccaagcaatccaattgggtccctttcacttttcatacaccaccaccaccatcagaccagtaaccactccactccatctcatctcatctcatctcatctcatcaatttctcttatctcatcttcacacgtactcattacaatttattaaatcctacattcattcatttcattccactccttcatcaatataaccagatctaagttttatttttgtatatatataatgtgaattattattattattattacctacaaaaataggaatgaaaattacaataattattaaactaaattatacttctcaactcctggcccctcctctccaaattcattgatgagaatagagaatccaaagccctaattgcaatcttctactcctcggtactactctatataatatatttatattatatgtaattaaatatatgtgatatatatataaatcatataaatttgaggtgaaaagaaaatgtatatatatgacaactgagcagattaagggctaggacccatgtgagaggaccggtgatataatggagccaaggcagccttctagtacaatataatggatgtctctatatatagagtactactaattaatatacattactagtacgggccactgcaatctttggatctttaatttcatatcatctatttcttggtagataacaatgaggggaacacttgttgtttttagtctaatttttttttatccgtcatttaagagagttaataattcattattttttttttttttatggatttgttacattataattatttgaaattatttataaatttcaaataatttaaataatttatagtgttaaacatatagtttaaatattttattgtacacatatgaagctgaatggttgcgttggctctggggtgtagctccaggtgatctagatttaaacatatatttatgtttagagagttttatattgataatatgtggacactaaataccatacatgagatgcataagctactcttgtcattgtcaattagttttgagatggaaccccatgcacattgccataaactcacttattcctatttcaaccatacacttttacattctaacatggtatcatagtcatactaaactctaacgagtaatcgatctaaatccaaaaaccagtccaaaaaaatacaagccaaaagagtctcttgtaattcgaggatagtgagccaaaaagagccactgtgagccaaaagagccattgtgagtcaaaagagtcacttttgatggattcgtgcaagattggtgagcaaaattacccaccattttgagatggatgttaaagagtctcacattgataatatttggaaactaaataccatacatgagatgcatggactactcctcttattgccaattaattttgaaataaaaccccatacacctttccatacactcacttaatcttactttctaaaccacac

SEQ ID NO: 307508 - DNA, 1581 bp, Cannabis indica
gttgggttgagaaacaccccaacaaaaaaagtcaggtttgtggcgtttagactgtttaaataaacaacgtaatgtagtttgtgagttggctttgaaagatgtaaaatatatgtttttttctttatactttccagaaagtacactgtatttaaatgtatggtgtttattttcatttctcaacaatgctgaggaatctgttaatttattacacttgtgatatcatagcttcttgccttggttccatttgtctgcgatctctagtccttatgtagtctaatgctatattctaattcgaaaatcataccctagaatgattgtgataaacgttcataaaagatgctcttttcatcaaactggttccctcatcaggttaaagtttgttcagacactttgttaaagtttgtgcagatatgtttgtcattttatgaagtgaagaataagcaagcctcttggttcacaaacaaaatagaacgcctatattgggaacagtggtacattaacttaaatgtgtcccagcttcaaaggacaacttctagcaagtctcgtcgtaccaaagttgtcgagccaggaggtacaattattctttcattgaatttgagaattcaacatcttcactcttgaacagttaaactcagttttcacttttgttgtatgtatgagtagagaacgccatggaggagagaagcgctcgaagggcagctctcgaagcatctcttcgtgatgttatgtttcaaataattaaatttgtgaatgagaagaaggatcatgttccccctatcccgaatcgcgagggtgtgatttcttatccttatgaaatcactatccccaggtgactagttgtttctctacctcactttataatcaattgtttgtcattcttggtaaattacaaactagcttgatattatatggaccacttgtttgtcacatgggtcacttaagtttggctcaagtggtttttgtgtggtgtaacagggattagttaaagtggaatgaaaaaagtaaaatataaacaaaaatagtcccattgaaatgtgttggattatcttatctttatccaatccacatcttgatcatgtatatctatggtaagaaagaaataaaatctatagttttgtatcaaaatgtgtgtatagaaaaataaaaaaagtcaaataaaaacatatgtaatgtatgtaaagaaaaataacaatattttagtttgaaacaaacattacagaagaagttttattataactaacacttaatttggtttttctttttctttgctgaaattgattagttcatcggattctgcatttgggatggacatgatcaagaggatgcttcagactggacatccaaccatgcttagctgaactttgttatgtcaattctccagttgggccctttcctaatatcgccaaaaggtcaaatatgtaatttggttaaaagataggggagttctatttacacctctcaaaataaaaattaaacttaaaataatttttaaaaatcactttaaatatttttttgaaatttgtttctcatattattttgtatgaattttattattttttttaaattttattttagattata

SEQ ID NO: 307509 - DNA, 1483 bp, Cannabis indica
tttatttagggcagaaaacccaacatgactatcacagcgacattagtcataccacaaacgaatgcaaaaatttgaaggatgtaattgaaagtttaatccgattgggccacttgtatgagtggatcaaaaataggttaccacacctaaatccagccaaacacaggagccctagtgcctcaaggagggcccacgatagcaccggaggggcagtacctcctggagggatggcccatcagcaggcacccggactagatccctagactaacgaaagaatcgctatgatctctggaggtcctcttatcgagggaaccactagaaatgagttggagccgtacgccggggatctgggacatgataaagatatatgggaagttactcagctttcggctgaaaggcccatgctcatggatcaacccattaccttgactgaggaagatgcaaagccagtacggttcccacatcatgatccccttgtcattgagactcctatccccaacaaagtcgtggcaggaatattggtagacaatgggatctcaataaatttgctgttcaaagtgctttcacaaccaattgactcactacagagatctctcccctagtggttcacaactcactggattcaacgggacaaccctcatccctatgggaaaggttaggctcccggttaccttgtgttctgacacccccaaagcacgttcaaatattgcacctttgtggtagtggactgtcctacagcttataacgctattcttggtaggccgaccatagttaacttcaaagaaatcacatctgtctgacacatgtgccttaattttcctaccttggaggcgagagttggaacggttagtggtaactagggagaggcaagacaaaattataacgctgtagtacacttgtcgatcttaactgtacagggtctggaccggcattgggagcggaacatgacgaattagacccacacattagttctaaggtagcattagaaccaatggaagacattgaagaagtaagggtatgtaaccacgacccatctaatgttatctgccggggtaagaacctagaatcggaggagcagattaaaatcattgacaccataaaggcatcgatggacgtgttttcatggtgccatggggacatgacctggataagccttttgagatttgtgccctaaataaaactctaattcaatgtaatcttttctattcaattgtcaataaagaaatagatttaattttattacttatttaatgtgttatttgattcatgtgatcatttatttatttatttgatttataaattcatccaaatccttatcacactaatattcttgtttattgtgttgtcaacacagtggaaagtaatcaagattgtgtgcttaaatgtaatcctatgatttatcagtacatagggtttaattgataggataatctactatgtagtttacttgcaccttggataagtgctatgtcctttctagggaatt

SEQ ID NO: 307510 - DNA, 1509 bp, Cannabis indica
aattttttttctttctattttttatttgtggaaacatgtatttattgctaattttttatttgtttcctttttaatttcgattggtcctaggttggtgagtttttttttttttgtggggatttgcctttattttacatgtgtagttttaggaaataattgtttttaattaaaaaaattggtttgttggtttcctttttgatgaatttttcgtataaagtaaaaattttgggtaagtgattatgttttaatcttgtttcacattttgtggggttgagtttttattcttttttcatttttggtaacttttgaccaaaattgagaaaatctttgtgtttccttttaaggtatacgtgaagctcaaggtaagaagtaattagtcttttatttatttttttattttgattttatgggtttttattttgatgctataaatatctaactacccattctattctccccaccttacccacgatcaccattatcttctctctttctttttcatcctaaagctttgatcgtttctagttgagagagaaattttctagggtttcaaggatcattgcccaaaaacaagaatgttcaaccatccaagaagcttgttcgtgcttcttcctctgcctcgccatcatccccacctgtggcgcatgcaccagttacctgagctcctgggtcgtcatgtacttcttcaaaaattgccaagaaatcaaaaacccaggcttaaaagtcgacatacaaactcagttcccctttgatcactgcctcgcctattacatctttaacccttgggcttggtgatcatgatgaatcctattcatctgatcacacctcgtcgaagtcttcctcttccaaatgtgttcccaatgttgagagattcattgtccctttgcctatggtaagctctcgaactaggtctaaggtctttactccaaagaaacctgaggtggttcagtctcaagaagtctccaaaggaaagaaagtggtgtcctcatcctctagggcaaagagtctcgaagatcatccaccttccatcttttatctaattctgaaccaaacgaagaacctaaggatgaagaataagaatcaaaggctgagtctgattctagtgaggaattaattccaaaagcactcccctcttttgatgattctgtgcttgaagaagatcttgtcagtgcagcaccggttactgttcctgctgcacttcaacagaaagacaaaggaaaaagacccatgatttctccaagccctattcttccttggaaaaggaaaatgacctctagtattactcttgaaaacttcaagtctcattctcatattattgttacaatggtcatgctagaaatatgaaattttatgagaataggagctttactgtggagaaaaatttcaatgttattgctcataagccatttggggtgtataatttgttgaaagaaaagaaataggtggatacatcgatcaggtttgatggttatgtggatcaaattttcaaggagttttatgctaatataa

SEQ ID NO: 307511 - DNA, 2203 bp, Cannabis indica
atgttgtggctaggcactcttgttttctctcgtgcgttagcatttttgagtataatgcttgggacgagttaatcttccctttgtattctgaatgactaattattcaatgaagttactatttcattttacaaaaaagattaatatttcattacaaaaaaagacttagaacctaaaaatagctaactttctcttttctattttaccccattttcaattcagtatttgactaagtagtaagtatatctttttacatttaaaaaaaaaagtattatctttttaattaataaagtgacttattatttccttttcaaaaaaaaattgacttattatttttattatttaatcgattaatcaaattatcaaaatcatatcatggagtttgtaagtgttgtatggtgacaaaatcaaaatgattttatcttatttacactatcagaaaatattattaaaatacttaaattaaccaaataaacatgctaggattttctttctttgggagctaacatgcaacttcttgactaacaacttggtggttttggtcatttgttagtttctgcagagtgggttggtcggccttctactgatgttttcttgatttaatgaaggaagcctttaatcttattttgtatacacatgatgttttcaatatcttgattgtattataaagctaagcacaacatcatgttatgtactatttctacactacttgaattaggctatctttaagggtaacaatttatttgattgcttaagaagtctcacgtgtaatattgaactaatcaaaattttttaaatgaaaaaaaagcaacactataattaggcagtaaccacgcttactaaaatgaatcaatatattacattcctctctcttccacctcagattaactttaaattttggctaattaagatttttactcctcgaactttacatgtaccaaatcatgctccctgaacttttaaggtcattaaaaatgtctcctgaactattgaaattgttaaatttaagaatttttgttcaattttagtaaaaaaaaatctaacatggatgaaagttcaggaagcataatttagtacatgtacgtggggcatgatttggtagatatcaaagtctggagagcatggtttggtacataaacaatcactaaaatagtaaaattgaaagaaattagacaaaaaaaatttaaatctaacaatctcaaatgttcaggagaaatttttgacggccataaaagttcaggagacatgatttggtacatgttaaattttaagggacaaaaatcctaattaactttaaatttttttctagaagacattttgagggcaacgcccattaaagttgccccggcaggcaccactgcatgcaggcgcataatagcattcgacagccttttctcagatgtctttttacatttataatgatggtacaaaagcatttttaaaccataatttttttttttccaattcataatccttctaaatacctaaaaatcactccaatgcagaaagtacaagaatatttcaaatcaattttctaaacccagccacaaaaaatccaaactgatctgaaataagtttagtagcttccattaacagttataatggtactatatgaatgaaaagacaaagcagcaaatcccataataacaaaataaaggcctttttatgattatttatttactttctacacaaatacagcctagttattcaatgcataatttagttatagaggtgcttaaagcttggcaatagcagatactggcaagttggatcttgctgggagcttgagatcctcccattcttcatcgtctaccttcgagaagtattgattaaccataccatcactgatgagctcaagcttggaaggcttccactgaacaaaaaaacaccaagacaattataaaccattctctttgaaggcaactatgttgaaaatatgaaaagttaaaaccaagtataccttgggatttttatccttgtctaacaacagagctctgcaaccctgcataataattacaggttaatataactggtgggggaccagtcttgtctttgtaaaattagcctttatgaaattttttattaacaaaataatcttatatggttgcggaaacgttcataaattatattgtgcgatcataaacgaccattatgaatgaccatattgttagtttgaaaaatttcacgtgacaagtgacctcctttc

SEQ ID NO: 307512 - DNA, 2841 bp, Cannabis indica
tattttatgaacacccctagttagatatctctgttttgtcccttgactatactatggcacagtatattcggtgtggaaagatgttatgtggcactctttggcacttagttgatcacgttgttatacatattaatgtgaaactggatgatcattggatatgtagtcaattaaacatttttgagcaccgaacatatttgtacaactccctgagatctggtaggtatttatcagctgcaaaagaggcgtgaaagccattttttgtgatcctacctcactatttatctatgttatattttcaaagccttcacaatgaattaagattcaacactatggaaccattttccattgttcctattgatgggttgtctgagcaggtcacatcgtaaattattcctcatgccttatcttgtttattttttgagctatgtttttgttttcattattgttcaattttttttcaagattttttatgttgttccatggttattttgtagtgactgtggattgtttgtaaaagcatttgtcgagtactatattgacaacaatcccatcttgtctgatgattttgatgttaaagttcatcatgatcgcttagcagtgtcattctatcattatggattgaataagcagatggaaaacattgatagtgaactcgagtcttcatcacccgttgggaagtaatgatctacaattttggatcacaaccctagtgttttttagttgtttgagattttttaaatatcttgttgaattaatgttgttgttgttgttgtttttgtgtcaacacgttctagacaatatgtaggatttctatattttcttttttttttccttccatgttaaactatttttgttttggattattcatgcttgaatgtatatattattgtttcttgtttattttgtgattgttttgtgtctattttagagttgttttaccgttgtatttctatatttccttatattattttttaatatttttgttctactcaattttgaaacattgacaatattatttaataaaaatccaatcacaattaatcaaatcatttatatcttaattacatgtagtatccaattattttaaaatccaataaagtatgtacacggatcattgacataactctttaacattaatagaaaaataataaaacttgtatgtaaattctgttccttagtatcctatgctcaaatgtatattcagtttttttgccgttgttggatagttgttctgtagttgttcttgttctttcttatctttgatgcattttcctgtatgttctcttgttgtgccctagctccccacatttactgtacttgttatgttttttcttttccccacagcttgcaccctcctttcttttggccttcgagatttcatcttttcagtaggaggcaagactattatatctttcacatattgcggtacatcccactaactttggtgtcctattgggtacagtattcctttataagttgctatccaatttttctttgtgtggtaatctaaacagtacttgtacgggtccatgttcatctccttcaacacatccacaacatgtccacagggcattttcatcaatatggaacctattgcacgtgcatgttctctctttgagcatggttcttttattctggtcacctcaaacaaataatcagtggttgatttaacctgtgtaattttaaaccaatatttattaaatttagagaacaacaatgggacaatcctacaatgatgttagaaaaaccataatagtaccagaatgattatgtttaagaatttaaagcgctgaaatatagatctgacctccaaattcaatgagtatgtgtagttgtttagtagcttctcttctccaggtggtgttaatttagtaaatgtgttttgtacttttgtcttattattatgtgttttgtacttttgtctagaagaggctcgcattgttgaatattttaatcagtggtattctattttttgcttggtactagatttgcagggttatttttgtggtgggttcggacaccattgaagagaggaaaatctgtacgaactgttcatacttgtaatcttttggtatgaattctctactaacctcgtaatcaacataattttttccttcttcccatcgatcattgctcttctagagtactggtatagattctatgcccaataatattttgacagaatttcaacaaactaacattaatattaaaacatactcaaaataatagtaaaacaactataaaaaaactacacactgttatttttttgttacggtagtccattttttgggtgtccaattattttctatatccttaatttcttatacattgaagataaatgaccaagaacaactctaaaactacgttgaatctgttaagatttaatgagaattattactaaatttatttttatcccagtaatgatgtatatgaatctttaatttgttccattacccatatatataagttatatttcagagctgcatatcatttctataattgaattcaagatcaatgtatgagcaccatttatattttcaaattcaaacaattttgtgtgggtttaagattcttacctttttgatccgtttaattctggtattgatgaagattttgtgttttgttttcacattgactttagtgtttatggtttatcttatcgatataattaatggtagtttttctgtttgttttggcgttgctttgatgtttcagatgataggtgtggcgttgctattcattttagcctctgtacattataaaagaaagaatattaaaagagggcagtataaatgtaatttttaacgcattacagtaaaaatgtaatacttagcccatttt

SEQ ID NO: 307513 - DNA, 944 bp, Cannabis indica
ccataattatgtgttatatattgtttcatttttatatgattatctagattgtaaaatttattccatgagaggagaatttttgaacaatcaagcattggatagatcagcattggatagatcaacataggtagcgtaaaattgagagataagcatttacttatgtaaccgaaataattctaattgtgaaatcaagaggtggaatttttagagttgtttctagagcaagacttaatgaaagtagagtttaatggtggtataaagatatagactattatttttacattctttatgcgacacttgagagagggtatcgagatacaatattgctctagattttttaaaatattgaaataagctaggcacattaatagttaaattcatagttatattagggtcaaatcaaaacctttacaattgtttttatcttattatattctcaagtttattttgttattctcattgttactatactttttaattttctagtatcattccaaatcgattgcatagatagaatttgacattattgtttattgtaattaattattttaattggttttaatctctatgggacgatatcagtcacttgacgactttattatttgtttgatttgtacacttgccaggaattaaaaaattgttttaattttaaattaatataataaagaaaatataatattttaatttaaagtttacttatttttattatttactaattgttgttgtgaaggtgcacgtgcaaagcttatagtacaactctctcaccttttaatcctgaaattgaaagaatattgaagtcaatcagaagagaactacgagctggataaagaaagtgttgagctttgtgccctaaataaaactctatttcaatgtaatcttttctattcaaatatcaataaagaaacatatttaatttcattgcttgtttaatgtgttatttggtt

SEQ ID NO: 307514 - DNA, 951 bp, Cannabis indica
gttaccaaacgccacctatatctataaggactcgtttaataagccgtataaggatcgtattgtattaaataacaaataatattatgtttagataaaacattatattaaattaattattacgaccataaattttaataaaatttaagtcatattatttaatacataacaaataactcgtaataatttatattataatgtttaaaaagggtctagggtcaatttcggcaacgaccttagccccggatcttggactaggacccatacccttactatggacccagactcgatcttggatctcgatcccaaccccggacctagaatgggatcctggaccaggtcccggcctcagaccccgacctagacccgtatactgaaccccaacctagactaggactccggactaggacccaaacccacactcgaaccccaaactcagaccccgtaccctcgacccgaacccgaacacgaatacggacccggactagtcgaaccccagacttgaacacagacacagatccggaccccgaccccagatgtcaaccctggacccagaccctaaaccccaacatagacttggacgtcggaccccaaacccaatcccagaccccgaacccggtcccaaacaccaaacccgaacccaaaccacagatccgaaccttggactctaaatctagactcgaaaccaaacccaaattcaggcttgaacccgaatccaaatccaaaccccgatcgcttaggaacataacacattttatataaacattgtaacaaaggtagtgtaccacatagtgccaaacaaagttttagtattgactgttaaacattcacatagattatgaactatctaaatatacattaaacatcattgttcataatcattaaaaccaaaatcaatactttatttagagcatcacaaatgtaaaaacacatacctcccatattgctattctc

SEQ ID NO: 307515 - DNA, 1434 bp, Cannabis indica
tacaaattacaattcccaagaatagctgtaacatcatcaaagaaagagatttgcaaaaatcattagtgatttattttgtgttcagtacctcatgaggtagagaaaacattctagctgttgtttgatttgaagtggatggagagtagagattatattgtacctgcaatgtgggtttgaagttgaaaaggtagacggataaaaccattgtcagcagcattgccattgatgttgaatagacctgacatgaattatatataggtaaaggtttggatgacgaagaacatgttaatcacaaccaaggtttagatccaaatacatagtgtaaaaaataatcgtaaatctgcattcacaaataataataatgcaagaattatttgaagtttattgtgaaattctacttgtcaaaatgttgctttccaagagttttatgaaatagaagcatattttactgaaaaatcacaaaagctaaagggagcaaagaaaagaaacttataccttaacaatgttatcggcgtatttcatcagccaagaaaccaacaagcccgttgatccaagatttaagaccaccaaccaagttgtaatggtgtatccattgaagaggcgctgccaccaaggtccattctcaaatccacccctgaaatcatccacgagaagccgtgccatgttgaaaattgcaccaaacctgcaaaggttgaaataacaaatatcaccaattcagtggataccctttaaaatctaagctttttaggaatatatcaataaataaatagaagaaaaaagaatgatcccttctcattgttacaattaattgcatgcaaattgtgattgcagtgaacaggaaagaaacattattttgagacattatgaagatggtgagcggcgaaaaggccaaagattgaccaaaaaaatccttagttcaagtgattattacaatagtattacacttcctgaagtgaaaagaaagatatatacttacgtatacaattgtacattctgccagtacaagctatcattgttcttcttcatcaaaaattctgtgtaaacaccagctaatgctgaaagacaagcagataggacacccaacatatatccttggattggtgctgagaatatagaatcacatgaagctgctccacaacctttaacctgcaccattgtaggggaagaatataaaatgaatattgattcctgaacccttatagctgcatgaaaatcaaattgcattactaagaaataaactcgtaatcataaatgtggtgctctatggcgctgctggccctgataacactgtcggcctctggtataaacacttctctaggtttattgagtagttcatagttactagaagattgcagtcaaataaatttaactgtatacattgactattttatctaactgtagaaatagtgattcgaattgtgtgtatatttcata

SEQ ID NO: 307516 - DNA, 1289 bp, Cannabis indica
ttttaattaattgctattaataaaattatataataaataaatagtgtattaacaaaaatatcattacttcattttttttttttgaagtaatagaatggtataaaggtagttttatttgtacataaatgcatgtagactgattacataggtcaccattagagatgtaatctttatttatatggatggtgttaattattacattgtaggtgattctattacaccaaatgagactatagaattgtaatggtgattctattatggttatgattacaccaaaccaaatatgacattacctctatctagttcttttaatcaatctctttcttttaatgggctcttttaataatttagctttgtctagttatttcaactagaatctcaacttgattttatttaaatgatttatttcctattttgatgccttaaattgtattttattggcggcggtaactaattttttacctacaaaagcagaaactttaatttttctttttctaaataaaaaataaaagaaaaggaccaaaattaataacacggtatttatttatacactattcccaccacgtgtaaaaccaaagtatccgaatatacccaaacccaaattcacttttcctttttcactcctaaagctccgagcaattctatcctgttccaaagtctacgtgtatcttaaatctcaaccgtttatcttcaaaaatattttatcaaagagccaaacttaactacacccggatacaccctaattattctcactttcacttttcctttataactattctcactttcacttagaagatgtaacaaatatttaattttatgccaaaattatcaaaatatttacttatttatattcataatatttatattattttattagtatatttaattataagattaaattaagaagcatttatattatttttattgttttacatattaaaataaaactaattaggatttttgtctcctaaattttaacatgtaccaaatcatgtccttgaattttttttaccgttaaaaatttaccttgagctattgagattgttagatttaaggacttttgtctaatttcattcagttttactatttcagtgattattatgtactaaactatgctccacagactttgatagctaccaaatcatgcccctcgaattttgacatgtactaaatcatgactcctgaattttcatctatgttagaatttttttactaaaattggacaaaaatccttaaattcaacaatctcaatagttcaggggtatttttaacgacattaaaagttcagg

SEQ ID NO: 307517 - DNA, 903 bp, Cannabis indica
gtaatttcacaggcacttggaatgaggagaatgaataggagggctacttagttgggacttcctctcttcagatcagtaaagaggacagagaatactcaacatatagtagaccgggttttgaagaggatacaagggtggaaagttaggcttttgtgaaatgctggcaagacttgacaaattgttatgagacttctggtggggcgataccgaggaaaaacgaaaactacacacaataacctaggcacgtctttgtaaactgaagattgctgggggattggggtttcgaactacagagacaacgaacaaggcgtttcttatgaaatgggcttggaaaattctaaccaatgaagattgcttgtggcgccaggttatgaatgacaagtatattaagaacaggatttccttgaattggaagccaaaccgtctgacacttttctttggaaagcaatactccgcacccgtagtgacctccaaaaaggaatatgtcggaaaattggaaatggaaactccacgtccatttagtttgatccttgggtgccaggagataatcggcagccgaccccatgtgtagatgcctcaaaaggagtaagtctggtaagtagttttatcactaattatcaatggaatgaggaattaattaggaaatggttcaggagggatgatgccaaaagaatactcaacattactctacctagtagtatgacaaatgactcttggctttggctaccggaaccaaattggagggttctcgattaaatcagcttgcaaattgttaatgaatcccaacccaaatgtggaagtggatagaaaatggagaatcatatgggggccaaaattcacaataggctcaaattactttggtggagaattttgtctaattgtctccccaccaaagggaaggtt

SEQ ID NO: 307518 - DNA, 1504 bp, Cannabis indica
cctaatattttcagatttagctttggctcggccgaggacagagactgggctttggctaatggcccttggtgtattcgtgggtacacgcttgttcttcaaggttggactccggcaactgacgggccggtggtgtttaagctcctgcgtgtttggatccaacttcttaatctcccccatgaatatttttcaatcgcgaatggtatcctgttgggtggtttagttggtagagtggttaaggttgatctagaggaagacaaacctgcagtgtggggaaactctttgaaagtgcaagtggatattgatgttaacatgcctctgttttcaggctgttttttcgagttggcttcaggggctaagaagtgggttcaagtcaaatttgagaaaatcggcattttttgttacttctgtggctgtttgggacatcaaaggaggggatgtaagttgtcttctccggtaatggtgttcaatcaagatggtattcagtgtccgatgtatggcccgtggctatccatctcttcttcgtatcttgatgttttctcggggccaaattcgttctgttcgcgtggtttgatctcggagggcctggagaagagtcatgggcgcactcctctgttaccagcgacggcggctctgaggggtggaagatccgaagggcaaacgagttaaccttagtcgtcgtccgaggcgtccggcgatggcgacatctcgtgttgctggaaacctcgaaaagcctctgcgcatggagtggcatcccaagagctttcctgctggctctgagaaaagtttgcccatttcggggttaggcggtgtcacagagaacctgcgcaaggaaaaggctactgttcactgtccttgtttgatgatggaagatggtgaccggtcaatagaagggtcaaaggacttgaattttttaaatgatgcaaccgttagtaatgttatgggctctggggcttttactggtgggccaaatgaggttttaaaaagtgggctcttggacaaaaaggatgatgacgtgggctctttgaagttgttaaatgatgtaaccgttggtatggatatgggctctgggactttcactggtgggccgattgaggttcttaaagatgggcgttttaaaaagagaagagggccgagatcatttgggccgactttatctatgagtgggccggttactcttagtaaggagccagctgggccggtccaaagtgtgattcctgggcctaaggatatagtttgtaacaattttctaccacttggtggagaccgtgggagcccaagaaatgtcaatgttgttcctttctctgtgggccggatcaagttgataggcagagaggcgggcaccccgtccatcctattatgttgctcccatctacacctcccgaggatgtttgtgtagctaaaattcattctgatgaagacatggctctctctcaattttttcaagcccaagagaatttacttcatgatctaaaacactttgggaagttagacttgtatgagattc

SEQ ID NO: 307519 - DNA, 1232 bp, Cannabis indica
gagatggggtgcagcgtttgggtggttcggggttgacgtcgacgccggagctgggtacaccgtggacggtcgtcggtggcgtcgacgccggagatgaagagagaaggtggcgtcggctgagagtgggtttgggatgggttcttagtttggctgagagagaggaagagagagagatggtttgaaatgtgaggggtagtttaggaaaatcattaaagtggtcatatatgaccaattttaatgattatacatttaggggaaaaattatagggtatttaaagcatagaacttcaaatttccctttacttattactaattgattttgagattgaatttcataattcttgtgaagatcgattatgaaacggtttttaagtaattattttttataacattcttttaggtttcagactttaattctcttcttcatacatatgcacataaagtatgtatcatgggcggacgtgacccatgttaaggctaggggctatctcctaaataaaaaatatatatttattttaattaattatgtaatatatttataattgaaaatgatattattaagagtacaagccgttcaactcaaattttgagtttgtcttgcatatgaattatataataaggtgcccaatataatatatataaatatactatttgatgtgccctaaattagtgaaatttactttattttatttcatatagataatattgagagtggaatttgtattgataaaaagaaaaaaaagagagtggaatttgtcaaacacatataattaatatatggaagttaatttgacaacatattaaaatattttgagtcttgatgttgattatttaattttcaacaaatcacaactttggtttatgatccgcatttaaatagggaattcaagatttattcaagaatcgatctgcatcaaacaatgacaggcacaacaaggtttgaacttgagaagtttgatggaattagaaattttggacttagggagaaaatctaaaagaaatactcattcatcagaaagttgcaaattaaggcactcaaaccaaaggaaaaaataacagatcaagttgaaaaatgaagaaattgaagacatggaagaggttgcatattgcaccatcataagtacttgtcaaacctagtaaagaggaaggtttaaagcttgaacacaactcgggagttgtgaaacaaacttgaagaaaatatggtgatgtgcctaatctagtagggcgttaca

SEQ ID NO: 307520 - DNA, 1868 bp, Cannabis indica
gttacattttgcgtaaacactcacctaactaaattgtgagcaacaaagttaaaagatctaaacactttttaaaaaattacatctcagaaaagagttcaaaaaacttctacaacaagcaacatagttattaatgttacatctaaatttagactcttaacttttaataactatgttaggatcactttctgtattaacaaactgcaagtctttctctgccgcaataccttgcattttaagggctctaaggtgccactgagattgcttaccaaattgtcacgcctggcgaacccaaatatccctagttaaccataggagtcaaagagatcccttcacatgtttgagttatgggttttcatccgcaaaggggtgcaccgccaagatcaagataagctcataacatcttcaacattttctgttggaactggattaaatcaaaccatgaaccaacgtggaggtgatgcattcctaccactacattgatggtcattaaagtaaaaacttacaaaataatttttaaataatgctaattgggacaagaagatttgtcaaaaaaataaaaaaactcaattgaaatcaatacaaacaatgaaacaaaacatacgccaataccattgttttaacacaaattagttggaaagttgagaggggcatgacttcagactttgttactatatatatattatattatattatatttgaaggtagtttcttccaactttgttttttgagaaagtatggtcttcgagtgggaaatattttattgctcagaatccacctagtacctaccttagatttattatagaagacaccaccatcaaaaaagtgaaactaatcaatcaataaattagataataaattcaaatctcatcttcaacttcaattcccatcacaataacttgaatactaataataaataagatatggctatggagaaggagttattctatgcctttgggcctcacaagattagcagcaacgatgtattttacacaacccatctctcctttgccttcgttaatctccgtcctgttcttcctggtataatttacttaattacttaccaaaattatgagcttatattctataatcaaataatccttcaaattctcaagttaaaatcaatttggaaagaaaactctctttcatttctgtgtgatatttatttaagttcttttcttttgcaggtcatattcctttgttttttccctctctaatttgttaatctgtattgtatgtatactcaaattatctaaaacccaaagttgcatgctaaatggttccgactaattaaactggggttaactgctaattaagcttcattaaatatctgaagtaaatagttttcaatttgattaagcttaacatatataatgttaagtacatgtacttgtgtgcccaaaacgtgaagtgaaacgctttgctgatctaactattgatgagactaatgatctatggacaatagctcataaaatctctgctcccctccagacctaccacaaagcatcttccctcacattcacaatacaagtaagattttgttaattgggaaaattatatttcaaaattttttatatgacttgcagtaatcagttttaacatgcttcaaaataacttgttttaaagtttatattattcattcgtgaaataaattgctttaaaatcaattttcaacacctaatattatttagtatgtcacaaaaattagtgtgatatcctaaaatatatatcatcatataaaataatttatattataatttgcctaattaagaattttacccctgaactttgacattaagtgatgggtaatggttgtttttcaaccatgtgaaaatatggttgtattttcaaccatgtgaaaaagttacaat

SEQ ID NO: 307521 - DNA, 831 bp, Cannabis indica
aaactataaatagttggtgtctatacttgggattcgtaatcattatgaacgatatgggatgagctaacaaaattcaaccgcccggaacaaaacgacaatacaaaaaatatgagtacgttttcttttttctttttcatagcttctttacaattaattaatcattcattaatacaaaagttaaactttcattattgatgattaaattcatgaaaccgaaaacgttaatagattaattggtgacgaatttctttataacttcttcagattattgaattcattttttttttaaaaaagaagaaaatataagattatttaattaattggtactcacgtagaaggcaacacaaattccagcggtgtaatcggatggcaactttatgttggcgctaaaaaatccatggttgtaatgacttgacgagatgaaaccagacccttttattcaaattaatataaaaaataaataaaaagaaattggccaaacataacaatcaaataatattcggacataaatatatatatatacctgtgaaacggttgaggagaagacgaacggctctaccgtcgggggaacgaacgagattcccgtcgccgaagagagggctgtagccttcgtcgaagggaatggttgcgagattaaaagctgctgcggcgccggtaagagtgtagaaaacgacacttaagagacccaacgacgttaatattattcccctccggctactactactactaatacaaagctttttcccacaagaacgtacctcatccataatttgttgtttttttttaattattaaaattaaaaaaaagaattaagaagagtttctaattttg

SEQ ID NO: 307522 - DNA, 2787 bp, Cannabis indica
gcttgtgtcttaattacaacacaattaaatataaaagaacaacaccaagtttaacgagttcgagccatgtgcaatgctctacatctcggttggaacaacaacaaccatatcttgattgatattagtgtatacaagattacaagaatcttcacaaacttctcagagattacgagaagaagtttctctctctagtttagactctctctcaactttacactatcatgatttttactcaagaaaatttggtttgattctcacataggggttacaaatattttcagctatatatagagttgccttgttgccaaaattatctcctaaattaggcacatttacactgccttaaatgatcctctttattaccaacaataataatacacgtcatcttgaaaagcacactttcagtatggacaattcgaaagctctataagtacacaagccatctggatacgtacaagacttcattcctagaagaaccttcaagattgacagtaagttgtttgggagtgtagttctggattaataacaagctatccgatcgggagagacattccatacgtggtacaagcttatttggaagaatctttcggatcctataagaccttctgcacatggctttttggatccacactaatcttatggtatatatgctctccaaatttacaacttccaatcccagatgactaaacttgtataaccataactaacaattaacatacattgttcaatataaaataaatatatataatttcatgttgatgataatgaagatgcatctcctttaatttttttatctgtatatattattaacagctgagtaaaaaactttcatgaatatgtttattattttttattttataatatataaaattagtaatttaatcatggttaatcatattattttgcataatgtggtttgcagttaaggaatattaaattaactacgtggttaagattttgcttaattgtactttacgagttggttaaattttttatcaattcaccgcccaacccacaacacactcacccttacttgatatagttataaaaatgaaaatagtttaagagcaaccataaagttaattttttttccttgaaattatgttatatctcattatttattataaacttttaaaatatgtatcttctataaatatattaattattttttaattgaaaaatctaaaaattatttgtgaaacatattaactacaaataatatgtaaccatcatgtttctttgagattatgttataccatttaatatattacaaaaacatcgacgtctaagttaaatacatataatttggaaaaataattacgtaactatatatagttatccctatatttaaataatacaatgtaattctacattatttgtaaataaatttcataagtatgatgttgtgtgataatctaatttatataataatgaagtagaatatgtatccaaccctatatataatcccttaatcccaaaaataaaatcaaaggaaagttgtcagttatgtgtttgttgcatttaattatataccatgtgaatttattcgatgattgtacgacgtaatgaagagaaagagaattgaatttgaaaataataaattgctcacaattaaggttgtttgttttttcttctgtccaaacaacgcacgagagatctaaaaccctgtcttcaacccatcaagtacaaatcccagatgcacgaacttccacataataatatacaatgaaaaacaaaagtaatttattttatttttcttgaacttttcagttttaatgtatatatattattaatttatgagtgaagatatatatacgtatatatacatatgtatattctgattaattaaagagaaaaacaatattgcaacagagaatagtatcaagcttcgacttagttgattctgtgatgatttctttaaagtttgacttttgatttataatattttagtcattgacttaaattttaacatttccaaagaaatggcaatatgtgtcatcatgatttgcacgccattataagaagataaggaaaataaataagttaattaggttcaaaaaaataaaataaaaccatgaatatatagttgagatttatctaaaagtcaaaatgcaatataaatagcaaagtcaaaatgcaacataaataccaaagtcaaaatgcaatataaataccaaagtcaaaacacgaacgatgttgatgatcgggggctgctcgctctctatgagcaacgagtcactaattaaaaattattaatataaaccgatgcagatgaaggtcatatttaaatgatggaaagggcgtgttatgacctaacaatattatggtggcttttaaatgggatgaatattgaaagattattgctattgggtaccagtggtgcttaattaatacccttaagatgtgttgtcttacgattacgattgactaccgatactccctaaaaattattatattaaattatatgggacatgatacttaatttgaccaataacgatattaacatggagggtgcttgacaccactggtgtcttttagcatttctcatattgaaaatataagaatgagaatatgaatacgaatttaatggaataaaatttaaaatgaataaaaaagttaataaaaaaatgttattaaattttttcttatcatggaatgatttttctttgcattttaaaatgaaatagttattccactaaaatagtggaaaggtcattcccttggaatgatatttccaatattttattatgcaactaaacaaaaaaaaatatattttattttcatttt

SEQ ID NO: 307523 - DNA, 1732 bp, Cannabis indica
atatatatatatatacataatgtgcctttgtattattatagtattgatcagagccatttataattaatgtcacagagagacaattaattaaataaatttggatatgtcatgattcagcaatgcaccatctttagcaaacatatataattagtgcttaattattttgtcattattgttataattttgatatatatatatttaaatttaataatgaattgaagaattttccaggtgcctagtctcccaatggttttagggggtttaaaatatttgggttttaattaattatataattaatatataaggatgggatttgacaaggaatataatttttgcatcaaactaataattattaaaattaaaatatctataagtgttgttgtaaagtttgatcttcctttattctctgggtcctggatgttcctgcccatttggaaaaggttaatttagtgtttaatttaacttctttaattaattaattaattgtcacaatgtcttgtctagcatctctaaagagatatatatgaactaaaatctttctccagaagaatcagataggattgtttttgtcctattatatattaattatatatgctaacccaaataattaattatatatgaacatgatgataatgaacacaatattaaaattaacaaactaactaattattaaataagttagtacaccccacaaatttcttagttcttatattttggtatttaggaaaattttaaaaatatttgtaaattttttaaaaaatttcaaataatttataatatcgaaaataaaatttaaatattttatgacatgtaactatttttatatatatatataaatataaatataatcaactatttgaattaatttttgatattgtaaactattcaaaaaaatttgaaaattttataagtagccaatcttaaataactaaaataatatatacgatcatagaaaaaaaaaaaaaaaactaaaaaaattagtcacctaaataccaaaacaaataaatgtactacaaatttaactaacgaataaaaaaaaaaagaaaattaactacaacatacacaatcaaaataaaatctacgatgcatgaactttcctcgccatcactcaaagatacatattaaaattgttacatgcaacaaactcaagatccaagtctaataccaacaacttactccaaataaaaagatataaatagggatagctttagagctttttatcaatagatcaagaaattttttatcaaagaaagggtccagttgtgctcccaagtgtatgtaagaaagatagaaagaggatgtattcttaatttttactttttaggtttttaggatgaacttctataaattttcgtgttttttctatattttgcatcactgatttcattaatattttttctataactatttctcaatcatgtattgtgtactaatctctctagttaattaggaagacgatgatggtactggtctctagggttcgagagttaatggttttgttgattactcttaaataaccttatttgaactaagtttattgaggattttgtgttttttgttactaaattattttttttgttctttgtcgtatgaacgtaaaatgaactatcagtttagaacttaagtcttattaatttccaacaaatatattgagttggtgtaatagaaagtattaaaatgacaaaaaaaaatttaaaatgacaaaaaaatgttttctattctcacttttaaa

SEQ ID NO: 307524 - DNA, 1972 bp, Cannabis indica
tattttatctaaatacaatttggtatggtacttgtgtttttttcttttttcttttttttttcccgcctttgtgcatgttgccattgcccagggacatgctaatcttctcttattgttccaattttatcatatgtccctaaggcatatttggtacttgtgtttttaataatacatatctggtacttacgcatttagaaatcgtaaatatttggtgacataaactaaaatttgattataaattatttaattgtatatatttgaaaattgtttgaaacatatggaaatggtttataagatagtgttgttgctcctaagtgaatggtagccgtaaggatcttttagcaagtttgggtgtatgatatatatattttttcgataaaagtttgggtgcatgatattttcttcaatgattctcttgcctgccaccgtcaatgttttgtatggaaatgggggagtttttgttgactattattactaaggaaaatttctttttaaacgtctagtatattcttggcagtgtgatatttgatgattcttatgaatttgtgtgggtaaattgatggagctcttgtggtttttcaggctttccaacaatttactggtatcaacacggtcatgtactacagtccaactattgtccagatggctgggttcaaatcaaaccagttagctcttttgctgtccttgattgttgctgcaatgaatgctgcgggttcagttctcggaatataccttattgatcatgcaggacgaaggaagttggccctctcaagtttagctggtgtaattgtatcccttctcatcctctcaggggcctttttgtttggttcgtctgattctacaggtggactctctggttggtttgcagttataggtttagcactttacattgctttcttctcacctggaatgggacctgtgccttggacggttaactcagagatatatccggaagcatatcgtgggatatgcggaggcatgtcggccactgtaaattgggtttcaaatttgattgtagcccagtcattcctttcaattgctgatgctcttgggactggtcctacattcttgattcttgctggtatagcagtgatagcatttgtgtttgtgagctgttttgtgcctgagactaagggattgacatttgaggaagtggagaatatttggaaggagagggcttggggcaatggttcaaacactcagagcctacttgagcagagaaacgagtcgtagagagcatgaagtaagatatgatgatcctctatatcattattgttttatatttctgtttagtgttttaggaaaaagccggggaggcaagggattgtcctttgcgcgggttccaacatggacatggattggacatagttggatgagcttaaaggattttgatgcttttcgtatctcttctggaacaacagagaaaaaagagtggaataaatacggatacttatgtatttctctatgtatgtacctatatatatctacatatctatctgtataatgctgtttagacgttgggttcgagacaaacatgggtttaagtcacttcaaatatatgaattttggatcaatcgctagcattaaatctatgaatattttcatgtgtatattgtgaatttttatttttatctttcaagtaatttttattattgttatttttgagaatttagagctttgaagaattttttcaagttttaatctaataatttttttttgctatattatttggagcaaaaaatattgtaagaaaacatatggcattacaacaataagagtaatgagaaagttgatgatgatactatagagtcgagcaacaactacaacattaattttggaagagaaagatatttttttatgacggtctaaatatgaaaaataatttccagaaaattctaaatctaaaccctttatgatctcatctttccctaataaatctttaatccttaatttttttttttttaatgttttt

SEQ ID NO: 307525 - DNA, 2872 bp, Cannabis indica
atatatatattatttataatgtgaagaataagatcaaaagagaattatattgatagatggatctcatcatataatttatataaatacattatatacattgacggaggaggaagaagattcaataggtatttttgaaaaaaaaacttttgaatttccttttttgtttaatttcccttactaagctaaaaatgtaaaatttaagtctaaaatacctattatagaaaaaatccctttttcttttgtgccaactgtcatttttttaaagaattactatcatataattagtgatgtctgtaaagtctgataaaattaattatacatacataatatttttgaaatataaattaaaattttgattaaaataattatatgagaatatatattatttttttttttgaaatcggattcattcaaacaacaatcaatacaatggattaggcgagtcttttcgcacagcttgactcgcacaagggggaacaaccctaacccacatggcactagttttgttattcaaagcttcattggctaatacatgagctacttgatttgcttccctaaaaacaaatgaaaagccctctcaccctcacattctgcagcaagcttttaatgtgagcaagaacccccatcaacatctctgcatccaccctcttcctgctgcactaacttcacagcctgtaggcaatcagattccacagagaaggccggcaactgacactgtattccagcttgcagccccctagcaatcgcctgcaactcggcttgaagtggagtcatttcctgcatcaccactgttgcagcagccgaatgaatagccccaacataatcacgcaccaccaagcttgtactagctactcctgcccccactttcaccccagcatccacattaattttgaattcctctgtggctggtggtagccaacaagcagtctccctacgagcccgatcacatttagggacattactttgtcgaaactcactgaggtacttactacaccattccaaaatagcactagcttggggtttatgacccccatgagtaacagaattgcgaacatactagagattccatgaaagaaccaagaacaattcaagctcatccgttgtaaaattggccgagattcgcatcagaatagctaatacatcctccctccccaatctttgaatcttcccatagaaaccatcagaagtccacacctcacggttcaccctacagttccaaagtgcatgaaaaacagtttcgtaatcaccattagaacagcggctacagtaaggctcaacttgaatgttacggcgagcaagtgccgcattagttggaatccaagaatgagccatcttccaaacaaagtgcttaacctttggggggattttgagtttccaaagtagcttccaccatttctcagtggcttcagtatccgattgtacatcccgtacctgcaaagcagccgccatacgataaccactacgcaccgagtactcaccatctttactatagtgccataagattttatcctcaatatcccactccgacgtaggcatacttagaatgagatccgcatctgttggattgaagacagctctaacaaactccttatcccaagctccattgggttccttcaaatcaatgacataaagttgatccggtaaaggcgatttgtcatatattttgaatgtgagaggccgaggtagccacgggtcctcaaggacccgaaccgagtttccattgccaattcgccaacgatatcccttctgaataatcttttttcccaaaccaaacttcgccaacaaaggaagcatgattcccacatttcgcctccaacaccccactataaggatagtaactagctttcaagaccttgctacacaaagaatttggaaaccttatacacctccaaatttgcttagctaggagagcttgattgaatagacccaaatctcggaatcctaagccaccttgctccttgtgtttgcacataacggaccacttacaccaatgaatcttagcatccttttccgatgatccccaccaaaaccgtgcagccatactatggatactattaatagtcttcttaggtagacgaaaacaactcattgtgtatgttggaatagcttgaacaatggccttaatgagaacttcttttccagcagcagaaaaaaatgaacctttccatcctttcaacttattccacaccctattcttgataaactcaaagtgttgtttcttcgtcctcccaacaaaagaaggtaacccaagatattttccataattatccaccactttgacgcccattaaagtggccaattgagccttaacaggagaggaaatattgcgcccaaagcacatttcagatttgtgaaaattaaccaactgtcctgaggcaatagaatacatttccagcaactccttaaaccaccgacattcattttcagcagcttctaaaaacaccagactatcatccgcaaaaaagagatgcgataccatcacaccttgccttccaaacataaccccatgaatacgccccctctgttcagcatgctgaataaaactagaaaaggcttcagcacaaaatagaaaaagaaatggagagaggggatcaccttggcggaggccccgttgtggagtgagacgtccctggatttcgccattaatgatgaaggaaaactgaaccgatgcgagacaagccataatcttactcacccaacccaagctataacccaacttaaccatcatagcctccaagaaccgccactcaacccgatcatatgccttcgccatatccaacttcaaagcaactttcgatccatttcgaaaacgatttttcctcatcacatggagactctcataccccacaatagcattatcatggataagccg

SEQ ID NO: 307526 - DNA, 1574 bp, Cannabis indica
atacttgtgagtagatctaagttcttggtaaaataacttcctacacaacttgtgtatatgtggtcaggtttttagttcacacaatcaacaattgcaacatacttatctagttcgctcatagactcgtcaatttgtggagatcttatcttcacaagaatttcgataaccttattactcttcccaactggatctacagtctcgtgacaatcttgaagcttcaagacttggtttaaatgatgaaaactttataaatgaatattctaagcaatgataattaatttatgttatttaatttaattaagataattttttaaggtgtacagttgtattgatgtatgtgtattatttttaatggatattaattttatgttgagttaattatattagaaattctgatattgtttttctaattataaaagaattttataaattaattcatttttaaacaaattaacaaaatgataataatttttttttttatattaaacttaatactagcagattaataggggcagaatctgccggtactaatgtgtcaaataagtaatctgacgaattaattaccagaagatcccgcccctaataatctgccgataataatattattaggggcgggatgtcagtccgctgctactgaccacaaatagcgacccattattgccggcggggtattatcggcgggccccgccggtaataacttttaccagattttatcacttttaccagcatacctctccgcccctaataatactattagttgtagtgatttataataacataggtttgcagttagttacatttaaattcgaatcccacaacaatatttccccaaaattgtgggccttaattacgctccataaataaatacagttattattagaaaatcctgcagctgtgatttaaatcgcttttaaagggtcaacgctgacgtggattaagacacgctgcaaaacgtatctcgctgaggcgtctcgcttggtacatgaataacttggtttattcataagtcttctaacaatgggatgagcaccagtgtactgagcaaacttaagaactgctttttgaccataaggccttgtagactggacaatcatgtcttgggggttctcaataataacaataaccctggcaacgagttggaatttactaggagtatgcctttttatagcaagatagatgcctcgctatctgttatttatgtacttcaagctgttacacttggctagtataatgtatattatatgctaagtgttctaacaaccaattttccttgtcaacacctctctacgtattgcgaggtagatgcctcgctatgtattatgaatttcctccttgttgggttttgtgtcctaaataaaatctatttcaatataatcagatttactaattaataaaagatcagaaatcgcttttatgttgcatggttcacatgatttatttcatgattatgtttaatgtataaattctattaagtctagaacatatataaatatgtatatatttgttcatgaatatagtgtcgtcagcacagtggaatataatcaagattatatgttcaaaagtttaattcccat

SEQ ID NO: 307527 - DNA, 1066 bp, Cannabis indica
tgttcttattaggaattgtcttcaagttggttgtattaaaaaaaaagttataaaaaattaagcttagggtcctatttttaccattttaaaaaatatagggtctattttgtcatttaacaaaacagagggtccaatctataacttttgcaaaacacaggattcaaaatggtatttacccataaattgatacggtaagcactttctcaagtaattaaaaaaaataaaataaattaaaaagtatgtaaatatgtcattttgctaaagaaactagttgccattgagggcgtcaaaaataataaaagctattaataatttcttaatcacactaccaccaatctctttccttatccccattaattcttatatttgatatatatctcaaatatctcaaaaacattgacaagaaaatagaaagttttaattatattctttttccattttacatgctgagatccataataacatatctatgaccaactcaattttgcttggtgttgttaggttattttcaataatccaatatataagcttaaattaagatattttatttaaattaatttttgaattgagctgaataagtgatcaaattaaatgagtctaataattattttatttggtattagcttttgtaatgtgtaatacctaatatagttaacttaattaggatttataagactctagttagtatgctatataaagaactttaggatttggtccctaagactaatttttaatactcttttccttcattcccattaattgagtaagaattcctagagagaaaataagtatgtggaagaccataccccacaatctcatctcatatctaacactgtggaacaagatatgtcatcttatcgattctctcgtaaatttgataatcaaatatgagaagatccatatgtatttttagatctatttctaacaagcattagacctattaaacaccattatttttacctatgatcgagagagataatattttcttttcaatcaagtctaggggtggcaaattatattggaatgtcatattcattttgtgctttgtttgatctactatttattt

SEQ ID NO: 307528 - DNA, 4495 bp, Cannabis indica
cattaattcactcgtgtttatttcctattatttatttagctaggctttttttgaccacattcatggttttcattggctacttaaagcttgcatttttatatatttttttttgttttacctttttgtaggttttccttgttcacattcatataattaaagttgtaaaaattttactagtaaaattttacaaccataaacgaccattatagttagaaaacgaccataaatttttactatttcacatttttagtttagtaaatttcacacaaaatcaaaactccaaaattgaatacaaacgaactagagacgaagctctctcaatccgccattattgaagccgagaagaagaaaatgaagagggttccaaatccgtaccataatttttttctatcacattttacttcaaatttggcagttttggtgtgtggtggtgagtagtgagtccttgaaaaccatagccatttacatgattacaattccattatattccattgatggggtttttggtcaagtgggaaccactttcaccttgtgctttgtttgccttatttttgtcatagctggctggctaccacgtgccatatataaattcatgtttgcctttccattccaaacaccattctccatactttatattaaaaaaagcaaagaaaaatgagaaccatatttatgtgataatattattattatatataatacagtattgttgtagcagtagatctactctactctactcacctaagaagaacaataccactatttttatttatttatttacatagggagcatacaaaagctagatatggttctataaatctttctggactaaatatatcatttttccctgaaaaaatttcagtcttaattttctcttcaatttcagacacttttttggagcataaagactgatatttttaagtaagtgtttgattttttacagtctataattgtttttttttttagttgaatttcacttaatgcaagatgtgtttttgagcttcattcatggtttcattagcaacttaaagttagcatttttacatattcttctgttttttcttttctgggtttttcttattcacattcatgatttcattagctacttaaagtttgcatttttagatattcttcagtttttcttttctgggattctcttgttcacattcatggttttcattggttactaaaagttcaagtttttcctctaccctttttctgtctttaattagaaatgtcaaagtataatatagtgttctttttagctggggtcttcttgttcataatcatagattcatcaactacttaaagtttgcatttttatatattcttctgctttttcttttctgggtttttcttgttcacattcatggttttcattggctactaaaaagtttaatttttttttcttcccctttctgtctttaatataattatgtcaaaatataattaactttttagctgggcttttcttgctcacaatcatagtttcattggctacttaaagtttccatttttttttttttatacttttagtattagaaatgtcaaaatatcatgaatcaataaataatcactcttagaagttaaaaaacccatataattttttttctacttcttaaattagctgaaaaagaaaagaagattcatatatttccatattggtaattatttctaacatatgggtttaggaagaaaaacttgaaactttacatgaagaaacatgaacacaatctttggtaaacttttgttattggtaaaaagatctgattttgttatcaaaaagtacaaactttcttccaaatttgtattgaatacactctcaattgttatgtcttcaatgcctttaacaaagttttgatcaaaataatgatttttccaacacttacaccaactgatttttcactccttaacaggactgatctgatgtctaaggtagcaagcaaaaacttctttacagagctatctgatcttccaaaaaacccgaaatgttccacaaagaaagagatttcgacgctgcagaagcgcgccaaacacagaagactttgttccaatcgaaaatcttatgtcgacagcaaagtcttctgctacaacaacatcatcaaacaatccattctcaaccaaatccatcattagaagcattcgcccgagttttggcaaagtgattatattcctgacattctatttcggtttaggcacaacatgtttctacctattcagaaaccaactcaaaggaaagaaaacaaatggtgttcttgatgcaatttacttctgcattgtgacaatgacaacagttggttatggtgacttagtaccgaatagcaaagcctcgaaattactagcttgcgcctttgtctttacggggatggctctagtcggtttgacactaagtaaggctgcaaattaccttgttgagaagcaagaattgttggtagtgaaagcattaaacaagagcaaaaacaacacaaaccaattacaagtcatagaagaagctaagaacaacagaacaaaatacaagtgcattatgatctcaattgttcttttggtgattataactattggtgttgtgtttcttacaagtgttgagaatatggattttgttgatgcattttattgtgtttgttgtacaattacaactttggggtatggtgatgtgagcttctcaactcaaggtggaagagtttttgcaatcttttggattttgataagtactatttgtttagctcagttttttctttatattgctgagtttaacactgagattagacaaaaggctttggtggatatggttcttaatcgtccaatgactaattttgacttggaagctgctgatcttgatgatgatggctctgttgggtatgttattcaaaccaaaatctttgcttttgagttacttttgtttcattttatcttgattatggtttttccactcccaactataaactatgtattattgtgcttttcgaatttttcagtccgttcaaaatagttcttgaaatatttacaatattgtaaattggttcctgaattatgaggtgacgattgcttaaatagtcatgtcattattctgtttgccacatatgacaaaatttaacagaatgaccaatttataatactgtaaatagtttaagaatcatttttaacaggctaaaaaatttaggagcataataatacatatgtcatagttcaaagagcaaaatcttaaataaccataaattttggtaaaaaaatgagctaacttaaagaataatttaacattgatatgtcaaacatagtaatgtaggtattagctaaatcacttctattatttacttggtaagattacactaatgtttatgtgttttataagttggttgtaacgaaaccgtttcaagcttttattgggtatctttctagctctcatgtacagtaagtacgtcattttagctgcttttagtcgttttttcaagaaatagcagagtgatgtactcgtgtataagagtcattaattagtggtaaggtgtttaatagagatttgaagcgggaaagttaaattggtatagctagaaagtgtttttggtatgaatttgttatatctagactatctcacttacattattgttgttttaattattagaaagaggtgggacatgatgttgacagaaaaaattagagttattttgttttcatttttgtttcaagttttttcttttctttcaatcttgatatataacattttggtgaaaaaagaaaaaaaagtttaactaacattgaagtaatatagagggtgttttggtaatggtgttatgttcaaaattaagcttaaaataaacacaagttagtgtaaaacaagaataaaattatttattatttctaatctatctcacttgtattattttagttttaattatttagaaagaggtgggggacatgatagtgacagaaaatataagaaatatatatattttttgtgaaaagaaaaaaggaaaggaaaacttctagttaggtaaagatagtaataatttgatataattatttggattttttttaaaaagttattacaataattttttaaatagggttcaactgtttattcgaattttatacagaggtctttttgtaaaaaaatattaaaattagatgaaagtgtaaaatgtttgttgtttgccaattatttatataattatttatcatgtatgattgagactttcctctcatttttcttccacacaagttgcatagtttatcacatgtatcaatcattcaatccttagggtccccactttaaagggccctaaattttataaaaatactacctttttcattttcaatttcaaccaaaaaaatcttaaattttcaaaaatattattttatatacaaatttttataaaaataccacttttatttttttgcatattacccttaatattcagggctagcttaatcataataatacaccatcttaatgaaatttttacacataattacataaaacactattttatataaaaaatttaca

SEQ ID NO: 307529 - DNA, 2724 bp, Cannabis indica
aataaagtcccattcaattcgatcataagcttcccttaagtcgagtttcaacgccatataaccatctttgcctttgggcttgcgtttgaggtaatgcataacctcaaaagcaatcatgatattatcagaaataagattacctgggataaaagctgattgattttcagatataatgtgatgaagcaccacctttagcgtattttcaagcactttatagatcacattacaaagtgagattggacggagctcactcatcgtagtaggttgcttcttcttcggtattagtacaatgctggtacgatttaaaccaacaagaatagagcaattagcaaagaaattcttgaactagttattaacatcttgcccaataattgaccaatatttctggtggaatcctggtgtcataccgtccggtcccggagacttgtcgggatgcatttgaaataaatctttcttaacttttttatcaataatcaggcaaaggagacattcattttcatcaacagtaatagaaggttcaactcccataacaacctcattacaactagagttcaaagaagaaaacaaagtccaaaaataattcacaatgacagcagcaagacccaaatccaaattaacccaagtacctgagttaccttgaagacattgtatggtgttatgtttctttcgagaagtcgcctttgcatgaaaaatttgctattttggtcaccctcccgaagccaaagttgtttagacctttgattccaaaagacttcacgttgattcaagatttcacttaacatcttctgagcctcacgaaacttttgtattgaatctaaatcacgacctgtcttccactttcttatttcttttttacatttggcaattcgttccttgaagttacccatgtaatcacaacccaggttgtcaaatttttgccacaaatacgaattctttccatgatattgcactcggcatggagctcccaactatctgtgaccacctaaaagcataaaggctcgcgtaaccatgcattttcgaacgtaaaattgatgagcagggacagacaaattctggacagtgggctgaagtgataacaggtagtggtccaaggcagagatttcaaggttaattaactgtgaatatgtgaaataatcaaaccaacaatggctgaccaaggcacggtcaagatgtacttcgatcaagtttgatgtacctcagcctctctctcatgtaaacgaatagccaagaagatcaagatcaacaagattgcagtcaacaagcgtttgattaaagccatcgactaatgcttgaggatagttgttacctcatcgtttgtctacttgactagtgacgttattcaagtcccctatgatacactaggggagagtcgaagattatttcagagttcgaatgaggttccaagtttgatggcataaacctctattaggctcaccataaaagcctgttagtctccaggggttagaaccaggctcagtaatttggatatcaatgaaattaaaggaaaaatttaacagttgggcatctgcactattcctccaaagcatgacaatacccccactatgacccctggaatccacagagtacaggccctcaaatcctaacttcacacgatgcctttccaacacatcattacgacttagagtttcatagagaaataaaaaattagatttcttttggatcagaagaaccataaggaatcaaaaaacccatgggttcccaagcccacaacaattcaagcataatatactcatggtgaccgatgggcctaagtaccagaacccaccaacaattattttttgagcccaacacaaagctgacatcatgcccaacaaaatcactaccatcttcttccatcacttcagacgtaggcccacgagaattaaatggtcttaattcagaatgaactgaatcaataggcccagtaacaatcccatgtttagtacaacaccgtttagtatcaacaatcaaattttcttctaatttctcctctaatgcatccacgtggatggcttccttagaaatgaaagactttgcacctatattttacagaatttcctcagctcccataactccctttgacttactattattagccagatattcaattgatgcaccacgatttccttcactcaattcctcaatcataggacgatgattgatagccttttgtctgttcacactaccgtttgaccaaccaaaatgcaatgagtcgtcttcatcaccatttctcaaccactggcttccgatgagatggtttcgacggtgaggttgggctctcatccaaatgccataaggctggacgatttgatccaaaggtgtaaggatcccgcatacaaaacaaaatgtgggaagaaattcatatttgaaatggcccagaaaccttcctccccagtagtacgttgtagcctcattctttggttcaatggaacgataacatccaaagttaatcgtagacgcaaatattcacaccatataccttagaaatttttaggatcagactcgacaaacttacctatgtagttaccagtcctctgaagaacttgtttagatttgaattcgtactgaaggttatgtacttgaacccaaatatcaagaatattgatagtcactaactgtggatcatccctttgttgggttttatgccctaaataaaactcatttcaatataatcagatttgtttattaatatagatcagaaataacatttaatgttgcatggtt

SEQ ID NO: 307530 - DNA, 2179 bp, Cannabis indica
attattaaattttttcaaatcttgcattggaatgatatttactttcattttaaaatgaaatatttattccattaaaatgatattctaatactttaaaatgcaactaaacaaaagaatagaataaaaattattttatttccactctattatattacttccaactaaataccaacttaatttttaaaagcaaaattagaaagagaggtatctatagtcttacacttttatctatatatatatatatatatatatatatatatacattatcttcactatatatattgatagaaagaaaggtagctacctatgcatgccacggtcggtggggaataaagaacaagattctatttaatctgaatgaaaacgaaatctaaccaataaatgttaaagatggaacctgattccataaccatagctagatttggtaccggctatatatcatttttctaatgtttaatttttgaataggaataattgtaaatgaagggatgtgctagctttaattttccctaatttctttcttttaataatcataattaataataataaaaactatacgtagggtatagagttataacatgcaagaaaggaagaatgtatatatattggctgcctagatgactttgtgccacactcaatagatcaccacccaaaagctttcggtgtacactcaattacacttttgaaattccatgtcgtttgtcattatgatcatggaaatttcatttatgtccttcaaaaagcagaaaacattttactaattacttaacggttaatttggggattgtagccatataaatttagagacattattccatccatatatgtggggaccttaacgaacattagtataattgtcttatattgccttacattgtagtctatatatactcttatattatgatcacaaaacaaatagggaaaacgccaacacaaattgtgtaattattatcaactgaccacaattattgattaaaaatgacaagaacgttgttctcgagctaagtgtcatgtataagatattagtgtcaatgtaaggattttcttgctttaatttattaggctgtaaagacagtttgtactactcatcttgcatgattaaatctaaagctcatgaaccttttaatttactttattcgcgaattaacactatgtatagattagcaacaagtactaattaaagcttgccaaaggaaggaaccgataatatattattggatcaacaaaatatatatatatatatattagctagtcatcattgttaaatgtattgcattgagatatttacccctcatccctttcaaaataaaagttatgtatattagtttagtttgaactgcacctgcacctgctagtctgctactctaattagaatcaccaattattagaaattgatacacatttctacaatactcaattaagtctagaattttctatacatttgtagaaaaacataatctaaactttcagataattgtaaaataatttagaattttctagacatgtaaaaatacaatacaacatatatagacatttctagaaaactttagtctagaggtttctggttatgcatgcttaagaaatatatagaaatgtatggataaaatccttgaactagaaagatctagagaaaacaattctagcctcaaatgcttgaaggctagcaactataaatacccatcaagggtttcaaattgtaaccaagcttccaaatcaagtcttttactactaacttactaccttgtctcctctcttactacacacataaaaattaaacgcataacttttccttgtcccaccaatcatccaacttatcaacatcatcatactacactacctaatatccatcccatacaaatctaaaccaatacaaatttattctcaaaccatcagtggtaccagagctccgttcgatcatatatcactgggcgtaatcttttccactcatcaacatgagttcggagtacaatcgctcttcactacctcttccaattttccatggagaaaactatgatttttggtccatcaaaataaggacctattttcgatcacaaaatctatggaaaattgttgaagaaggaatcgatattcaggaagatattacatctctttcagaagatcaaaagaaggcactcgaggataatcaacaaaaggattctcatgcattatactgcttgca

SEQ ID NO: 307531 - DNA, 1012 bp, Cannabis indica
ccacgtgtcatctggagataaaacggaactccaacctcttctctagtctctctaattatttgtataattatagtaattttgtttgatatagtgattaaaatgaatttatgaatttatgaatttacgatataaatttttacattcagtatagaatttttttcgaaccaaaataactcgtaactgaagaatatgttttaccaaattataagttgctaaattttaattgcaaatcacatgaaataaaactgtcttaaaaaatttagataataaattcaaatcacactcaacatattaaaaatattcttttttttttaattaatagttgttgcaagagataacaaagctagaaaataaaacatcacaatacaaaactaaaaataaaattatattagaatgagagtataattatagtaattagtattacacaacatactaattatattatatgttaaatataatacatgttcaaaatcttatgaggtgatagttaaaaattacacaaaataatatttaaaaggaaatgtacgtattttagtaatcgcacattgtaaaccaattcttatagtaatatgagaatttaagagtgtaatgtaattacaaaagagatcacttagtggagattttttctttagtttttgtctttttaacaatcctgaattatatttcttttcaagaaaaaactatgtaattaatttaagatacaccaaattcacttttcaaacgcgcataaaaaacaaagaaatcacaatgctttcaagatctcttattaaaaaataatatctcataggacttttttcaaattttaactaaaaaaataataatattataaaaaatatttttaggtcgccaacagggccggccctgaaataaagtgggccatagggaaaaaaaaaaaattgggcccttatgttagaaaaatatggtatttttcaaaatcggtaaaaaaaatgtataattttaaaagaggaaaagaaaaaattttgggcccctggactgggtgggccctaggcac

SEQ ID NO: 307532 - DNA, 1616 bp, Cannabis indica
aaaaaaaataaaaaaaaaaagaaaaatcaatacaattttatatatattaaataggtgaaaaaaacaattatgattaattatttacaatttacctcttaaattaatgttttcaaaatttttcatgcaatttttatataaattgctctgttttttctcccgaatttgtaaaatgtactacgtatcaattatacacgcatgcatgcagtttctcatgaataataacttaaattaaagcgggtaaagagtgtagtctgtagagacctttacactctcgaatataaaatatatgaaaagagtataaattctgttcattcttattttaattattgatcgtcactaatatcactaacattatttgattagaatcgatgtgtgaacatgattgcccaccttttcaatgctcctgcgggagatgaagaagctgcggttggtgtgggaaccgttggatcatcagaggccataatgcttgctggtctagctttcaagagaaaatggcagcaaaagagaaaagcagagggaaaacccattgataagcctaatatagtcactggtgccaatgttcaggttatcttagttctcaatcttaacaaactttctaaacactggtgttgtttaagtaactaatatcagtcacactctttcagaatgaatatctatctttgctttttttctgattgattgaggtggtgcgagaatgtataggtatgttgggagaaatttgcaaggtactttgaggttgagctgaaagaggttaaactaaaagaaggatattatgtgatggatcctgagaaggcagttgagatggtggatgagaacaccatttgtgttgcagccatccttgggtccacattaaatggtgagtttgaggatgtaaaaaaagtcaatgaactccttactaagaaaaacaaggagacaggttgggacaccccaattcacgttgatgctgccagcggcgggttcattgcgccgttcctttatccagatcttgagtgggatttcagattacctctggtgaaaagtattaatgtgagtggccataagtatggacttgtgtatgctggtgttggatgggttgtgtggaggagtaaagaggacttacctgaagaccttattttccatatcaattaccttggatctgatcaacccactttcacccttaacttctccaaaggtgcttttaaatttgcactagaattagtaatttacttattctcaccatttaatttaattctcattaacaagccttgaataacataaacatgttatatgaaagtattaatcaactgacctcttctaatacatctttctcgcaggctctactcaaatagtcgctcagtattatcaattcatccgtttgggagtcaaggtattttgttttacaatcaaaagaaagatcaaatattaattatgcaaagcctaacactagcaacattgttacttgaaaagggttacaagaacataatggaaaactgcactgcaactgcaaaagtactccgaaacaaattagaggaaacagagaagtttgacattgtctcaaaagacataggggtgcccgttgtggcattctctctcaaagacagtagcaaatacacagtgttcaacatagcagacagctt

SEQ ID NO: 307533 - DNA, 1226 bp, Cannabis indica
agacaacagccaggggctccttatcagagtacacaaattcaaacatcatattataattatgaataataatatgtagcatcaaatcttaaacgaataattactcgttaaaagtaacttactacatgtgtatcaatgttgtgtgcaatttatgtgacgtaatatacattcatatggcggcatactagtgatatttttgtgttgggttatatgattatttactatatataaaatttatttatagatatttttttttgataattatttatttatagatttaagtaccctagacaaggaaagagaaatgtaaaaagcataatcgtataaataaataaattaggaataatagcatcattccctattttgggcttaaagatgggctcttttgcaaacatgttgctggcattgttgttaaaaggggaagcaataagtaacaagaccaatcactcgttattataaaagatgggcttgttgggtaatgatattgttaaaactaaaaaagtaattatgtttgatttctatacataggctttgttctatacgggtacctgtgctagctgaagctatattactatgtgttattattattatatatatatatatttatatatatatatgtaaacatagaattactcacttataagcattagctagctaggttttagttgtactctcacaaaatgatatggaaatttgaatgagaaaaggtcaaaaagcattaggaataaattctctctctttttaaaagaaaaactctaaataattagtactactggagttaagcaaatgataaaggagcaaatataaggtttttgatccacaaaaagttggggacgtggatgtgtcaaagcataacataaggctctttcttttattttctttttatcgcaacgttgaatacatatataagtgcgtatgaataacatgtgtttatggtgtgtacacgtaaatatataacaatatatgattcgaatcaaaagtaaaaccgacaaagtgacaaatgggaatatctgcatgttttgggcagtattaacactcccaacactaatcatttttctgaacaaaataaaattaataaaaaaagagaagaaatctcatattcacaactagagttaacaataaactactattaactattactttttctgctacactaaattttaaatagtaggtttcttctcagtaatatgaaaccatggtgtttttttttcaaaatccaaaaaataaaa

SEQ ID NO: 307534 - DNA, 1378 bp, Cannabis indica
aaaaaaaaaaaaaaaagtatagttacaaaatgagtatctatttaattaatttaagttagttttagtttattgatactaaatatacaaatattaactttaaaaatatagatacataattttaaaattattattagactattatttatatatgtattttattattattattatttaaaaattacaccaaaaataaacaaaattatcagttagctggataagagaccaagccaacacctcaactattttgcactttcaactagtccaaaccacttgcacttggctgtttttcactgaagactaagccatcgtaatctctttaaacaattaaataagccaattaatttaaaaagtggttatgatctattgtatgcataaaaattgacaaatgaaaatgtaataaaatttgtttgactaggccagaacctagctatataatatctaataggcatagtgatgagtcatgagccatgtatctacaaatattcttggtgcattccccctacctatcattcatttcatatagctggatttggtctttctcacagggtcaatcatggggtgcatgtaggctaaccttgcctatgggactccatggatgaggcaccttatagcttagtgttattcacccgtgaattcatccaagtgggacttaccatagatcttcttatacaagtgaatctaaataaataattccataaagctccttgttctaagacatagtttaatatgaagtagaagatttttcatttgttgggccacataagtctccctaatatacaatgaattcaataaataattcgataaaactacttgtttaaattgtagatatgatttttgccgaattctcagatagttggataagagaccaatccaacaacctcaactattttgcacaccaaatcacttccacttggctgtttttgactaatgctaacaattgacacaattcgaaaacaacacgaaataaatgtatttgagtgacacatttaatttatgtgaataatcatgctaacacatttaatatatttattaaacttgtcattttcgaattgaacacacttaacttaaaaatggcacgatcataacacattaaaagttatgaaatttttttttttatattattttaagtaaaactaatactctaaaaatatctaactatatatattgaaagaaatctgtgtatagttcctctaaatgaaaaaatttccataatcgtcatttctgggaagttgattcatgcacggttgctggtcccggaagaagtcttgtgggatgatagtcgaatccgaaaaggaattcccggatgactgttgtaatacccggaattaagaaatggattagcaaaaccctaagtagataattatgtataattgaggaa

SEQ ID NO: 307535 - DNA, 869 bp, Cannabis indica
ccatttatagaatataaaaatcctagagacaaccacaaatacattttttcgaacggttacaaattttttccagttttttttttttgatttgcagcatcaaaatcggactctgctgcaatagatcaagaccaaacatgaaactttccaaaaaggaccaagtcatgatttggtatttaatacatgccaaataaagtttatttaatctactataatcatgacaaaactgatttcatcaattagaaaaaggtaagtaaagtttttcaaaaacatgcaactttccataaaaagaattccttatcttgtaagataaattttctaacaaataaaaccagccgcgaataaaatcttccttagaaaaaaaaaaaagcaattaaaagcacaaaatcaacacaaaaaaattaaattaattcacaataaattaaataatattttgacaactaaattaccaaaaaatgaactaacattatacctcaatctttttctcttaaccagtccataggttccaccaccactgtgttgactatccttaaagagcttctcactcaattcggttgggtatttaacctaccagcaattcatacttttggccatttatgagccaacatctcagtgttggcctcatttccaagtgtcattggaacatcatcaagtacatccgagacaccacaaatgaatgatacttcagtatattgaacaccatcgttagaccaactagacaacactattagaatatttttatttatggaaattattttctaattaaggaaatgatttctatttaaagaaataaataaataattgattttctgataaatgaatattttatattcattaaatctggacaaaatcaattatgtaatattctatat

SEQ ID NO: 307536 - DNA, 1907 bp, Cannabis indica
atttcttttttattattcgttatcggaccaaaatttaatggtttaatatttttaaaattaatatttataattaaatttatttagtacccattaatcaataataccattgaaaagtattccatgtatatatatacatatatgaaaattaaaggaaaacaaacagattaaaggagacatagaattttaaatgtacaagtggcattttaaatggaagagatgggaaaatataatttgttgggaaggaatgagacatgattgtggggacaagtgatatttttctataaacataggatgttaagtgttaacaataatatagtttccacatatagaatatttacatacttaaattcctatgtgcttggttcttataaacaccaaaattatttgtcaatgtgaaccttattatcaggttcttagtgagataagaagactaatcgatctatataagaacgaagaaaccagcataacgatcaccggccatagcttgggcgctgcaattgccactctaaacgcagtagatatattggccaacggatacaacaaaccgacagtaatttctaatcacgatcacaagtggaacaccaacacagcaacatgtccggtcactgtctttgtcttcgccagccctcgagtgggtgacaacgattttaagaagcttttttcatcgtttaacgatctacgagccttgaaaatcagaaacgcggcagatattgtcccgaactatccctttattgggtattccgatgtgggaaaagagctagtgatagacactcgaaagtctaagtaccttaagagccctggaagcatttcgagctggcacaatttggagggccatttgcatggagttgcaggcacgcaagggagcaaaaacggttttaagttggaaattaacagagatatttctttgttgaacaagagtatggatgggttaaaagaagagtaccttgtgccaatttcttggcggtgtgagaaaaacaaaggaatggttcaacaagatgatggttcttggatgttgatggatcatgaggacgaagatgattgataattttctttttcttcttttccaataattaataatattgttcattaattgagatgatattgtaattaaactcttttgtttactaaagagatcaactaaaattaaatattatatatatgctgatggatttggataaatattaatattcggatcaagtgattaattcactaagtatataaagggcatatggagtatttatttgttctaatatataagcttttagtatgctatagtactattattattatttaataagtttggtatatactacagtgtatattatctctgaatttttattactaatttttaaaatagatggaaaaattgtattactcgtaagttctgctggattaggagtacaaatcataaacgtttcttggctttcacaaattggtactcaatttgcatcggtttaatagagggggcctaaatcttaagcactttgaagagttttttttttttttttgatgaagaggaatttcattgcacaataaacttcttatgtttacaatctatggcttttcatggagcatatataattttatacatcaattttgtaacaaaacacttataactctctaaaccaatctaaatcttttttatcgatacatttaggcattacacaagtaatcctattttttactagccatttagtttctcggactagcaccttcggatcagtgcactccttgcaccagaaaagtttgtttttggcctgccatatcttgtaagccaaagcaacaatacaagctgtgtaacagctccctttgaatttactcagctttgctcgattaatccacctcagtgtaccatgcaaaggcatacagattttagaaaatccttcgacgaaacgtcaataataccc

SEQ ID NO: 307537 - DNA, 1792 bp, Cannabis indica
attattttcttttcattccattccattacctcaaaccaaacgccacttcattataacttgtttactcttacaaaattataaccttaatttatatttagaatgtttattaaaaaaatgccatgtatctataagtttatgtttatttcattttaaacaggtgtggagattgctcttggaatatttgttctagtttttggcacatggagactatacaaattcatagataaaagaaaagaaatcaaactcaagaaaatatttttcaaacgaaatggaggtcttttgttagaacaacaaatacattcaagtaacaacaatgttgatcaaatcaagttgttccattcaaaagagttagagaaagcaactaatcaatttagtatggacagaattcttggtcaaggaggtcaaggcactgtctataaaggaatgttggaacatggaaaaattattgcagtaaagaaatccaaaataattgatgaggccaaactctctgaatttattaacgaggtcgtcattctttcgcaaattaaccatagaaatgttgttaagttattgggatgttgtttggagacggatgttccacttctagtttatgaattcataccgaatggaacactttctagttacatccatgaacaaaatgatgagtttccttttacatggaatatgcgattaagaatcgcaattgaagttgcaggagctctttcgtacctacattcatcggcttcttttccaatttatcatcgagatattaagtctacgaacatacttctagatgaaaaattgagagcaaaagttgcagatttcggtacatcaagaactattcccttagagcaaagtcatttaaccactttagtttatggcacatttggttatctagatccagagtattttcaaacaagccaatttaccgataagagtgatgtttatagttttggagtggttcttgtcgagcttttgactggacaaaaagtaatatctacaacaagggatgtggaaggaagaagtttggcgacacatttcttgatgacaatgaaaaagaatagcctctttgacattatagatgctcaagttctcaaaactgcctcgaaagaagaaatcttaattgttgctaacctagcacaaagatgcttacatttttgtggaaagaatcgacctaccatgagagaaatagtaatggagctagagatgatacaaatcactgataaagattccaaaggtagtcattataataattatgaagatcgagttggaatgtgcatacaagatgaaattgttgactcttggaatgtttccacttcgtcaacagggttaacttttggtgataatgttactagtttcaaattgcatgaggaattgccattattgtaagcgtttcttattttagtttttttttcttaaaaaaaaaatacaagagcaacattctatcattatatctaatatgtttttaatttaaaaaaaataagtattatttttcatttgttatgactcttagaataaatataaaagattgtttgtttttattcaaaagtctcgaaaagttagtctatgatactctttacgatagtttgtccaaataacttataacctatttatttaaatatttatcctaaaattgatctattcattcgagtgctcactttcaaatttccaactccatgattgaatatcttatagccatgaatgactacctaacaatgcaacaaacaacgcaagtaaatcgggtaacaatacaaaataaccaaaaaaaaaaaaatttaataatataataattgtcactcatccgaccacagta

SEQ ID NO: 307538 - DNA, 934 bp, Cannabis indica
taaaaaaaatatcaaaaattagttgattgtacaattttgacatgatcattttgctattttcacaaaacactcatagatcatttgataatttgttcttattttcttacacagatcgagcaggtttgcaagattacagacaataaaatgcacaattgcaggaaaaaatctgtacatgagattctgctgcaccacaggagacgcaatgggaatgaacatgatatcaaaaggagtacaaaacgttcttgattttctccaaaatgatttcccagacatggacgtaattggaatctcaggaaacttctgttcggacaagaaacccgcggccgtaaactggatcgaagggcgaggcaaatcggttgtgtgcgaagccacaatcaaaggtgaggtggtgagaaaagtgttgaagactaatgtggaagctctcgttgaacttaacatgctcaagaatctgactggttcagctatggctggtgctcttggtgggttcaatgcccatgctagtaacatagtctctgctgtgttcatagccactggtcaagatcctgctcagaacgtggaaagctcacattgtataactatgatggagccagtcaatgatggcaaagatcttcatgtttctgtcactatgccatctattgaggtaaaattttattataatgttttatatttttgccttaaattgtcaccaaaaatattagttgctataagatcttatcagatattattggtgcctaaaatgacatattttaatgtcatccttattggtgccattcattaattagtaccatcatcattaattgctgtcttattggggccactaatataatattattattgggtatcaatagtacaaaaatggtcaactttttgttacaacctcttaattaatctctacgcctgaaaacacatgtcagaatatttttttttcaatttt

SEQ ID NO: 307539 - DNA, 1506 bp, Cannabis indica
ttaataaataatttaatatatacttagaggaggtggtgggtgtcgtggccacgaggaggacgaggaccgtggttaggaatggcctgtggttgagtgaacagaccaagagaagagagaaagaaagcatcactgactgtggagctcgattatgtaattacactgtaactctgtaattgaagataactgactgtagggtataattacagtatttgatatgtttttctcattatgtaattacactgtagctgtgtaattgaagataattgaatgtcaattatattctttaattttcatggcaagaattaagtgtaattatactgtgtaattactaatttttttttactttaactattaactgctaaaatattttatttttctttataattactaattgttttgtcatattagaaattcatatgtaattaacttcttatctgaacacactttgtattttaaaatatagtgcaatttttaaacattgtaattattagcctaaagattatactacctaataattaataattacattatctgataattacacaattaatttcaaacacaccttaaaaaaaattctataattacacaaattattcatcaatccaaaaagatgtgtatatattcgcctcccttataatattttagttctacaataatttattgctttgtatatgtttcacaattatttgtctttcatataacttaaagcttcattaattaaagaatattcttaggataccaatagcattatatttacttattattattattattattttcttattaaaaaacaaaagaaaaaatattatgtcttgtaaaaattggggtcggtttacacatggaccccgttcaatcgccataaactcattattaaaccttgatacttatattctttaaaaaataatcaatttttgtcaagttgagccatcggagtataaagatgatttttgataataagattcatattataaaaatattatctagatacaaaagaaaaaaaaggtgttaaagttgtggatacattatctctttaaggatttcattcttataaatttctagctaggacacaaatgtgttttgtccatctaggatatttacaattattaattcctttcaataaattattattccttttggtacgatgtaaaaatctctcaatagttttctttcaccaaatgtatataataaatgcaactagaattagattaaaatttcttgtttgactaaaatacaaggaagttacttcgaagccgcgttcttggtatatgtttaaaagaattattacagactaggagtaggagaacgtgttcaaaacattaattaaagcatgagtcacggagtcacataacaacatgactatttcattttgggatgtaagccattaagattagcttagtggtgaagaaatgatgaaaataatagaaaggtcatggatttgaattcaaaattttcaaactattaattaattgtaaaatactattacgttacactcaaaaaaaaaaaaaa

SEQ ID NO: 307540 - DNA, 1776 bp, Cannabis indica
catcaatgctaagtgattttaaattgatattcaaattgttgtttatactgtcttgctcagccttggctcacgcgtgctctattgtgtaggaaagggtaaatttgttgttgattagccatggggtcgaggactgtcacagtgtattatacatgttaagaccaagctagaccacgagggttgggtctaccaggggaaaatattgtaatctccacttttgccgcttaggccagcgtgtacaaatagcttgtaatattttgaaaatgttttacgtgatcccgaactaaaatgttttcttttggatgtttcgtaaagtttaataattacaagttattatttttattctgtatgtttaaagttaaatttctggtcttggctctagtaaatcccaggttagcgggattagtatatgtttagtcgtagtgcgcgacgttcctcttgtttgggcgttacaatatgagtcttcttttgctctttggtaacgattcctttacccttatccttgtgaacacctgaagttctagggtccttcagatcaacttactcaggtgcctctgtcactggaggggcttgtatgtcagggactgtcctggttagagcagtcatcacagcctccattctggtcatcttggcgagtagtgtctcgttgaattgatcttgacgtgataacctcttctctgttagttgaaattgtcgcgccatgaggaccacggggtctgatttgtcaagcttgtatttctccccagcatggtcctcaactgctttgtcttgatgatcgtcttcattcatatcttctggtgcattatcgatgttgacctcgacgtcctcagagctactttctccttatttagcatcttcattgatgggatcgtctcaattctgatcttcatcttgaaaattcttctggcagctagtgacttcctatggatcactcgtatctcctgctttggcactagggccggtgaaacgaaggctagacttgggtctggtgagggccatgtttactcaagagtaattctgttagtggtctcactgctttcttcagctctcaataaaaccaccaaaaaatttcgcgagatttttggaaatagaatgaaaataataagaactgaagtaatacaacgaatatgtaacaagagacaaatagttttctacatggttagggcgttaattggccatagcccacgagttagtttatttagttagttgtttacttgtaaatgctttgagaaatgcacaagatgtgtgttcatatgtttgcctgagcaaagtacatcagagtgttcaacccctaatccatgggattaatggggtatttatagtagttgtaggatttcattaggatttcccattttccctctaacgaggagtttacaataaataatctctttaggctttctcatgatgtccaacccatgaagagtacgaccagatcctgactaggcagatcaaagttgagttgatcaaatcaatattgtgtcccataatggtgggtagttattctgaaataaccacatcgcagtgattatgggaagtttccccttatatcgagatatgatattcaagcatgatctcacagctaaaattcccttatttataggggaggataaatagaaaaaattgaagggtcttctagcaatacaatatctctccattttggctcgttatactaaaggtgtcttacgagctcaataagacgaaagcaaaagactctgtgagtacgaaacttgtgttgggttttgttccctaaataaaaaccatttcaatataatcagattt

SEQ ID NO: 307541 - DNA, 1427 bp, Cannabis indica
aaagaaaaagaaaaaagaaatatgagaagagaagctcactgactttgccacacagtaataagtccagataaaatgagcaggccaaagaccaattatcacagctgaattcccaaccacaatgatagctaccacgattggccctattattgcagctgaaacgcaacatagaaaataactcaaaaaacagtttggctatctcacatcaatccataccaagaaaaaagcaaacgaaaagaatccactacaggtgtaatgtaaactacaccatcattttccaaagaaatatatgaaagtaaagtagtgaaaagatacgaaagatggtaaaatttagataggtacgtacctttgaggaggccaagtgtgaaaagcaataagaagaaaggcaagaatgagatgaagctccataggccggccagaaacccctgtggaacctccattagaggtgggtatgaaaataatgtagtggcagtctggcaagagttgaagagagagggaaatggtgtttgataatggaaattgaggaatacaaaaatttttgtgggggttaacaagtgtccataaaggagagagtgttgaaacgagggggggttacgtggagagtttagatgattgagatggacacgtggctaccagggaactcgaataccgtgatgttgtatctgccacgggcagttgggacagcaactcgccgcccctcctcttgtttgctaattgctctctcctcactttttttattttggcgggaatatgcactttctacttcttcttcttagttcttttccactccatttctcgttattttaatattttcagtttctacaaggtatttttgtgggctgtatatataccctatgcagatgttactggccccacacgtatttgtgaggagatcgtatatatttactttaaaaaaaaaaaatactttgcttctctatgatgtttaaaaacgtgtatgatccttaaatcaaaattttcggttgttaaactaattaaaatttaacacctcaatttaatttttattttttaaaaaattaaaattctaataaaattaataaaattagttaacatatttaatataaattaaattaatttatacttaaactttgacaaatttaacagggtaagagacatcaatttttaacaggtgatcatgatcttgattcatgatcctttggaaaaaccccactaaagtatggctagaagtaatgcagaggatagtaaaccatgactgttgaccgttcaaatcaactcttgagtctgtgtccttttttttattattattaattttttttcccttaattgaatctgtgtcttctattctattaaatttagagatttttacacctcatgtcaaaattgacatcttttttacatttttatcaatacacggttttttaaacttttttaacttttacatttttcaattt

SEQ ID NO: 307542 - DNA, 2771 bp, Cannabis indica
cattattttcttcacactttctctcacattattttctctctcatcattttctatctcattattttctctctcgtcattttctatctcattattttctctctcaacactttcggttcaggtttggttggggtctgggggtctgaggtctagagctgggttggggtccgagatcagggctgggtctaggatcgaggccagggtttgggtccgggctagggtccgggtccatgttcgggctagcatctggggtcgggccgggattcgcgtccaggtccaggctggggtccgggctgggattcagggtcgggggcggggtggggtccgggtgagggttcgggtttgggtcgagtataagaccaagttggggtcggggcccgaggcgggtacggggttgggtgcgggccaaggtcgggtctgggtttgggctgggtctaggttcagccaggtccaggtccgagtccgagtccaagtctgggtttaggatgggatcttggttggggctgggtacaggaccaggccggagtcgagtttgaggtccggggtaggtacgggttcgagtctgagccagggtcaggtccggttgcgggccagggctgggtctaggtttaggctggattcgagtacgggcagtggtcgggtctgagctgggaccaggttcgggtccgggccgaggctgaggctgtgtgcaggtcgaggccgaattcaggctgagaccggatccaggccgggtcggggtctggggtctggggtcgtggtcagggtccatgtccgggtctaggtcaaggttcgggtccaagttcggaacccaagtccgggtcttggtcggatcttgttcataataaggtctcaaagtattaaattgtttttcaaaaaaaaaaaattttaaaaaaaataaaaattattttttaaaaaatattagccaaacgcgacttgtctttcaaaaacttcagaaaactattttttattctcatatctaaaaatacttttctaaaaataaaaaatagaaaataatatcatacatgctctaaaattttaagtatgtaattatttcttctttagcaaatatctaaccaacatatagaaacaaaagaaatactaaggggtattaattgtgtctagtactacaagatattaattagtataaaaaaattattaatcatttgcgagacatcatctcgtgatggtgttgagcttttaatttagtaattattataaaaaaccgttaaccatttgcaaaacgtcatctcgtgatagtcagggccgaccctgagctaagacgaaggaggccgctgccttaggccccccaccgcttagggtcctatttcgaaaaaaaaaaattaaaataattaataatacttttaatgttaaatatgtgttgtagcctagtggtacgtaatttgattagtttaataactaagaggttgagagttcaaatcctaacctaagaaagacataccgatagacggtaggcctgatcatataaaagatttacataaatagagcaaactttgctagagcatgagctttagtgtcattggtaagattaagaacactttagtgatttgtgtgcttctattttgtgacctcaaaccttgattttcttttcattcttttcttcccctttttctacggatgagatgagagagaggtaatttcagtccccgtgactttcaaaatttgtgttcacactcatattggtattgccatgctacttgagtcttgactatttttgttttttgtttacggaatttccaaggcaattgctttggaaatgttatgccttttcacattaatatcattatgcctctaaattgatgtagtaaggaatcagttatattcagctttcagtatagccacacaaatataaaaatataacctttgtatgacgaagaccaggaaataaaggatcctattgacctcatgctacaaagtataggaaataatgtgatgatattttaaatggtctcaatatatataccaaaagaaataaagaccaaaaactaaacacacaatcgtcttcccaaataatatacacacacaaaggctcgtcaacctgtaaataaaattagagtggggtgattacatatttatatattattattatgttaaaaattttaaaattttaataagaattataaaattagatataataaaatgtatttaattctgttaaagtgacttaatgtcaatgagattttatatttttattttatacatacactattacaaaaattaaaattcgtgatggtcctaaaaacatttttttaggggaccgtcgctaaaagaattaagtaactgtttaaaattgtcggaaaaaaataatattccttacagtttataacagtaattacaggaataggcgacgattttaattggaattcgtaaatttattgggcccttatacccgatggtataggcgacagttttaaaccgtcgggtataagggcctaataaaaaatcgttacctatttctcgccacatttctcacgtgcccgcctacttcttttttatttcccacatgcctacctatttcttattcatttcctacaccctaaaacgaaaaatcttctctccaaaaccccatccacgccttcgcaccatcgccctcctctctcgttgtcttctttcgtctctcgatctccctttcttctcgtctgtctcgtccgtttacttatgttttctcatacaaatctgttgtctccagctattggggcgccccaggtttttgttttcaagcgcgggaaccccaatctagaacttagagttgtaaa

SEQ ID NO: 307543 - DNA, 2426 bp, Cannabis indica
gttaaatgtagtatactatttgtttttttttttttgttttttttttttttttttataataattagcctctaaaaaataattttttttaatggagggtataaatatggtatatatgtattttttagtctataaaattaaattctaattgtgatgtataatatgattcaaatttaaaaaatactaaaaattgtactaaatttaacacaaaatataataataaatatcactattttatttattcttttaccacacactttttatacttttatttatatattcataaaaagttaatgttaaaagtatataattatacttgaaagggtcaaattagtttctggaataagttgaaaacaattagaagacatgtaagccactgtgagaataagggattgttattaggtactaatggtacttagtactttttataggtagcatactataaattaatttaaaaaatttttttaaaattattttcttaaattatatttaacgtacccggtacttaccggcataacaatgaaaaaagtgttagacactagtggtatattttagcaattctcgcaagaatattcctgtttacaaattaagatatctaatctcattaatttatgttattttaaacgaggattaatgactaggctaggctagtttgcctgattaatttgatcatgctgtgttggacttggacgcaaagtagtgttctgtttctcttacttacagcttggtcgagattctatcatacgtggcaaacaaaagaccccattccaacaaccctttgtttctttcttacctaatcttttaataatttttcttcactatataaagagtacaaacgcttattaattcttatattatatacattgcaacactttgaatataataaccttcaaatatggccaccaatatctccatacttctcttcaattccatatttgttctcataatttctcttgccgttgtccaccatgctgaatctcatgaccaaatggtataaatatatatacatatattagattaatctttatcttatacttctttgttcattaatttgttatatattaattggactaataataacaactaattaataaaaatataaattgtactgtgacaggtgataacaaccaccgttttgagctcaacgtctgatgagtccaatcttcaaagtcctttgccacaaaaaataggtaactagtaactaccatttactaattattcaaaatatttatttctttataacattcatatatgctgccaaacctaatctatcaattaaaaagaaattataatataaaaagaagatagagatagaattgatgaacaaataatattggagtaattattacatacagattgtgatggagcttgtgatgcaaggtgtgaaaagtcatctaggccaaggctgtgcaagagggcatgtggcacgtgctgtgctcgctgtgattgtgtgccacctggcacttccggtaactatgatgcctgcccctgctatgccaacatgaccacccacggcggtcgccacaaatgcccttgatttatatatatatagttataataataataagaagaaagatatatctcatatgtatttcgttatataatttattaataacaacatctagtatgaattatttgtttgaaaataatgaagatcgtaacaaagacaggtatattatttcaatgttttaattatattattatttgcagaaatatttatttcaatgtttgatatgatatgtttgttacgaaattcttagttaaattagagattgcgtacaatgcatatacattggtttggtttctttatttatattcaattataatcactttcaaatcaaaaaagaaaacacgcaccctatcacttaaagaaaacatagtttattttgaattacataaataaaaaaaattacacaaaatatatatctgaaattatatttttttctctttgtatttttaggaatttgtgatattttataatatatattgttttcatgttctaacaacgtttaaacaaagttttatatatatataaaaaaaaaaatctgtaaaaataaataaaatattagaatttcgtaaaatgtaatttttttttgttatttttaatatttctgaataatactctcaataaagaaatattaaattataatttcttatgtactataaaaataacctctgttataccaatatggccgaaaggtatgtcctaattaatgatcaaaagaaattttctctccttatatatatatagttaaaagtttttattagttggagtatcattttgctcctctagcattttctcttcttttccgcaagtgaactcaagcaaaagagacatggaaggacaggcgaagcatgtcatgttgctcaatgttaaattattgtttatgcatttaattcaaggctaattagtaattttttcccccgaa

SEQ ID NO: 307544 - DNA, 1013 bp, Cannabis indica
atgtacatgttcgagccatatcagaccaagcgggttaagggtctaccagtgatgaacttttgaattctattttgccgtttaggtcggctagaaagaaaagacttgtaatagattttgtaaagatttttgggatcccaactgtttaaaagtttaaatatattgcaagtttattttcattctgtttaatataaaaatttaaattctgagctattttgattagtaatctcgattaggggattagggtttcataaacattttgggtagcgtgcctaattatttatggcgttacaatataaactaccgacaattaatcttgacacgtgagttatatattggagtaacaaaaattaagatttatattgtataaataaagaaaaatacatttataagtagctcagttacacaaatcaaattatactttaccagacaatattcttttatcagtgtttcattttaagtccacttctaaataaattattagttgaaaattcacccaaatgacaattaagtttagactaatttttatttttattttttacttctaaattaaaaatattttcattattatacacatgagatattgtaagtatgcaacttatgatcaaccacacgatgctcagtacttctgtacatcttctctacatatattcagtacctgtacttgacactgtgtgcgtacaacatgtagtataacttagataaaattagatcctataagaactttgtttttcgttgcaatgaaactaaggattaatattgtaactttttcatctcttttgattttacatcaatagtattatttttttaagtttttacaaatataatgtaattaacttggttacctcttgcttcaagatataaatttataatcataccaccaatggcggaactatgttgctggctgcaggggccatggcccctcctcacattttgatttttaaatgtatatacatatatttataggctctctatattaattgctttttttaaaaatatatatttcttgataaaaa

SEQ ID NO: 307545 - DNA, 1352 bp, Cannabis indica
gatcctggtataataatttccaacagcatctacgagccacaatctcatatatgaataaggaattttttgatatttcatataaattattcaataataaatattaacaatttaacattcaagcatatatcaaaatattaaactcttcattaataatgaaaaatgtttttatagaatttttaggacataaaccccaacaccttcttctctagtgataggtgctgggggtctccccttgaggtgatgagatgagtgttgtctaggtgaatctccacaccgtgaagacgacaaaagagtctaggcaatttgagatgattgtatgtaaggaagcaacttagtctgagcttgtccttcctatagacgacgccaaactattaacactaaaaactcattaattaacttaaggtcaaaaaatcaaaactcaaacactagagttagaatgaagatgaaaatataaaaattcaaaaacttaaggaaatgtttagagcaataatggaggaagacaaatacttgtgtttctatgcatgaagtgttacaatgattttctaaccccttctcatatctgaaaaaagaggtatataggctctaacagcctagggtacactagcggtcccaggggacatggtgacatccacgacctccaagctgtaggttgcaagtagtggtctcacaccttttacccgtgtctggtgtcaagtggtcttgggttgcaagagtaatggctattttgtacccttggttgggttgtcaggccttgcaagtgtggtgcctccactacttgtacctcctcgccttcaaaacttgcagaaggcgtagttgtacacaacttgcatgcacgccttttccttgtgatcatactcttgtcgtcttattctttaataattggaagaatcccactcgccatggctgtaagctgcatggccgagtgacattccttagagccttggtggccatgtttcttctaggatttagtcgagtgacatttctctttgtcatggtcgagtgactttcctcttggcttggtgaccatgtttcttctagggtttggctaagtgactttgctctttgtcatggtcgagtgactttaaggtcactgtggctgagtgtcttttcttcttgctaaggccgagtgacttcaaggtcaccatcgctaagtgacttcattcttggtcatggctgagtgacttcaaagtcactatggccgagtgacttttcttcttgccaaggtcgagtgaattcaaggtcacccatgcctaagtaacttcattcttagtcagggtcgagtgacatcaaggtcactatggctgagtgacttttctcttgccaaggccaagtgacttcaaggtcaccatggc

SEQ ID NO: 307546 - DNA, 1797 bp, Cannabis indica
aggacatgatctcctactttcttaagaaaatcattcttgatggtatcgttctcactcaaaaaatactttcaaaatttacttctccatgtagaaggaaagtatacacgttatcatcagatgccatttacctaatgtaatctaatttacagctccattcatttacaacacatgaagaataactggcaatcctaaaaatcagaaatccaaaacccagaagtaatccagaagcacataaaacctgtagtgtaaaactacttcgctttatattatgatagcgaccaccaaccagaaggttgagccacaccaaccatgtctgttatataatttacacaataggctacctacctcttctatttgtttctcaagagaaaactacggttgattttaagtatcacacaagttgagagagtttattgtcaatgccacacaattatcaattaagggaagtaaacttgacttccaagcttgtttgtctagctaacgacaccctaacacagccacacaaccaagactaacctcctcatttcaattctatacacataaggtcttacaataaaacgcatcagtaattaaactgaaatcacattgctttagtgcttccctcttgtccacgactcttcttcttttgttccattttaacttggctcattttcttatagtcagtgttattcatttatgaaaccgaaatcaaaatccattagatactttctttttttaacatgcgtgggtggtctagtgttaaggaggactgttggtagggcatctattccaaggctcaaatcccacagactcaaaaactttggggctagaactgccagaaccaaaaaaaaaggcacacattccatttcaaatcaagtttgttataaattttcatgatccttcccactgttttgatttccttcccattaattctttgactagagtttgtatgtcctcaatattgcttctttgatcaaatgtggtataaggccataatttctcttcaaagtttactcaaaattcaacatcaaatccttgtttctatacaatgattcacaaacatgattcaggtattgagagataattttacacaaaaatcaactatttataaatagcaaaattaaaaatattggtgatttataattcaacagtaagcagagaatttgagcacactaaccttgtctaccaccagtgagctttacttgtacacctttgtccacaaacttagcgagatccaaaactgtctctttcctgcctgactggaatacatattaaataaactataagccaatactgaagcaaaaaaagaagaaaaccaaatgaacagtagaaaattgaaaatcccagaacatttagtttaatatagacccgaaggtgagcccaaaactgccaagatattttgaagaatgaaaaaaataacacggaaaggttaatttcaaactcaaagccaaaactcaccatcttatttgggggttttcttcagctactcaaagctcagtgatacctttcttaagcggctgatggcaacgaacagaagagcaaaggcagtgggagatcgggagtggagtagtgacgccgtcgatgttacagcagccaccggagagtgaggagaaaaagggactcgtcctttctgactttcacgaatggtatggtatggtcgaggatgaaggagacgaaagtcaaatttatagtgttctaggtttttcttattttattttattccattttaattatttttaatcagtgtaagaaaaagttaattgaagggccgaatatgtaaatttgttccgcaaaacatataaagtgtatctatataac

SEQ ID NO: 307547 - DNA, 954 bp, Cannabis indica
taaacaactgctaatttccaaattaactaagcgggctttacatgtgctctgccttttcacattctacatggtatcaggagtttattgactcgtcttaatgtcttctttgacctctgatcctactccaatggccactgccgcttctgctccaatggcgacttcccctgtcaccgctgttactccttggaatcctttctccaactcgcctaattcctctctcatgacgaagcttgattgtctcaagtatctcttctagaaatctcaagtcatgccaactgtgattggccatgatcttgatgatattttgtttactggtgtacctcctcctcaggttttggtcaatggcgcacctaatcccaagtatactcagtggtgtcgtgaagattagcttcttctttcttggtcacgatcttcaatgtttgacatcattcttgcattagtggctaatttcatctcttcatccactatgtggagggctcttgaacaaaattttgcttctcagactaaagctcgatgtctttaactcaaaattcgattctcccacattcacaaaggtggtttaacaatctccgaatatgttgacaaagttcaggccatcacttatgcttactggttccccaataagtaatcaagacattatcttatagcttcttaatggtttgggtccaaaattcgattcaattgtgctagggataacctcaagaagtgatgctctgtccattgaggaagtataggcattacttttatcccatgaaagttgtcttgaacatcaccatgccatggccgatctctcgatcaaaatgcaggaaaatcttacccttggcaatggttgatctggtggtttgagaccttttaccaactctaaaatggggacaaatgacaatgcccaatacactacttgtaactccctaatctataaggatatcatgtgtgattttataaactagtttaata

SEQ ID NO: 307548 - DNA, 1216 bp, Cannabis indica
attactctacaaaaaaaaaaataaaaaaaaaaaaaaactaaaaacttaaattttcaatttaagagctttcttagtttcaacgacttgtagttttcttcgtcataagaaaacgacattcgtttcagcgaacgacatgctgtatacttacatgagtgttgacatcatctcccgcaaaccggataggagtggataaaacaacaatctaagaagaagaagaagaagaagagaacagtaattattccgatttccaatggcgacttctgtaacaacaccaccttcactctcttttttctcttcttcagtcttcttcacctcctcccaacgccaaaacctcaaacccctcgtggccttcaagcccaactccctcaaaacgcccactgccaggcctctggccatcagctccgagctcgccactctaccaatcctctccttcactggtgaaaaaattggtgagacctacctcgatgtcaaggcagcaccaccggagacagcacgcgctgtcgttcaccgaggaatcattacggacctccagaacaagcgtcgtggtaccgcctcaaccctcacccgagctgaggttaggggtggaggtaggaagccttatcctcagaagaaaacgggccgggcccgacaagggtccacaagaactcctctacggcccggtggaggggtcgtgtttgggcccaagcccagggattggagcatcaagatcaacaagaaggagaagaggttggccatttcgacggcggtggctagtgccgctgtgaacacgattgtggtggaggattttggggataagttcgagaagccgaagacgaaagatttcattgaagcgttgaagagatggggtatcgacccgaagcagaaatcgatgtttttggttatggaactgagtgagaatgtggttctttcgagtcggaatattgggaccctgaagatgttgactccgagaacccttaacctgtttgatatattgaatgcggacaagcttgtgttgactcaagatgcggttgattacttgaatggtcggtacggtgttgattttgaggctgaggacgaggaaggagatgaagaagaagctggtggtggtgaagttgaactagtagaagaaggtgagggaaaaatgtgataattgcaagcattgttgagtaatggattagtttgttgcctaaaattagtcatttagggctcgtttggaacgccgtattaggtcgtattg

SEQ ID NO: 307549 - DNA, 905 bp, Cannabis indica
tggaataaggataagaaggcggagctaagggctagaaccaaaaaactaaaggaggagttaaaaatggtttcatcttctaccgatgagaaggattggaaacacagaaggaaaatagagagagatctaaatgctgttgaagaaaaagaggagattttatggaggcaaagaagccgagccatttggctcgcccatggcgatcgtaacacaaaatattttcaccacaaagcctcccaaaggaagaagaaaaatacgattaaaggtttatttgatgaacaacaaagatggtgcacgaaagagagcgagatagaggatatactaatcgactattacacggaccttttctcttctactgggccgaagataaacttgactgacagattaatacaatgtgtccccaaccggttgaatcaaatggataatgatgttcttttggaagagttcacagaggaggaggtcaaggaggcaattgatcaaatacatccactaaaagccccgggcaaggatgggcttcctggtctattctaccaaaatcattggaatgatgtgggtcaagaggtaataaaaacatgcttggaggttttgaataatgataaagattgtagctgcctaaatgacacacttctttgtctcattcccaagatcaaaaacccgactatggttggtgactatagacctttgagtctttgcaatgtctcatataaagctatttccaagtgtctagcaaatagaatgaagctgagtatggacaaggttatttctgaaaatcagagcgcttttatcaaaggaagacaaatccaagataatgcgattctcgggtttgaaagcctccactgcttaaaaaaagggagatttggtaatggaaagaagatggctctgaaattggatatgtcaaaagcatatgaccg

SEQ ID NO: 307550 - DNA, 1449 bp, Cannabis indica
acgacactataatcataaacaaataaatacatatttatatatgttctggacttaatagaatttacatattaaaaataattatgaaataaatcatgggaaccatgcaacataaaatgcgatttctcatctttattaattagtaaatctgatgattgaaatgggttttatttagggcacaaaacccaacagatgcaaattcctaagatgaatggacgtccaaaaggccatcctctaaccccgtcaagtagagttccactactgcaatagggaagtcgatgacctgataaggcggttaaatgagagaattataggaagaggccatgatctaataagaaatcctttgcaagggagtctcatcaacagttcaggcagtgactatgggcaggttgatactgggaaactatctaactaggtccctcgagcaagaggatagaccttcccctcccaaaagacagtcaaatcttgacaaacagaccatatgaccggagtagccagccccttgcaccaggaggtgttaggggaccgcaagacattcctagagtagaggcatctcaaatcggccatcatagtgatgctcctccacaaaatattcgagaacaagtcgttatagggcctatctttgacagactaggtctttggaagagcggaaacaaacatcacaacatcaacttgagttgcgagaaccaaagtaactttgttctgcaactgaacaataattttaggttggtacaaccgtcaaacccacccaattggcacgataaaccggtctggcaatccaagggacataaaccagttagagcctaagcctggccggccatacccaactacctagtatagggctgaccgaccaaggccaactacttagcaaaggcatgaccggctagggtcgcagctagggtctgggcgaccaagagctctagcccggacaaaagaggccatttgagcaagtgtccaccacatcaaatacatttgtgcaagcacaattaaataaaattgaagaaatgataaagggcctaaccggcccaaaagctatcagacctagagctagacacgtcaaggggatctccattctttgcatacattaatgcgttacccctgcctaagttcaagatgtcggtatggaagatgtatatcgggagagaagatcccctagctcacataatgtactttgagatgcaaacagatctccaaaaagttactagggatgtatgatgctaaatcttccctgcaactttatttgaaacaacccaacaatggtattttaagctagaatcggggagattcaattcttggaatgaattctatcgagaaatttataaatttatgatccttgactcagataaaatcccaactggaagaccttgtcgaggtaaggcaaagcgaaggtgaacctattggatatattttaccaggatctagatttactaacaagtatgtttcattaacatc

SEQ ID NO: 307551 - DNA, 1886 bp, Cannabis indica
tccatttggggtgccacgtcatcaagtctctttagagctcgtgtaggcgtgattatgtataatcgttagattgtaagaccttaggcattctcttgccacgtgtcttcatcccaataaatgaggaatattagtatttaaacattctgatacgacatgatcccttattcattaccctcccttttccattttctctcctttcatccctcagaattttgaattctcaaaaaattagtttgcattttcttgatttttcttcatcagagaagcattttaaagttcttgatatccccagaaaccctcgaaaaagagactgcatttctagtttagtgggctagaacttttgtaactatctttcctcctctgagaattttgtgcatattttgtgcttttaggggtagaaaaatgcataagataataggaaagatgtatggaaatttatttgtcttttgacaaaatgcttgttttcttggaaatatgtacctgaaactcgaataatcacgagtttcaagaagaacaccttgagtgcccacatacttcctgttgagtatttcaaatactcacgagtttttgatgagtactttgaatactcgcatacacctttgagcatgtgaatacctagaaataactcgataaaatcgatcctaagctttttttaattcccactttttgttagaattaaatgatacttagggtttctagttttcagtatgtgcttctgttatgaaaactatccaagtctttggaatggttggcgtgtcacaataacttaatgcctatgcaagatcttgcatgttccttgggttactgagatacacccagcaatttgggacatgcatatagttttcattttccttgttttatagtcgctgattaagacgaactaggttctttgaaatggtgggtgtgtcccattaacttaatgttcatgcgaggaatgcatgccccatgggatactgagatactgggataccccaaacaatttcttaaggtacatagttagttttaacttcgcggcttactttttacaaggattgactatattctcgaaatggtgggtgtgtctcagtaccttaattttcatattccggtatgatcattatgttactgaggtacccctagccatttcttaagatgtctcgtcagtcctttttcattatattcgttttctgaatcttatgcgggtgagggcactttattagtttcacactttcactaagcagaaaagatcttctatttttcaaatgagcgacttatcggatagccagatgctcgattctagaggaggggcattcgctgatgagctagaaggaagccataacttcatacccacctcaatatctgaggatgaatgccatgatgcccggatctgtcaaggctcgctatgtactagcaagatagatagaatggttcaagagctcactgaaccagtgacggttgaaatacgcaatagcaagtccacggtgtcagcccatgactacctcattcattcgggacatgcccctgacgttgaggttgaagagatgggaggggactttgagatgcctaatcgtgatttcgaggaagaggggaatgctaatggaagtgagaaagattcagttgacaacacccaattgaatgaaccattttcttgcgaggatctggtctcgtgagttacaaaatcatacctgcacacctttgtatggttgaatttaatttccatagggaccttaagatcatccttacaacagatgtagtggtttcaattcccatcttgcgatgctgggtgacactgccttttcactcctttgtgaaggccatccgcagacattatgatgtctcgcccttccaactaactccaaacaattatcgcataatactagggttctatgcgatgtacatggagtatg

SEQ ID NO: 307552 - DNA, 1161 bp, Cannabis indica
attaattgtggcagcaatgacacacgcaacctgatgagccaacaaagtgtcttgatcaaacaacaaatgagctaggcaaagtgggcataatacatgtaaccaaaaatgaaggagaacgtataagactagcttcggtgatttgatgccggagaactgaattaggaagaccgaatctttaattgaaggggcggcgtatctcttggggcgaagctccactgtcaaacctccaatttgatcaaaaaatatctatagcaaatgagctaataaagctcccaaagttggagtaaatttcatagtaacagtcgagatgtcaattatttgcttcggtaactctgttagcagagataggccacaagctccttgctccgagacccctagatttggtagggtagtaggtcataaaagtcgcatccctcattccagatgtaggatactgacttcctcttctcatctacaacttctccaccttcttccgctagcttggctcttgtggggagttgaagagttgtttgatttctattaaatacctcctcgaaatcccccattggattgctagttgaggagtcacttggaatcatatttttctccacccttcttttaagaaccagggcctcgagcttagccctcttcgttgccttccccttggcagttatagtccttttctgcgtaagtggtcctccgaaacttcctctttgcagaggccaatcactttatccatcctagtggtgtcatggaaaccagaggagctggtagttgagcaaatggaggaattttccaaagaaaaataacccaaatggtggcatttggattaagcagtgtgttaatcagcccaactggctgaacctttagatttttgggtttggtttgagacctagacggttttgactttatcatttttttgttgataccacaactccacgaagctcttttctcctgttggctatgttagcttgaaaagcagctgctttccttgtgtttgaccctgaaagagtaaataacaaaagacagtcataaacaactaaataatgataagtaataattacacgtatgaaacaaatataaaaaaagaaaagttcaagtctggaattaaccatcaaagttagaaccatatccttcgagatttttcatggaaaaacgaaagatatatttgttgggttttat

SEQ ID NO: 307553 - DNA, 1385 bp, Cannabis indica
tgtaaaaaaccttaaaataattttattgatgaaaaaattggtacaaaatgctgtaggccctgaaatttttggagcccattgtaaaatatagcacttgtataaaatttacatataaaatggtatttttcagaatttggattccttttatgttctaaaataaaagttccttttatttggggcccaagcccaaccctaaatgcaagaagtgtagtggttatggtgaccagccagaaattaacatcatcatagttaaaccctattatataaatgtcaccctatgaacttttgaaatccgattcgagaaattcgagtcgccatacagtaaaaaagaaaaaaaaaaatatattagaaaattataaattttatgggattttataatatttgtgtaaaaatatggctcttttttttctcaaaaatattatattatgaaaaaaattcaaaaaagttaaaaaatattaaaaaaccaaataagagtgacaaggtaaccagatggtaaccagttaacttatattgtttttctcatattttttaatttttttctaagattttctaacatttttgagaaaaattcatatttttacaaatttataccttaaaacccaatgaaaatttttcatgttatccttaattatctttttcacaaaaattatcatttctttgaactagaatagctaacatttaaaattgtacctttgttgttttaacagatacaagctggattatcagccctagaagatgccttgaaaaatggatatgaagacttccaggtaatattaattatacaacaaagttacaaaaataccacaaattatatcactatttgaaaaatgccattttctaaaataaaataaaaattgtttaatgtttttgtgaacagagaatcagaacagatcctgatcttgctaccctaagagcatctgaagactttgatccattgctaaagagatttgatgagtcatttatcaatgaaaatgccattaatgcaatcaagtccatatttggcattttcaacaagaactgaaattgtactattcttctaaattattttcttatatataaattgtgtaaacttatgtaaagctaacaaaagggttggctgaggcttttggtttcagggaatcaatttgtttttaatgtgttcatattgttttcttttacttctcttgaacaaatgttgtgtagttttgaaaagaaaaatgttttttctttcattatttcaatattttcatcattttgaaaacatcaaacatagtatatatcaaccactttgtcttcaattgaaagaatgataaactggaattacttttcagcgctagttgtaagagaggtttataatttttgttgcgatttaggttgcagcaataattgcaatagaaatttctata

SEQ ID NO: 307554 - DNA, 1256 bp, Cannabis indica
ttaacatcattctcatcaaagggttcaagcaactttctattttcctcataactaattcggttaggaacacagccatgaagagtatcacacaactcagccccacggttagattttgaaaaaagattcttaaaatagctaatagttatcttagaaatcttctcaatattcgtctgccactgtaggtgatcatcatacagccctaaaatagtgtttttcctccttctttgagacgctttatagtggaaaaatttggtgttttgatctccatgtttcaaccaaagagcacgactcctttgtttccaatacaccttctttttttcctcaacacaattaagatcgtgttccaatttctgcatagccaaccaatcggaagggttagaagatttagcaagccaactaattttttccttaagctccttgagtctactgttaagggccatcttttgaagtttattccagctttgaagcttgtctccgcagcctttaagaaggaaattcagatttaacaaaggttgcctcgaatacttattactccaaacctccttaataatttccatacactcatcattatccgcccaagcctgctcaaaatgaaactgagatccccacctcatattatccgcatgatcaaaatttaaaacttgagccttgaagaataaaggtctatggtcagagtttctccaatctaaaagagagacagaacattgcttaaacttttcaagccaatccgtgttacaaaatactctgtctagcttttcgaaaactaagttggcagccctcccgttgcaccaagtaaaattacccccctcggcagagatttcccttaaagcacacttagaaatcacctttcggaagttgtacattagataatccggatttgcgttaccgccttgcttttctgaattactgaatatttcattaaaatccccgccacagacctaggctccctgaaacattggatggaggcgcttcagaagcttccaactttctttccgccctcccggatccggactaccatagaatcccgtgaaacgccattgaaatcccaaatcgttttccaccaacgcatcaatatgagaaaccgtaaaggatttaacatgaaccttaaccgaatccacccaaagaagagccagaccaccactctttcccttagcattcaccgtaaaacaaccatcatacccaagttgcactcgaatcgtctccattgcagaactagaaagtcttgtttcggacaagaaaatcatcccgggatgatg

SEQ ID NO: 307555 - DNA, 934 bp, Cannabis indica
ataaaagattgaggggtatgatttggtagatatcaaagtttgaggaacatgatttagtacctgaaacagtaaaattgaatgaaattagacaaaagtccttaaatttaacaatctcaatagttcagggggaatttttaacggcaaaaaaagttcagggagcataatttggtatatgtcaaagttcgagtggaaaaattgctaattagccttatttttatatatatatatatataattttattaatttctcttttattaattgttattttttctttccttaatatatgttgacgtacgttattaattatatgatgatgtgttgtaattttatataattctcttaattaatatttattatatatgcatgcatgtaacttcctctcatgaagatttctacaaatggtttctactatatataattccaatgtaactgactatagcaagtgtatatatttctatggggacctctctaaaataagtgtaagctagtgcatgtagtggtgaccaaatataatgttatatataagctaaatataatccaaaacaatttatgatcaaataaattctggccaaattttattttatttttaataatgtctgtgtatatatatatacatagaaaaaaattaaggatttaatggattcgaatcatggtctacaatataagagtaatggtttttaaccaactgtactctgtctaacaattataattattgataagtatactttaacaataattttaacatgcgatcattgcaaaaaattttaactaaaaaactcttcgaaatattatagatttaccttaaatatcttatctctactttaattctcacaatacaaaagttcttagtgcacgtttggcatcataactaaaaaatagttttttatttttaaaaacagaaaattgttttttgaaaacaatttggcttgtttag

SEQ ID NO: 307556 - DNA, 2284 bp, Cannabis indica
cattaaattaaaaaatgaaaaaataaaacaaaaatcgaaaatagcccaaaaaaacaccaaacacattataatatttatatgaaaatgtaaaaatcaattttttaaaaatataattctcaaaataaataaaataataaagagaacaaagaaacagaggttttgacttaacgaaatacacaaaccataaaaaccttgcattgactttcaaatggtgaataagtcaataaaacttatgatgaagtaagcatattccacgacttttatcagaactagtaacggagacgctccatggagtgacaaattgatcctcggtggcgaaatcttcaccgtacatgtcttggaccccaccactgacggcctcaactgcagtcaaggcttccctcgtttccttcactacgctttccatcacaacggtgccgttttgatcacccgctcagttggtcgaggcaaccactttcagaagctgcatatctttttcgctttgaggaaaccaggttgtacagctccaaaacccttttttttaatacaaattatttccaccaaaaactagaaaataactgtattaccaacgccaacaactatttttatggtttaaattcaacaattaattaattattatttttatctactattttaaattaataagattatgtattaccatattatatatattttaattaaattatcattcttaattgtaatattatatcttaattatcttatttttcatttaaataatgttaaaatttgtaattaatctagatattatgaaaagatcctaaccattatgtttatttttaaatttggtttatttatggtattttattattttcaaattataaaattagaaatgataatagaaaaatctttatttttaaaatcctgaatattttactactttatcatgtttagttatttaaattattaaaataaccatatgatagttagttaaattcaaattttaaatagataagttgtcttaacaacccattaattttgaaatttagtatattctggatgagagtgagggcttacggagactgcaaacttctcttacagataaggtctaggaattgaccaagtctttggaagccgctcgggcatcactagaggtgaaaaataaatctttgcaggaagaaaggaaagctcatcggcttgacaacattaggaacgaggcgtatgggtcttctatgaattttggaaggccaacccagccgctaattttagatatatggatgtcgaggaactagctgagaaattaaccttttgtgaagctcaagatgctcaggatagggtccaagtttttgcaaatgagtatgctagggcgtctactgagaatgtcgaggcggccaacttcaccatcttagaacaagacaataataacctctagcctgaatttcacaatccttcgatcctaatggacctttgaactcggtatctttatacctatttttttaatgcatatatttctaccttggtggccacttttgacataatatagctaaccaagctacttataatcttggtattattttttttattacagacaaatggttgtccgggtagcctttaatcccaggttgaatattaccttttatctgataaaacattgtcattgcacgtacttaattcccaaattttaaaattttcgtctaagtactttctgtgcgattttcccaatgttataccaagtataggctccgaaatccacgaaagtcgaacgtgccatgatagtactataagtcgttgaacaatccaccacaataaaagtacaatatttaaatgtgctatgaggagtgtcagggcacaaagtcattgggagcctaattttctaatgggaataaagaaattcccattgaaccccgtgagcagggaaccacttggaaactggtcttggtctgtgaggtcaatggccaagaaagcatctttaaagagaatattcactgaactcccaatatccaccaagattcgagcaactatcatgttggaaatgggagtctcaatgcattgtttgggcatcttcttcagtgaacgttatttgttggtctatgagatgaggcttttgtgctggtagatgtcctacttcccatacttcttcattatgatccagggctctggcatagcgttttatctcatggcgggttgaacctatatgggggcctctgaagatcatagccactctcccgttcagcctaggtagatgtatgggaagatttccttggttagtgtgacaatcagtagtcccgtgatccgtaaggggaaataccgggtaagctgtacaatc

SEQ ID NO: 307557 - DNA, 2213 bp, Cannabis indica
ttatacaattaaaaatacacataactatatataaaaaattatatatatgtctttgacttggtcaacgaatgaccgtttcttatccattgtgaaagaaagaatataaggatgaaaaaaaaaaccagatccttgtgaacacttgcacactatttaataacaacaaatatatagaagaagatctctaattattggacaactatactcactatatagtcactagctaggaaacaaattagggtttcattaatgaccataatattcttttaatttgttttattttttattttaattaattcttttctctttttgaatatatatatcgtgaggctaaggtaaacaataactttatatttttattatatataaatatatcacggggctaaggtgaccttttggaattgattgatgatatatatatataattttttttattggatatgaaattaatttgattacaattttgtaataatatatattctacctaatgaaattattgatccatgctaaaacaaaatgaaatcaaactaatcaaattggttattgttttgttttttgtttttagaaacattggacctcactagctaaaatcttcaagagtaaaactcaataaaacatgcacaacaacactattaattaatatagtaaaaaaatggcaacaaattaattaactcgttacgaaaaataattatgatatttctaacaataaaacctaaataagaattatatatcaagccttttaccgatcgaagatggattggattgttttgtttggtttgattgtgataatttatattccatttaaatatttatcgtaagagcacaaaatgttatatatatttaaaaattataaatattgtaataatattaaaaatttaaaatatatacatgataaatattatatatataaagaatactatacgtgaggaggatatggtgagtgacagcaatttttcttatcttgaccaattgtggattttcccaccagtataaatatataaataaatatatattagcctgaaattaaggataagaaactattatattcctataattcatttcataccagcagagtagagttctatattaatggtagggtggtggacgtgttttgatgagttaattaagttaataagtttaattagagagtattacgtacgtacatcagtgtaaacgggtccttaataaagtcaaatgttaaatcaaataaagaatatttttcattattttttaatgatatatttattgataaatattaaaaaatttagtataattaaatatcgtctctcatataatttaactaaatgagacgttatatataaatggtgctaggcactactaattatatgatataagaatgtgctcatatttatttaaatgtcttattcaaaatgtaatattattattagtataattaattattaaatctcacctaattaatcaaaaaaacaccacctctatacatgactatggatgcacaacctaatatcaacatttttattttaatggccaacacttgtctactctttgagaaattttaaataatttaaatatgaaaaaaaaaaacaagttttaaataatttaattatagctaacattacatatttcgaaaatgtttttttttttctcactacagaatacagatgctaatataggattaaaaattaataatgtatacgtacgtacgtgttaaatatgtatacatatataatatttactatttactatttactataaaatatgaaaagaataacaatgattgtcatattattatattatatatatggttatttggaaaacgtagttttattacctatgctacgtataaatttaatgaaaaaaatttacataatatatatattattaattttaccatattaatttggctcttagtcaaacatcatgtggacgaaaataaattaattaacaataaagaaagagaaatgatctgacaaaactattcatgaagaaattaaaaagtaattgaaaatattaagttgtacttataaatttatagaaaattaattttaaataatttatagtattaaaaataagatttaaatatttaaatattatacgtattgattatttttttatatatataatatataattgtttgaatattattttttaacatgataaattgtccaatattatagagagtcctataattaaccatagcatacacacaatcatataaaaaaaattaaaaaatt

SEQ ID NO: 307558 - DNA, 1774 bp, Cannabis indica
acatacttgtaattgttttgattttagattactttttttttacaatattgaaactataaatattaaaaataaaaatatatataaggaatacctttcaataggccttatccaaataaaataactataaatgtcagttttagaaatatatgaaatgttgataaatggaagatgtttgggaagaccttatatgtaaccgtctataagttttttttttttcatttatattaattttgtggacattttaatttgttatttacttaaaatagattagataatatggaatgaaagaaataacagtgcgccaccacaatttctttccctcaactaaatattaatcctttgaaaatttgattatatgaaaggaaaggaaatgtttctttcttgtttcttttttatatataaatatatctttattacttattttttttattaataaattatgattagaatttatcaaaaagaaaaattatgattagatattttgtttaaataagaaattatatactatcatatttaatatcaattaatatataagaagagacttattatatcctactaagttaattgcactaattttaaattgataataaataaatgcttttaataagatagattattcttttgaaaaaatagattatggttaattttaaagtaattatttaaagttcatttgaaaaaacaaaattttaaagttaaatgtgtagatcgaatttgccgttataggctattagcggcaaaaatctgtcgttaatagtccgctgctaataattgctgctattaatattattagcggcggaattcagtaccgctgctaataacgctggcataacagaaatgtatatatttttgtatattatttcttgaaatatattaactcttttaattaataattcttatgcaaaactaatttattattcattgcaaaaaaaacaattaaaactaatttattattcttggaatatatttttgtatattatttcttgaaattcattgttataaaagaaatatgtatagtccatattcatattcatatttatatttatttattttttaaaatgttcatctttggttaataattgataatagcacaaaaacttataaattgttaaatcaagagattgtaagatgttacctacaataaatttttttaataccattacataaaatacactcaaaaaagaaaaaaatggcagcccatgtggattggaattaaaaaatttccaaaaaaaaaattgaaaattcaattatcatgatttaccatcataacttgatcttatacaatgtagttttcacaataaattaagagaaagcaatagtaaagaaatatacctctaggtgaagaaacttgtacataatcatgataatttttcatagtctatagcatatctcttttatatttatatattgaatgttaaatctattttatataatgggaaaatagaatacaattgagagagagatgggtcattgagaaatataattgagattgaaagaaagaaagagaggccacatgtagagctcacacaaatgaggatgtaaaaggaatggtgtaaataatctatatatatgtaataatagttatttatagtgtgtaaagttatttatgaaattctgtttcaagaaaagagttattaatgaaaatgactattggtttcttaaaaagttctaacgtttataggtttgcttttggagtattaatattgtaactgaatttatgttattgctatattaatttctttgtaatctcacctaattgaatttatgttattgcttt

SEQ ID NO: 307559 - DNA, 1700 bp, Cannabis indica
caatcatagtgtgtaaggctgtaaagaatctagattcaagagaaggacattcgggctcagatctttgtgatactctgctacagataggatacaagggttagagatctgagtggaaggagacattatatttcgctgcaatcactgtaaggtttcttatactttatatagtgtttatttcatatcgttttagaagttcatatttaggatgttaaataacatacttgttagtaaatctaagatcctggtaaaataatttcaacactgtattagtcagccccataggtaattccccactatttgacaaccttctacgttttatgtccataatggtgagttcttcttcattaattttattaaagctttcaccatttaaattaatggtatttccctccatagtatcaactagcgtatcattcacatttaaaggttgtttatgttggagaccataattaacaactgtagacatatttccttgattaatgggattgaaaaatagatttttttaatctgttgcgatctggtatgtcatcaatcttggcatcaacattcataccagcaaggctccccgtcgactggctatgctcgcctgatcaccactgtagactgcattcagcttcaagacgtttatcaaactctgtatcctccagtttagtgcgcacccacttcgctccaataagcatcgtctgtcgtcgtaaaggagctttcatgaaagtgccataaggcttgatgattttgtctgcatgagtatcaaacaaatgcatacaaaagtgatccaaatgacccaatagaccacaaatgaaacagaaagtggggacattttcatatttaaatgtgatccaaatgaactctatcttagttttccacaacttcattttacgctgtagtggtttatttagatccatagaaactcaaatttccatataatcccaccataatcctaaaaagtgcttaggatccgtctccaggaatttaccaatataattccccacgttcgtaagtatccgttcagtcatatagcctgtttttaaatcgtgtacttgaacccataaatcaagattatttaatgggactgttcgcgggtcttctcccttcttcaaccttctaataatcagagctttgcgattgaatatccatgggctgccttccaagacacaagatatatcgatctcatgataaaactgaaagcggtatcgaataccaccatcaagttccttaatgtagacccccattcctggtttccaaatggcacctagagtttgttgcgtagctggaaaatcgattgccccgtcatttagaaacggccaaccgaacaccatcgagcgtcaaacgctacactctcctcttcctgcacctcttcacaaaataggccacctaaagcctcgtcatcaagagtaatatccacttggtcttcattaggattactactagatgccatggtaatagtcaaatgaagacagaagaaaacactcagaccaaagaaaccttaatagaaaaaatcatgttagaggacaagactagtcgtatcaagtgctaaacattattagtgtcaaatagtactaagataaattatctaaatgaacataacaatattaggatttgtagtattacaaattattttttggctgagagttgagagagatgtgtaatgaactaatgtcatttttttttctcattctgttactgttggattttgtgcccta

SEQ ID NO: 307560 - DNA, 1578 bp, Cannabis indica
tgcctcttttgtttcataatctggagatttcaagacaagaagatcatcatcatcatcatcatcatcatcatcatcagccaccgagaaaggatcaagttgtaatttcgaccgggaatgattccgcaacacccaccggtatggagtggttttttggtaattctaattacggacagccgcagcagccgccagtagtaccgcagcagtttcaggtgagcactgtgacgccgagtaacagtggtagtactaataatattgggcatgatcatcagaatgggaatactactacttggattaatagtagtaatggaaatcaaacatggagtactagtgatcactttgcagctatttagttggctttaatataatttgcccctatagcaaatgatcaagaggtatagctagagttcttactaaagagaaggaaaaaagaaacatagaaattcatattattgaattatatgctaaaattatgtataacacctttcatttagccaggaacatgtttattattaatcgttaatgggtttttcttaatagttttttttttattaattccatggtcgcgtaatcatattcaaaatgtacaagtaatccgtaacagctagcaaagaaaacagcgttttgccctaaaatgagcagtactactcgtgttaaattatatcttcatcaattatatattttgggatatcaacagtttttttattattttattgtatgattttttgagttttaaaaatacgctttaatttgcagtgttgtaatataattgtgtaattattttcgtatttatatgatcatctctcctaatgtaaaatgatcgctagtttcagtactctttattatatacatgcattaaaatatgtataaactactttctgtttatgccagctggttgaacattactgtacgttatatatatatttataataaataataaatcttcatcatgaccaattaacttttgttttataggcttgatatgctattgggtatttccaaattatatctgatatctgatctgagacgatatgatctagctagctagatagttctattgatcttcttcttgttcttgtgttcttgggatctgtactgaatttcggtgttattattataaaaagggaagggggaacagttaataattaatgaaatgaatatgggatcatgatatctttgattcgttttatgtaccagtcagagagactcagtagcgatttatttatgtaaatagcgcagaaggccttactatgctgttgtctctattacacatacataacaaaggaaaactgagtctcagactttctgatcaagagctgccatttatgaacacttgttaatttttacataatacatacgaaacacaaacacttacaacccaccatgcacagtactacatattacccactcatcagcttaactcttttctaggatattacaactcctccctcagccacatacactacttttctatgcctataccctagctatataggccctgcaaatgtgtgttaaaagcataaaaaggaatcaaggactagagatctgaatggaaggagtcataatattccgcagcaccca

SEQ ID NO: 307561 - DNA, 1539 bp, Cannabis indica
attggaataagttgattttagaaatattagggtattttaaggaatcgaagttgaccaaatacctaaaaatagagatttcttagtagttaagaaataataagataactattaataataaagtttttattaatattattatattattattatttaattaataatacaaaaataaatttagatttttaaaaaatgtaaaaaaaaatatattaattaaagctgaaaaaaattttaggaaacccctatggagtcggttattttagaaaaaccgacgccatatctacccctatggcgactaccgacgctgaaagggcttaaaaaccgcctctaaagggggtttttgtagtagtgcaaggaaaggattaagcatcttgaggacttctggaagtatcaattttccatatttgatttttgtaagaagatggctcaaggaaatggtgatagatggcattatgattgtagttaggatagattttttactccaaaatacaggtttataagttggttagctttgaagaatcaactgtcgacttttgaccaattttgtcgacttggttataccaactctttcttgtgtttattgtgtggaagtggtgtggagagccattcttacctcttctttgattgtatttatagcattatggtggttcaaaagatttgacgttgggctataatctctacccagaaaagagattatgataaaggccttgaatggattcagaaatttaaagcctgaagaggtaaaagaatcgttcttttgagtgtctttacaaccatgatctatcacattggcatcctagaaacactgtgctttgggataaaaaaattcctactgttaaggtcacttttaattgtattattcataatatttttcttagattgatgtctttgactcctaataatttgattagtaaagatagagagtgggtggaagctttatctaaaactttgtaagtaattttatcttgtttaatttttgtgatcaatataattttctgattaaccaaaaaattagtattttaattaaaagacagtttgactatttaattgaaataaatggaaatacaatgagtgtgatcactatagtgtttttggcttgggcattgtattttacatagttatctctcaactaatgtaatatggtatagttatataagttaaataaaagtaaataaaaaggtcaatttagagtcaactagacttaaattgaaaaagtccaagaagagcataagctctgtatactttgatccaagggtaaaaatatcctttatttttgaaatttatttaattaaataataaagagagaggagaaaataagctatctataaatataagggtttggtgaaggcctttactgcacattatcctttcaatcaattgtttggaaaaaaaaagctcttttctttttctttcctcaccatagcaaaaatctctctctctctctctatatatatatatatatggaaagacttcttaatgggtaatacccattgatgggaactaaaaaaaattaataaggtaataatctaataacctttttat

SEQ ID NO: 307562 - DNA, 1401 bp, Cannabis indica
gagatatggataataatatgctgacttgagaattagcctgtctttgaaagtgtgacgatatatgggattccatcgaactacaagtgtgacaaaccaataaagagtgaaccaaaggtcagacacaaacaatccaatccaaaccaataagatgactactgcaccttcttcttctttggttgagaatggcatataccttagtctgtacacaaaaatagagcatatccccactaacatggatactatgaacaatttaaattgggtacgcctcttggcagatttggtttcgaaaagaggaagaccatcatgattttttcccatatttttctacttatttttagttttcatttatcaatatttcacaaatttaacaagtatatatatagtagatttttggagtaacttatcgacaccaaacttgaagatatggatgaggtagaattcaagagtaatcagcacgtggctctaataaattacttattaaagtaaagagcattattgctagctacatagcatttctttaaatcaaaatatttgagatattgtgtgttgtaattgcattagtaaatttaagtataattttggaaaagaacaaaatttgccacctatataaatataacaaatatagaagctactcgaataagaggtagaggactagggtccacaattaataaagagtacagaaacaagacttaaatgtagtaacctatactatagatattggacttaaatttatgctaggcaggattatttgatatggacctacatagataagggtcagtatacggtcaaaagtgagtattggagttctgtggtaaggttggagtggggtcaagtagcagcctcttctggtccgtcttgttggtggatattcttgtggtccctctctgtttcgccattaagaattttatttggaaagcgggcttaaattttttaccttgttatcctaatctttctaaatatgaaatggatgctacaaatgtttgtcctatttacttttgaaataataagactattgtgcatgcttttgggttttgcccttcttttaaagggattagataagggtagctgctgaaagatcttgatgtgctaaaaggggcttctaacttttatgaggtcttagtgttggtgggttgtatagatattctttccaagcatgaaatggaggagtttgttgttttttgtcggcggatatgacacaaatgaaacacttttgtccatgaccgtaacttgctctcggattctagagtttcttttgcaagatgctgagcttgtttgactgtgttttcagtttttaatttttaaaattgtgtttttaaaatgagaatagaaaataattttttgtcattttaaaaatttaatggtgtttggcacaaatttttaaaaactgtttttagatttttt

SEQ ID NO: 307563 - DNA, 977 bp, Cannabis indica
aaattatttatatttattatttcataaacataataaaaagaaccagtgaaaagtgaaaacttagaaagttttccacatttccactaatcctttctcttttatttttgtagatatgaagatcaatatgttattggagatttgcatatgcacaattaatgttgttctattcatattgtaacaatccatattatttggcatacgtgttaggattgttatgcatttaaatttattgattagtttaacacttgtatatataatatgacacactattaattagaaattatcacttcttctaaactcctaaaaatttctaattacataatagtcagttcgtttttagcacatttgtgccaaagtcaatataattgccaaaggttagttgtaattactaaaagttagtaaattagaaagaaaaaaaaaaaagttaacaatatgcattaatcttaataaaattgtactcttgaaatttttattcttttcacttttttaaataaaattaaataaaattttttaaatttaattattttaatagttcgagaaaattttttaaccacttaaaaagttaaagagacataatttagtatatgtcaaagttcagaaggtaaaaatttaaaatagcctttttaatattgtaaattattcaaaaaaattacaaaaaatttgtaaaaaattctaaataactacattgctcattgtcatatatttttacttagattatttatattttagatgcagtaatattaacaagaataataataaagagatcgacattaggtttctatgtaatagtcctcgtagtcattactacattaaagaaaacaaatgagaaaacaagagttaattataataagagaatactataaaaagtattattagtgcttaatatctttttcagtatcatactgctatcagtataattaagtatcgagtttatataatttaagaaaataattttaaaaaaatatacgctaattaat

SEQ ID NO: 307564 - DNA, 2066 bp, Cannabis indica
gatgttaatgaaacatacttgttagtaaatctagatcctgttaaaataatttccaacaacactccccaggttgagtggttgtgcatgcactcttattggtttgagtgaaaaattaaattaaggctgcgcattcctccgttgattaaggaattaataatacattactccctttcccctgctcaattacttcctaatgtgtgggctatccttttaagtttaatagttttgggagataaggctggagttaagtaggaggtatcatatagtattcaattttattcgttaatggagggtgagtaagggcgttgccatctacggcccaggcggaaccgtgctattatcaatgacctgaagacttctcataaggggtggaagaattgattcttttttgtaaaagggcctattgagtttgtttctgacaatcatactgctccttttatcaatcgaagctggggagctcctagtattctttccccttcattttttccataggatattcttgtacataccttttcgtcgcattattcatacttttattctgcagcttttaacctttctttgtaataatttttttacgaatgtccaacttttgtggataacgaggaaactgttattggggaagtttttgctgacaaagttcgcaaagtcaccactctagaataaaagtttcagccaatcaagtatcttttgtcgaatcctcttcttggcctagtgagctcaggatttctttaagtatccccattccttattcttcttattttatttgactaatttcataaaatgtgccttggagcatttaaaacaaacaacggaaccaattttgatcgaatattctgaggtacatcccagccttgaagagacttacccctgtcatcttcctaaaatgaaattgtctaagttgttcattgaagaaattgaggcccaaactgctgcccggcgaaagagacttatggcaaaattgcctaaacgtaaaggaaagggtaagaggagtaagatggtggggcctgatgaggctaaccagtaagacgctggacaatcatctcagcatgacttggcaacggatgattccattggggtgctactcaatgctccacaagatactattttaaccatcggaaacgttggggatgactcccttaattcgataccagctgagtagatgaaccctgagagagtctcccagcatgaggatccttcggtggttgacttggacgcgatcgtaggttccctcccaccttcacctactcacacctccacccttccttttgggacttcgcagacctcccagcttgctatgtctccctttttaaatcgttcttcttctcatcctagtggttggggttctccatctttgaccgtccatatgctgagggtttcggctgagtgggacgagatccttactttctgaattcagaatgatgttcctttcaatgaattgactaaaaactagtttaagtccctattggagatttctcttacttcacctttgcatggaaatttaattacttgatgataagaggatggaactgccttcatagtgtggatccacagccggcccaggatagcgttgtaggtcgacatgcaattaactatctgaaatttcaccgacttgttcaccccattggcataaacaggtaattggacataacttcgggcgacgacgctctcccctgagaatcctaccaaggtgacttgggtttcttgtgtatttaaatccttaatttccatttaattcaggacgacagcgaataaaatatttgcacaactttctgtatccatgagcattcgcttcatgcggatgtgggccacgtctagggtgatgatcaaggcatcgtcatgcgggtgaactaattccgaggcctccccttggctaaacattatttgtacaataggtctctcaatgtctgtaatatcccaataagcttaataattaataattagggtttacatttatattatgagttaaccaggtagtaagtgggattatgatcttactaatctagttcaacataaaactttaaatttgctataagtggataaataagcgtaatttttaaattacggag

SEQ ID NO: 307565 - DNA, 2566 bp, Cannabis indica
caagctgcccaaatcccacgatcagtgtattctgcatttatcatgcgatctttctacttatatccattgtaacgagaagggaaacacttcctctccaagttcacagtcctataaatagtgatgcatactcactggggaaagggtcgagattttaccctagagatattatctaagaattcgtattcagagatactgttgtaagagctataagaaaaagaacatttttacttgttcttaagacaatacaaatacgaggattaggctattaccgaactgttcggggctgaacctctataaaattcttgtgtctttatattgctttactacatatcaattgctataaattactaatcgcttactaaataaaattcactatcgttggctaaaagcgagatcaacaatatatacatatatcattacccttcatgataaataaaaaaagtttattcacatattagttttcttttcaaacgattttgtctcatagattctatgaatatttttagatttagtcaaactaataaataacaaatagtttcacataaccaccatttgtttaaaaaatagatacttttccaagatcatctttcttaacattcttaaactatcctaccttaccacactaactatatatatatagataattaagtaattatattatttattttctctttaattgagattttgagtttccattaatatttgtgagatatttggaaaaaactttaaattcttgatgaattattttattcggtagtattttttatttgtgtgacaattaaattacaatgaattttcattattgagtaataatatttttgagaaattgaatatattgctataatcaaggccacaaatctgcaatagaaaaacatattagagatagatctctcgcactctattattttattattattaattattattttgttcctgtcattaagttttatttatttatatatatatcctaatttatatttaattgtctagctaatattatggttgcatttgactgaatttttcaatcttcgatattaataagacaaaaatctaaattgcaccactaattttattcccctttattaccaaaaaacatgaaaaaatatctaaaatgaaagaggaatgtataggtagagttttctagggtacttgaaagaattccattaaagtatatttagctatgacaaaattgtgaaatctattagaaaggaaggaaattaataattttaggtagctcaaaactcttacttagatgaaaaatataaattttaaactcttttgcttagaacttagtttttaattttaaaatttcttggttagtggtgaaatgttattaatttatcaactcaaaatataaaattctataactgtgtattaaacaatttgatgtgaatttcagtttgttgtttttgaaattggtatgtgtttttttttataggaatttgttattgaaggcgaggaggacgaatgttagaagagtttgataaaagcacttagaacaattaagaagacccctacacttttattgacaaaataaaaattaattacaaggtgttaacatttttttctttgtacttactatgtatttgtgttacaaactaaattataataaatttttatcattaagtaataaatatatttgcaggaatgacattgctgtagtgaagggtcacaaatcatattgactattgagcgtcttagtgatagatctccctctctctcattcaacaagccttacattgcaatgtttctaataaacttatttattcatagacccattaaaacacaaatcatgttgagcaccttaacggtagatcttcctctttcttattaaacatgcctcacattgtaaggtttccaataaacttgatttattaatagattcattaaaagttgttctcattttttattatagaatcttaatggaagcttaactaaaaagaattattttttatttttggattaagattattgtaagtctaaaattttatagttcatgagtaccattttgagctttatatctattttttattacttcatgctactattaactaattatgcctaattattattttatcagattggagctttattatatagttatgtgtgattcaatctcataatattatggttaatttaattataaaattcttttttgtttaatttcatattttcttttttctaatgtacatgttaataaattaggtttattagtactaattatctatataaatgttataaattgttaaatagagaagacaaccaatcaatattttgggattattaataagaaatagtagcccaagcaatttcatgaaactatttgattgggctaaattatatccttcctttcgtattttgctttaatttattttatttattgtccacaaattaattatcaataccaaccttattatatcttatagttataatagctatcatgtcaatttttaaaaattctatgaaaaaccgtgtttttgcaaatttcaattatatatacgaaaatataaaactgtatgcgtctgcagaagcagaaagtagttttgttactgcagaaaccagtttt

SEQ ID NO: 307566 - DNA, 1845 bp, Cannabis indica
tttttctcttacatcatcttggtcaaaccaggcacacgactttcaaactgaaaaaaaaaaacagagcttcattcattcattaatggcctcaattgctcctcctctgcccgatgtatgggtttcaacgaggagagtggtcctcgtgggtctgaaagtggactagtggagatgttaggatggtctgttgttgtgtttatgagaaaatttgaagcaaaagaaagaaaaaatatcctcaaatagtcaatatattaaaattggagagaataaattgttttcacgcgtatttaaataaaattaatgccttgaaactcaatataatgccacctatccaaaaaaaaaaaaaatagcagcctttaggtactttaggtagtcttttttttaaggcaagtttaataagggtggtattggaaattgcttgtcatgggtggggttaggggagaggatgtggaggagaagtaaagatatttgtggaaaaaattggagcagagtagctgctgtatagatagggtgctctgtttttttatttttttttcaaatgaaaattatttgattgggtaagagctcacaatattaaatattgttcccattattgatgctctagagactagagactgaattatccaaaactaaatcacttcaggaggctagctcaaatggtcataaataggtgtgtgtcggaagtttttttttaaggggactcgaacctaggacctccaacacacccacctatctatgtcacttgagctagtctcaagtggttgttccaaataaaatataattgtaatatataaacgcttaaataaaaaacaaataataattgtccaaaactagtacaccaaaccacccacctaataattgtattaccgatgtgatggcatttactacaataaagacaaattttaaaagggtgccttagatataatgattgaaactggaaatggacaataagagcacattcatatattatttaatttaaattaagaataataaaaaattataaaaatataattttatagatttttaaataattttatgattttttttattttatttacgaaaaatataatttttttaatattgtactcttattgatttattgttattttttgttatttatatgttatgttttagtgttatttagatattattttaatgtaatttttttattattttcatattaattttattaaaagcggtaaaaatatataaaaaaaaaatctttaatataaaaatctatattttttttcttataaaaagcagtactttatgtaattattttttaaaattaatcgttgtcaaaaggcttggttaatcacatattgtttacatattttaaggacaataccatattatcctttgagagttgaaaattgagtgtacttttgtttgtttttcagatattgatgagtgcaaattatatccaaatttctgccaaaatgggacatgtataaacacagttgggagttttgagtgctcatgtccaacagggacaacgtacacgaaaattaacggaacgaccatgtccatgtgcactcaattatctatgattacagatgattctgattcaagaaaacgcataattatctactctgttttgggtaagtattattcaaacattctactactcattcagcattcaagaaacttattattttttcaaatcaatccgcacatgtaattttttcaatttcacaaaccgcacccgcactgtgaaactagaaaaccgcaaaaaccgcacggcaaaaaatagtgcagtgcggtgcggtttttgcagtttctgcggtttggactattaccaaataatcaaactatcacaaataccacaaaacttgagcaacacttatc

SEQ ID NO: 307567 - DNA, 1209 bp, Cannabis indica
actcttcatttcttgtttcgttcaacaattgttggctcgtcctcaactcacagagatcacgtctacagagaaccagtctccttcaagcattctctctcatccaaacttgatgaaaaccacctcctttcatggaaacattgaattcttattgttattcacagtcattgtctccaacgattcttcgaaccaaattgtgcaagaagagtgttatgggatttgaacctataactttaaacattatctaccttaacaaattaagctataaatatttgttagcttataatacacttaaattttacttaaataaagtctaataatttttttatttttattttggatccgaaaagtgtgagccctaaaaacgggcctagcccgcctatgacctaaggccggccgactgctactcaagtacgataacaaaaacatgacaaatacaatctcacaagattatattgattgggaagcacagatcaactttcttttttcatggatgctatcctccatgaacgatcagatgaatactcgcatgattttggacatgaaacttctacaaattcctggattgtgcttcaagagttttttactgctcaagaacaatatctggttggaaatggatcagattttcatatcactcatattggtcattctgcattttattctcccctgcatccaaaatctttaattcttaagaattgtcacatatctcaacaattacaaaatatcttttgaatctgtcacaacttactaaagacaataatatattttttgagtattatcctaactcctgttttatgaaagatcaagtttctaagaagattcttctactttgtaaaattgatcatggtctctatgtgtttgactacacctaaaccattgatttgcactttccacccttgtatggtcaacctccaccaaggtcatttcttttcaattctactgcatttttttttgttcaacatgtaccatttaattttcaattgtggcataatagattgtgacatccaactacttaatttgtaaaaaaaataatgtcatcttataatgttcttcaagcaataaaattgtctttgatttttgccatgcttgatgtttaggaaagtctcacaagctttttttcctaatttcaagtagggctattcatcaaaccgctcaaactgactgtaccgcaaaaaaaataccgcttaaaatttttgcagtgcggttgcggtt

SEQ ID NO: 307568 - DNA, 1516 bp, Cannabis indica
gtgttgaagcatgttgctttagtttttatagacgttcaacaacgtagttgctcatgagttttgaatagcttctagttcactttatgattgtagctttggtttaaaggatgtctcaaccaagttgttgccttgtttggtaactgaggttatagggttaataaattgattaacctttttaaaaaacaaaaaaaaaatgtaaaaataataataaaaaaagataatataaataatccatattttaaaaaaagtaaatataccaataaaataataaaaattgataaataaaaaattataagctattgtaaattttatatcataatattgtggcaaatttagtacaaatatttattatgtatctattacgaaaattattaaactacgaaagcacatgtatcaagtagttttcacacgggtgaggtcaaacccatatgaattgaaattgattcccactaaattagacttatgttttattgtttctatttagttgaaaaataatatttgaaagatgatagtcagaattgacagaaaattaaagataacaataaaagttgtttaattatggatgagagaatactaattaattattcatcttcttcctatacgatgacagattataaattaacttaaactcttctcaaatcataaaagtcttaaattacaagtcaactactacatctttgagatagtataacatacaatttgcattaagtaataatctaaaagtcacataagttatataagtactttcgtttcacatcaaaatctatgtttgttcatttaaaaaaaattaatattcactttttaaatttcatattaggatcataaattatgttaaaggcaatcaatctaaaacatgtattaaaacgaatatgaacaaattacaagaatccagaaagaaaaaatagcaaatcacattaatttttgaaataaaatcatctaaaattcatcatattcataaattgggtaatttgtccataatctcaacattcaaattcatgtttaaactaaagacagaataaaacataaagaaatcaaaaagaagagaaagaaactaagtgaagaacatgatcggatcgccacgctcactccaagagttttcttcttttgtttatagggtttttttctgaatgagtttttcaaaaattctaaactccactatttaaactcaattttacaacttaaaatcgagaaaagacaaaaaatatcttgtccagtacggaagcatcgatgcgatgacaaatagtcttaccacaacgaatgtagtgagtcaaaaatatcaattctgccaaagctcctcgctacgaccatgccttactctcgtcgcgaccaacaatgagctcaccgcgatgaggcttcaaaaattcaatatgttttttcactaatttttaactcgccttgtcctttagatagttaactaattttgtactttaaaatcatgataacttaaaacaaaaaacaaaatgtaaaagtgtctaaaaagtaataacaaaaaaaaaaaaaaacaaaaaaacgaaac

SEQ ID NO: 307569 - DNA, 622 bp, Cannabis indica
tattaagaaaatttgtttttatacacaaatatgtccaatgatgtctttaggtgagttgtagtaagccggacgttaaggaaacttcacccaaaaacctaaacttatacaaaattattatttcattaggttacaatttaaacaaactaatattaagtacaagtcatcattgttatttgttgactatgatttccttggaagttagaaattcatttttttttattttattattatttttcttttaggaaaagatttcatttcaaggttaagtggaaaaaatataacatggtcaaacaaaaataaaacataacagatctcataaagaaatggctaagcgtaagcctattataaagggagcgaaaatctccaattactgaagaaaaaataaccccagcaaaaaaggcacatagaccaaacgacacaaatgccaagggtacaaaataaccattattacaacaaaaattaaaaggttaattagtatttttatccctcgaattttgatatgtactaaattatacccctgaacttttaaggtcgttaaaaatgcctcataaattattgagaatgttagatttaaagatttttgttcaattttagtaaaaaaagtctaacatgaatgcaagtt

SEQ ID NO: 307570 - DNA, 952 bp, Cannabis indica
ctagaatggtttctattttagaagagctgacaactctattcaataaatgatgcttattttgatcaataaatgacaactctcgcctaccccaccgctaatgctctttgtcagtttcgtgtttcaagacagacaaagagcattagcgacgggtccaatttcggttcaaggaaccccaacccaatccccctccaggaacatgcccaacacgtgttgggctcccatttcatgtacaacaagtgggccccacgtgagacagatgcccttgtcccctctcttccggtgcatgtgcatgcgggctccatagctcgtctaggccatgcatgtgtctcacctcctaggtgtgaaagtggggcttctcccctctgtgtcccatcagcttttaacaaaagtctttctatttttctacaatgccaagtgtctttaaattcaaaaatgctcacttttgcagcgagtgccacgtgtcactccagtgtcaacttaagtgtaattgtattttaaccccatgtaatttgtaataatttattttcaaattagtcacttaccttcctataaataaaatcttaggttttcagaatctaatatgttttctaatagagaaattcaaagaaaatactatgctactagccttagtttataatttttcttaagtaattttgttatggatttttaagtttccttattattatctatgtttctaaataggtgacatgtgagaaggaaaagataatctcataatctcactaattaaaacccctcaacaaggcttagtcacgaagaagtttcacgaaactgggaacaagtcaagattgagagataggcagaagtctcccctcaaacttatcttagctacccagacacagaagacatattatcactctgggatctggatgttgggttttatgccctatataaaactctattacaatataatctctattattcaatatcaata

SEQ ID NO: 307571 - DNA, 961 bp, Cannabis indica
aggaaacaaaaagtttgaatggaccgaggaatgcaagcatgccttccaagctttaaagtaataactagctcaacccctggtcctatccaaacccttagatagtgaagaactaagcatatacttggtagcaacggaacatgttgtcagtgctgtcttagtaagggaagaagacaaagtataacacctggtctactatgtaagcaaaaggttaataggagctaaaagtaggtaccccctcatagaaaaattaacctaatgcttactcttatccgaacaaaactccaactctactttcaagcttaccccatcacgataatcactgacaacataccatccaagattgaccatcaaagtccaagccctagccaactttgtagctgagtgtatcgaggtacaagacgttgaagataagacgggggaacaagaaagtgaaacagtagacccaaatagtaccaccctaggtactaatctgagtagcttgcttaaaccacatatattagactcaaagaagaggcaagagtaagagcaggggcatccaaaagaaacttagaagctacacgtcaatggcttttctattgaccaactatcaagagctggtattaccctaattactcctgaaggatagacaaatgatttttacatagttctgacattaataatctctagtccacgagttagttgtattggccctttgagaaagtatttgaataatataagtgtttacaatatataccctaactctgcactccttttgcttttcttgatgaagacgaaagcttgtaggaatttttgcagaggttcggctagtataaaattgttcatcctttgtacataaaaaatgacactacaagaaagaggaccttttatcccacttttttagttaacaaaaataaaaaaatgggataaaagatatattgagactttttatcccacttttagatttggctcctcaaatatgcag

SEQ ID NO: 307572 - DNA, 1829 bp, Cannabis indica
tttcacatataaaatagcggaaaaactgatgacaagctcaagtgtttacgactaaaatgcaaagctaatatatttgagagagaaaaaaaaaaatcaactcaaatttccctttcttctccaaactctctcatctgggcttaaattctaagtttattacaaagcaaaaccaacttttcattccgtttgcttaatccgtaaacttaatactactctcatagaacagtggggtattcgatttggatcgcacctcaggaaaatatgacaaattattagcaattttattttaactttttctgtttttaaaaaattttcaagcaataattcattaaaagtcttgagtattctctttccaaaaatcatttaaaattctactacagacttcagctaggagtcagctttttcagataataaagaaataaataaataacaaaatacagaaaaacaaaaatccgatgagatcgctccagctgaccagaattttgacgatctaaaacacttacggcacgattaataaccagataaaagtttgaaaaagcaaagagagagcataccagagtatcagaagctgaagcagaaaccagtggtcgatggcaagcacggtggaggtagagatctgaggttgaaggagggcgaaggataaggcgaatataggggtgcgtaggataaaaagaaagcgccggagaagcgagacaggaagaaagaagaagtaaaaggatggtgttgaggcttgactttgtgttcactaaacagtcctctcttaggtgaatggattggattattaattaatctttaattaattaaataataaattaacaaataaaaaatacaatactattattattattattatattagacgcggttgaagattcacagctagctaacccagcttgaccagccagccaccactactacgaccgccacttcttaataaaaaaatagaaaaagaaatatcaggtggatgacgtgttaaaatttgattggttggatatgctgactgctcgtctccacttcaccaaggtgtaacgtccccggtcgtcgcgtacgtcttaattaatttttctttttttaaagagttaaaaatactttattaccgctactgcacaatctttttaagtacaaattacggtgattacgcccgaatctaacggatgcagtctgaaattaatttaaaaaattagaaagacaaaataatagtaattagaaagagaaacagaatcagttttttcactgatgaaaacgacaagagataacagttgtgagaggtgtcgttttcctaaatgggtatactgtacgtatgtataatggaggtttactttttaccgataatgcccaaaaaaacaaaataaacgacaatgcaacgcaacaaaattagaaagcaattttactttttttaagagagtactttttaatattataagggtcatttttataatgaatttacaagcgaattaagcgtgtgataaaataaagggtaaaaataaaagtaggaaggtgtttgttgtggactattattataaagttgtgtaaaagagagtgttaacagtttctttgattatttcttttcttctattaaagatatattttcttttgtttgctgagattcttccattaaatatttgattaattattccccacgtttctaatttactaaagtcttcttcatttctttccattttgttttggtcaggtttgaaacaggtctcagtctcacaactcacaagactgtttagatattacaattagtttgatttcgagatacatgtatattagagtaaatatcatttaagtaaattgaaatcaatcacgttctcaaaaaaaaaaaaaaaa

SEQ ID NO: 307573 - DNA, 1384 bp, Cannabis indica
taaactccgcattagaggttatgaataggatagaacattcaattggtaaggataagtttcgtacaagagatagttactcagaacacaatgtcaaaacgcatcatcaatatgtgaatcttcatttgttctttaagtctttacaaaattagttagtacaacaatgaaagaatataaacgggatcacctgctacgagaataggaggaatatggagatctgcttctatctcttctgcttcttcggctattcaccctatgtccaattggtgacggtgaacgccttcgcctagatggtgatcgtgaccttgagagatctctaggcatcttcttcaccaatcttttaagctggggaataagtaagcttaaacaataacaaaaggcctttctatttgcctaagacaccaaaagaaattaacatcaattaaaaagaaaattgataatctaataagataagtcaaaaaacactaaaaacagagtagctgaaatattgattcacccaatgaatggagacaaaataacaacagaactacgcttaaaattcaaaaacaagtatgtttatttgactgaaacaaaccaaattaatgaatcaatgacatcacaatttgattcaaagtgcaaataggtttctatatggtcctgaaaagatgggataaaagaaaagaaaaacaacaacaacaacaggacatggattcacatcattctatttaaatataaataattatacacatatatatatatattatattttcctaaatgtctcatctttttttcacaggaaattaaacactgaatgctgtcaacaacaataacataaagaaaagagaaccaattcatgaatgatatttaatccgaatcaatccgtttgcaaggacaataaacctgaaatttgaagagtgtgtacatacatatgacaataacaacttacttagggcaaaattgaaaaaataggagaagtagaataatgacttactgatcaacccaaaaattgaaagaacgagaaaaggaatgctcggcgaatggcgactgagaaaatagagagagaaaaaggagggttatgtaattaaattctcagcttctttcgtctttcgttcccaattctgagatattatacactctttcggtctttatataaatctgattaggggaaggtttcgcaagaaaacccctatattccttcaatttctatttttacccttctttctaggttttaactttttataaaaaaaatataagtaaattctacattacaccccttaaaagggatgaattgatggactcctattcctatttgttttggtatccgaagtaatttttgttggaaattattttaccagaatcttagatctactcacaagtatgtttattaacatcctaaataagaactttc

SEQ ID NO: 307574 - DNA, 2219 bp, Cannabis indica
aaaatgtaaattttttataaaaattagtattttatataattattcctattatattagtgaattaataatgatattgcatggttttttgacgtccataattaaatctttgaaagaagagtagccaccattctcgaatttaaagcacttgagatcataagagcatttgtttctacaagtgtgatgggtagctgcatttgaagtgcccaatttaggttgtgaaaacattgctttagcctccatttcatgtgaagctaaatgaccgacaaaaatgtgatcttcttttggtagcgtgtaaactccgtgtgtttgaagtaggggacaaaccctgacacgggattctgtgtctagacggttctgcataaggttatatatctggaagctaacttgagagcttcttcgattgtccatctatgaatagccccacgagggtatctaaattggtcgatggactctttgtcttctaggctgaacaacatctccctgaccgaagtggttcggccttgttaagttggtgagctgaactcacgtggaactagccagcgtgatattaccagtgggctgaattgctatcatgctcgggctgaattacataaggcactattttttgtaagaaaattacatttttatgtttaatgaattttttttttacatttttatagtttttcgtaaaaacaatacaaaaataataagaaaactacataaaagtaacatctaaataaaatcaaaacaacaataaaaaataatatacatataacaaaaaatcaacatcaaattaacatgaatacaacattaaaaaacagtattttctgttaataaaatcaaaaaattcgtaaaaatatttaaaattctgtgaaaaatcgtatttttgtaatttctttattgtttttgtgtatttgtaaaattatcccttttagaattggacatgttaccaccccataaacacagataagaatatatatgtatatatttatttatatgcatttgtgtaggctatgtatttagtgttgacaatattaacattattgggttggagagaggagctaggtagggttttgtgcattgtaataacattaacacaaaaataggaaccttaattaactagtagtgagtagtattattaaatttttggcctcaaaatataacgtatatatattattttgttaattttcattatttgagtaataacaacctctctctactaattaagctagcttaataatcaatggttggatatggcaaaacgtcaagaagtcaaacttgggcaacttatatatatatatgtgctttttccaatatatagtacgtttaattcattattattggcctggtgttatatatataattacaagtttgactatatattttggaggacaattatatattttgtctagtactggcgaaacaaataagacatgcaaagaatatatatatttatattcttataaatttagtagctagaatatgaaaactattgaagtagtcatgactgatgaggttggaatattggatggtatatcagagtaccaataaattataaagaaaaagataagagagacagatgaaaaaaatatggtacaaaagcagcccaattagtttggccaccgaattcaaaagcttatataatcaattccaatttgacctttttaccaataataatatgaaaagagatcatgagatgatgatccatccatatttatatctttttaaattatcaaaaaaaaaataaaaatgaagagatccttaacaaattaaaatattaaatatttaagaacattccacaactattcagatctgatgatcgagtccatatattatataacagcatctgtgtgtgactgtccttacaaaaattcttataccttgctgtgtttacttaaatcataccaattttccactataattttttcaaatatattgaccagtgattacattatttttttgttggtttttcctttttagtattatttatatatagatgagatttatatggtgcattatgtaattttgaatattaatttataatgcacatatatgtaccagctaggtcttataattaccatattttatgtatatatatatttctgataaatcgagccattaattaatttgttatacgaaaacctaaataccctattgcactgtacaaaaaagtaatgataataatatataatactaaaacatatatttatataaacaggacatatatatatatatatata

SEQ ID NO: 307575 - DNA, 4442 bp, Cannabis indica
ctcgagttagccagacttagaaagatcgtctgtaaagtcggcaaaactgaagaaccatgcattgttagctgcgatgtattcacacaacaaagacacaaatttctaagatggatggatgactaagagtacatccttcgatcttaccaggaagaactagaccaacgtaacagagaagctagtgacctgataaggcggttcaatgagagaactattggaagaggttaggatctcatcagagatcctctataagggagtttatttatagatcagggatggtctacagagaaactgtccaactaggtttctctggaaccaggacagaccttcccctacctgaaggaggaaaagtcttgccacgaagattaagtggcgagaacagccagaccctggcaactacaagtctaaggggccgaccagggatctctgactcaataatacccccaattggccaacctttggctggctaccctttagtggtgcacttctggcttaccaacagggttaactctcatcttggagcatccaggagcgagtgacccaaaggccaatctttaactgtttaggtccaggaacaggtggaaacacccaggataacaacaacttaagaagtgagtctagccactttagacatttatatccacctaactccaacaaatggtgtgatctaccccatgtcaacacgaaggctgcactagccaatcagggaagaacagacagccaggccctacctagtatagggttggccgaccatgagcagcagcctagagtagggctggccggccaaggctagttcccctacccaagagtggcaaccaaggacaactacaaggcttagggctagccagcctacaccctttctcaaggaatgatcgaccagactttagcccattcagggctacatctcatccaagaaggtccaattagtaaggcccctacaacatcaaatccttctacgtaagcatagatggttcagataagagacatgatcaagggcctagttggcccgaaaccttcagatctttaactggataagtcaaggggttcaccattcttcgcatatattaataccttgcccttgccaaagttcaagatgccagtatggaagatgtatcttggatgagaggccccactagcacacatcaagtacttcgagatgcaacttaatcttaaaagattattagtgatgttcgatgtcaaatcttcctgccaaccctattggaaacaacttagtaatggtacttaaagctggctccaggaaggttcaattcttggaattaattttctcgagaattatacacccagttctcatccttgagactgataccattgtagctggaagatcttgtcgcggtcaaacaacgacaaggtgaacctttaaaagattacatccaaaggtttatggctgaagccactaaggtcaaaggcctaataaaagaaggctagtatatgagcatagtgggggcatccttccattgagtgacttctggaaagatatccagaggatctcaaccagtaatatgaaggagttccttgatagagctgatagatttatcaagctggaagaagctatctgtaagcccaatctggacaagtcagcaataggcagtctcagggtgccctgcagccccaagacttgctaggtgcgtaggtgggcactagcaatcttacccagaccagacctttagtggtaaaaaaattaggggcaggtgcaacaacaataactttggaagaaatagtggcaaaaggggaagtacaacacttctcccacgccatgaaaccagaaagacaaggaggagaagtacacttgcttcacactcctaacagaaaaatatgagaccatctacatggccacttagggcactatcccatacaagaagccatctcctatgaaaagggagatgagcaagaggaacatatcgaagttcttttaatttcacaatgacttcggccatgacaccaacgagtgtcggaacttgaagagagagattgaattcctcataaggaagaataatcctcacatgtgtcattatatgcaaaacaaccaatcttaggcataagctatccagaacgaagactctatgtcacctccagtggcggtcacttaggggtcattattgcggaccccatattctgggcgagaccagtaaggttgaggagcactatgcttagacacttcgtcatgaacctaaaagcgatatcctggctgtcaaagaaaggggctccaagcaaccaatgcttggagattccactatctctttcacaaagggagatgctacccaagtcaatttcccgcacaatgaccccttggtcattactgcacaaatcgggaatagacagttgcacggtgaatggtggaaaatggagcctcctccaactttcttttcagatcaatatatgaaaagatagggttctaactaactaatttggcaccctgcgtacaagtaatgtacgacttctttggccaaggcattacacccatggggtgcatctgattgcccatgacagttggagagaatttaataatcagaatgctaatggcacagttcgcagtaattgacgtgccctcagccatcaacgccatgataggttatccaaccttgtacgacctaaaggcggtaacattcatctaccacatttgcctaaagttcttaacaaggcatgggataggatgtttaaggggagaccaacagtcttcctgtcactattacaacttggccttatttaaagccaagaaagagaagatgctcatcaaaaactctaataaagagcccaacagagggcaatgaagtccagcccaaagcggggaggtagacataaatccttgctttggggatcctgtagacaactttgggcctataaaagaactagaagaagtggaggtggatcccaccttttcaacttgaagactaaagatttggaagggtctagcaccaaaaataaattcaatactgataaaatttctaaggacaaacttggacctcttcgcatggtcacatggagacatggtcacaatagatccttttgtgatgacccatgctctcaacattgattcaaacttcctacatgtacaacaagaaaggaggttgctagacaaagaacgtgcctaagcgctcagagatgaagtcgaaaaggcagttggcccatgactttaataccaaagcattctatcaactttgggtatccaaccccgtgctggtgcctaaaccaaacgaaaagtggagggcttgcatagacttcaccaacttgaaaatagcatgtccaaaggactattttctacttccaaggatcgaacaactggtggatgcacaattggccatgagatcctaagcttcatggatgtttactcaggttacaaccaaatcaagatgcacccaccagatcaagagcacacaagtttcatgacacacctaggcctatgctgctacaaagtcttggccttcgggctgaaaaatacgggggccacctattaaaggcttataaaaaattttcaaagacctcattagccgtaatatggaggtgtatgcggacaacatgttggtcgagtccaaaaaggtaggggacatgtgaaggatctacatgaatgcttcaagatcctctgtaagtgcaacatgaagctcaaccccctcaaatgttcttttggagtaggctcaagcaaattccttagcttcatagtcaatgccaggggaatagaagcaaatccagacaagatccaagcccttttggatatgaagtcgctcacaacaatcaaggaagtaaaaaacttgacagaatatattgctccacttagcagattaatgtccaattccatggataattgcatacccttctttaacattctcagagaaaacaaaaaatttaagtggacagaggagtgtgatataacattctaagagctacaaaaaacttgctcaacctttggtcctatcaaaacctttggaaaatgaagagttggacgtgtaccttgctgtcacagaacatgctgtgagtccagtattaataagagaagaagacggtatacaacacctagtatactacatcagcaagagactgaacgacgtcaaaagtcgatacccactcatggacaagctgacttataacttactcctagcatccaaaaagctgaagccatacatccaagctcaatcaataaaggtgtacactgaccaaccattgtggtaggttttgcgaaaactcaaagcatctggctgactactcaagtgggccattgaattcggctaatttgttatgacatatcaactgagaatggccataaaaggccaaactcttgcagattttgtggctgaatgtacaagcatacctcttgaaatctctcaagattcagaagaaaaacatgagccaaagaagaagcgagagcaagagcagcagtaaaaacctagagaatcaacatggaaattacatgttgatggaagctacactgacaa

SEQ ID NO: 307576 - DNA, 1646 bp, Cannabis indica
tcatatccctatatttactattcaccacgtaaaacttaatttgcttgggcataaatgacatcattgatctcttacatattcatgtttgaagtcataacaaagaattatgtaaaggaactttctgattcggtatttggacgtgcccttcagaaaatgtctttacttttaacaacatctttttaagactcactcatcaattccaatggagcaaagttttaatatgattatgtttttattttcataaaaccttgaaacgcacactccttggacacgtttatcgattaaataatgggcattatctttcttgttactctaaaatcatattctttgtatatatttccaagactatacttataaattaagagtaccaccggtagtgctagtcaattatgggtgaactgtgattaatgtaaaaattcgattccctataacaaatgaagttaaactattattattgtcgtgaattcattatcaacatatccttcgaaaccaagtaccaccagtcaaacaacatatactaataatccacctgtggaatctaaattattagagaggacttgttttctacaataagtttaagggcagtttacataattaccctttcaaataaattaaaaaatatagtaattttatatttaaactttatatctatcatctctattttactctcaataccaaataagatagagaaaaattattatcttgtctattccattacactctctatcctctttattattaatcctcccatttttagagagattgattgaaaataaaagatttagagggagaccaaatccatttatctatcctttccttcccatttttctttttcatgcatgtcaaacaagtcaaattggctctctttctaagtacttccatccctccaaccctctcttttcatccaaattttcataccaccgaataatatagtattaataatttataaaaaaaatagtattaataaataataaaagaaaccgttaaccaattatatagtgtcacgttatcaaatagcaatgttttatttaaaaatccaaacttttaattaaattggtctccactctctcgtttgaaaggcattatacataaaatttcttaatgacaacaaaaggaaagaagttgccaaatcaattcatattaattaagatcattttttttttccttccttaatatttcttataattgagactttatatataacgaagttcatattcaaagaacatgcaaatgttgtaattaagatccgagaagtaaatcttcacgaaagaaaagattagagaaattagaatcgttataattggagaacttctatttgttattctaattctgtttagtttagtaaacgtgccttaaaatatataaatagaatagtataaatatggtatatatatattttttaatccatgctcaataattgaattccaatagtggtagatattaatgtggtttaaatttagtacatgttaatttaagataaaatatattaggggtagatgtacccacttgatccatagattattctctttagttacaccagcccatacatacttgaacatggttgttttgttccactcagctacatttttgaagccaatgcctccagccgctttagattgacagatgttgttgttgggttttatgcc

SEQ ID NO: 307577 - DNA, 1208 bp, Cannabis indica
gtcacaaattttattgtgactaaaagtaaaaatttttgtaataattatgtaatattattggataattaaagtcactttttattttaggaataaaattatttaattacccataactttagatagatatttatcctgaaaatcaaacaaagaacaataatttagtgataatgaggcaaattttgtaaaatttaccaattccaattttcacctataagctaattttatggtacacctcctaaatgagtgtattgtgcagcctattgtattttggctaggtgaatagttatataataatttcacacaatacatactaaatttttacattattctgcaaaaaaattaaattttattttgttaaaaaaatatagttctaacaaattgtttcacccacatctaatttaaaataaaaaattatctagctagccaaacaagttgttcgcgccacgataattacaacaaagatatatatgcaacgtgttgtcgaaagactctaaactttctactttttttttcaatatttatttaagttagaacccacttttttaataggaataatggtattggcaattttgcaccaaattaacttttttttaataaatacatgataaaatatcttattaaaattaacacaaaaaattatgtaaaaatatttagaataaattaaaaataataatttaacttaatttttatttaaattacctactcttaagttaaagcacacttaatcttgatcttactatacacataagaaattaagtttattatttaaaaaggtaaatggaaattttgagtactaacagatagagcctattaaatatttttaaagactctgtcctaatttaaaaattcggcttctaaccaaaaagaaaaaatttataatttataaatgatatttttgaatattttcatatggttatgtatcttacaaaacactaaaaaattcaaactattttattaaattattattgatttcaatacatcttcaaaaaaaaaagtatgataaaaaatataatatgaaaggtttgaaaaaaataataataaatagtagtaatggttttttttttttttatgagagtgactaatgataggttgttattgaattttttttttttttagctctgtacagtagcttaacttgcacacctataagactgatcttacaaatagacaaatcaaacatagtctaatacatgaagttatattgctca

SEQ ID NO: 307578 - DNA, 1387 bp, Cannabis indica
tttgagaactttaacaaattaaagtaataatagtttattatttatttttaagaaatgtatttaaacttggttttaattttagagaattatatattgaaaaattgacttttcattttaattcaagcgtattagatatattatgtaatcaaaatatgaaataatcgtataaaaaataaatgaccaccgcatgtattgtttttataccaatttgtcgaatataagatagttttggtttttacctaaacaaaggggtgtaaacaagtaacaaagtggtataagccctatcagcgtatccgtgtccaaatttttggtaatttgtttcttctcattgcaacttttcaattattgcaatttgcttatacttgtaaaatgatcaattttttggtgcattgacagacgaaatctgtacttgacatggcaactaaggtgaatcatgtagttctattatcagggacaccgtctttgtcaaggttgtagcatgtccttcaagtagaaaagcaatatcactatatcagttctgttattgattatgcaatacattgcctctgttaatgtgcaatgtttattatttatttattcctgtcagttttctttttggtctggttaacggtaattgcatgttaatagctcactttgcacaacttcctaggtgaccataggccattcgacatttttcatcagataaatatgctatggtaagttttttttttgagaatcgctaaaggacactagtagtgcttaatactaccatgatgcggcatactgctattgatgcgatttaaaattgagttttatatattttaatttaataattattataaaaaaaccgctagccaaggcgccatctcatggtagtgttgggcactatttgtgcctaatagcaatgcctctttttttaactctatttcttatttgatttactcggtattcacaaggcttattgctctggtttactatttcttctcaaagcttttatttttgcaggcctggtatgttgggtaaaaacaagtttgaatttggaaagacatactgtgatgccaaatttatacgcagcttggatggaaaaattttccaggtaatattcagagcaaagataaactatattataaagtttattatggcgacctgcccttgtaggtttttggtagttaagttataatgttttgctatttaatcagaaggcaccccctactactaagcttgttggtcatgaaagacctctttttctttgttgatgcttcctatattacggtttcatgggttcttaggtgtttgcaatatatttatatttatatatactaggtattagtaacatgcaatttatgtttgcttagagttgttattacgtaattattaatttaaataataataataaaattaaatctaa

SEQ ID NO: 307579 - DNA, 2465 bp, Cannabis indica
actttaccaacatgtcaatagacaagacataaaatgattactctttttggagagtggtacaattagtaggtgatagaaaaaaatgtgtgacacatataacactcaattaaacttatatttgcatctaagagttaaacttaagtaatctcccatttgcatcacgagccacacacccaaacccaaacctttggtgagctttaaagatagcgccatcgacattcaccttaaccttaaaattaactggtttacgccattggttgctgccattagtaacaatagtagcaaataaggatttcacaagtcactggtgcgcagttgaagccaagaagagggaggatggtggtgacaatgtcgctcagacgcctcgatggatgctccccagaccaggcagaattcgagtgaacgttgattttgccaacaaacctgaatgtggtgctattggagtggtggttcggagtgaagatgggggtattctggccttgttcgctcgaaaggtttcgttctcctccattatccatggggagcttttggcggcttactggggagttatggtactgcagcaactcggactcacgatggcgactctgctttctgattgtcaatctttagtagcagccattgatgctgggaatcctccacactggaacttatcctacttgtttggaaaactatgtaatctcattcactctgtttctgtgtctcccttttgggtgcctcacactgctaaccaatcggcctaccttcttgctaaatggggtcttgatcacaactgtaatggctttataagcttctgggaggtgagtccctttgtactcaccacgttactttctcttattgaataaacagttgtgttttcgtagcaaaaaaaggatcccatcgattgagaatgagcaaccctccattggccaagagctagatgagtcgacttaatcacatccgaggcttaacaagattttttctgtcaaaacacctcgtttcgggctttctaaattctccaacttatcatagcaacttctaagataacatcatgttgattcccaattaataagccaaaaaaccagctgccataatcttgcattcataccaaaatttgaactggccacaaagaaattccaacaagatcaagagaaaccacaaccaagcaacacatgaaatattgtctcatactcgatattacaaaaaaagacagatgagatcaacattaacatatttaatacgaaaatgataaaattttggcactaaattttttttcattctaatcacaacactaaaagttacacaaataataaatatacaaaaagtttaagtataaatatatttttcaaatattaaaaactaatagaaaaatgtttagtgtagtttataaggccaactccaatagaatcactaaaatattaaatttgttaagatttcataccaaattcattctaccacactctaaaacctatattgtatataccattgtctatagtgtctcactaatattagtgtgacgctatagactacacacaatatatttttattagattttaatattttaataatatatttataagtaaactttttagatatattatttgtgtttatttataatataataaaataattataaaaaatatatttttagtgtaatttttagtattgtgattagaatagaaaaaactttaatattaaaattctattatttttgtgttgatttaacactaaatttaacatttacattaaaaatgccctaatgtcatactaataataatagaataatttaaatataattgtaatgaatttagtataaaatctcatgagattttttgtcatgagaaagaatttttttttttaaaaaaaatccatttatttttgcaaaaataaataatactaaaaaaaaggaattattacatgttacaagatttgtgattggccaaaaaggcgcgttagtatatgcacttctttacatgttagatttttttattaatttaaattattgactcagctttcttcttcctttgactatatataaaccctactcccacggatcttattcttctccgatccaaatttcgagctctctccacaatcaaaaatggcgaatcgaatcttcatccttctcgcattcacagctctcttcctcttctccaactccgttctctgcaaagattccaccaccaaagacatctccgacgatgacgacgaagatctgagcttccttgaagaatccgacgaaaaaccgacgccaccgcacatcacgatcacggaagctttccagatcaggaagatttcgaaggtgaaggagacgatgacttcgagaatttctccgatttcgatgagtcggagcacgatcaggagaattcgtacaaggagcctgaagttgatgagaaagatgttgttgttttgaaggagaggaactttactactgttattgagaatacagttcgtatggttgaattctacgctcctggtgtggtcactgt

SEQ ID NO: 307580 - DNA, 1311 bp, Cannabis indica
ttatatcatccatctcatcacaaacccattcctcttttttctttacattccatttgtccaatcactcccactaagtaaaaaaaaatatcataaaactttattttacaacgaaatttactaccattatcaacataatattttataattagttaacaattttttataatttttattagaatattgttattagagtacatactactagtgtctaacctttctataagttgtattccacgattagttagcgatttttttaaatattatttttaaataattaattatactaatatcaatatgacaccgaaaaaaaatgttagacacttataatacctttcagtaatttttaaaatatataagattacaatatcacgatcacaagagtactaataggtaccatgatatcttttagcatttcttcaaaatttacatacaaaaatagcattcacattaatttttttacttaaaatacctcataaaactctacttgttttattttatctcgaacttttattttactttttttcctctacagttatttaaatattactcttgtaatatatataaaatacataataattaagtttgaataaaattttaattaaattttattaacatactgtttgaaaaataaataatacttctccatatgtggagaaacactgtaacattctttaaattttgagctaaaacaccattttttttttaacatttttcatctttctcttttctatttgaagaaaggaacattataattcacctaattaacgtaagtgttcttatgttctaaaacaagtttaattatttatcatatatttctatatattctttatatatttttgaacgtaattaaaaataataatatttaaatggtaaaagaaaaaaataaaataattggtggtgtgtaatgtaaaaatttgattaaatacagaaaatagggttttaaagtaaattttaatgaatagagtagaccgtttaatgtgaatgctctcctttaaaatgagtttttctttaaaataataataaaaaaaaaatttaaaaacggtatacatgagttattttacatgttaagaaatactatttatccttttattattatttttttatttatgttatataattgtatgtgtatgagtatgacttaatcttatatgttcaaaattaacgaataaatatatattttaaaatataaaaatttatgtagagaaaaaataaagaagttaatgtattggtaaaattaggggtgttcattggatcacatccaatgtttttaggcatatccagatttgatccaatcatatattggatgttaga

SEQ ID NO: 307581 - DNA, 1150 bp, Cannabis indica
taagtacaatatatatataaagatttagaaaaaatttttaaaaaaaaatacgacgcaaaaacacgaacttaattaccgtaattaaacaaaataagagaataaaagagagaatatgtaattgtctcagctatgtataatagatagatgaggaacgctaaaagatactagtggtgcttagtattctcttatatgttaatcgttaaccaatcgcaaaatgacaataacaatgctctataaataaataaatagaagttaataaaaaattattaattaaataattttatttattaaataattattaaagttaatcttagcaaaaagaaattttagtagccgctagtacccggaagaagtagaagcagagaatccaggaccgaggggtttgggggttttagctgagcaacatttcgcatcgtcttcttcagccgtaattttggcaactcagagaagcatattccaagaagatgtggtatctgtgcgtgttcttccacaggttattggactacaggaaaccagaggttgaatctcttgctcatctttttggagctttcgatgaagatgagcaaagcccttttgggtattgtactttggagtggaaacttcccaaacatcaccaccccgattctcctttccatatcgtcaatcttccttccgaagaaatagccagccaaatcgccaatcggagtaagcaatttccatttctagtttactctttcttacgttttgtttgattgttaaaagagtgttcttttttttttggtaggtatactagtgagaggaatgtatgaactttggggagaaggtgatagctacgaagagctggaggagtctattaacagttacccagaagaaaggaagttgccgtacttagaacctgaaagcacttttaaggttaatgtcgatacttttgggaaggctatcagtcatcaggagcaaactcaactcattcagcgcctcgattacatcccctttaaggtttgctgcttatattgggtcttttcgctactacggttgccttttgtttttttgttttgcttgatgtagtgggtatttttaactgggattatctatgttctggagttctactttcgaattttgatccagatactttagtgggatttggttagcctaaaatctgagatgtttgttt

SEQ ID NO: 307582 - DNA, 1625 bp, Cannabis indica
gaataaaaatcttaattacttatataatatattacgtaaattaataaaagtgtattgttattcatactcttttaatcgcatatgtttgatttttctagtacaaacaagaaaaaaaaattaatctaaatgaataataacataaaaataattattttattataataatattaaagctatattcaatttttttttaatcatatatattttttaaaaaaaataataagtaacatttaaataaaattaaatatgttgatatttatattttagaaatggaaaaaaaatgagaaaaagatatttagggatgcatttgtttttttttccctaagatcgtggcccctgaatttgaatacacatttaaataagatattatttctgaatttgaatattaaatatttaaactgttttttttttttaatatctgaatgtacttccttatgtttttaattacataatattaattatattttatttaaaaaacttatgatcaaattatataaatagaaaaacataatttttttctaaaaaaacatagataaatgaaaaaaatataattaatatattagttttgagaaattttatgtttcaaatattccaaatacgtttaagtttcatataaataagcaaagatataattatttattaaaaagtaaacaaataatatttaaattatatacaaatacaaataagtacttataattaatatttgattttgattgtatgatgacaaaatactaatataaactatgcaatattgtataagatatcaaatcatgactaattttttttaaaatgtatagtattatttaaaaagtgggtaatgacttgatttgatgttgcatcaaaagaaaaaaaatcatgtacatgtgttttagagaataattcgaattattgattctgaatctactgatcatgtgacttaattacagtatcttgaatcgtgagaagacattgaaatggcaagataaagctaagagttggagatggagagtttgtttcaatcaaagcaataggaaaatcccataaataataaacttttacttttagaaaatgtattttacattccaaaatttagtaaaaaatttaatttccatacctatgctacaagtaaataatttgtattgactttcacgagttgtaatatatatctattttatttaatgaattacaattgtgtgtagcacgtatatgagcttaatttatgttttgtaatcaaatgaactctttaaattgaataataaatttatcaaagtagaaaaacctagatcagaaaaacgtctaaaaattgatcatgacaacataacatatttatggcacttaagacttggccacattagattcgagaggtttccaagacctacaaatgatggacccttaaaggggaacttactcttggtgagttatgtatctttgaatcttgcttgaaagacaagatgaccaagcgacctttcttcgctaaaaggagaaaaagccaaagaaacacttggtattgtacatttaaatgcctgtgggcttctaaatgtcaaagttaagggtagttttgagtacttcgttacttttattgatgataactttagatataaaatacatttagttacaaaaaattgtaatttttgtgactattacat

SEQ ID NO: 307583 - DNA, 795 bp, Cannabis indica
attatatgggttctttgacttgtgtgttattagcttatccacaggactagcctatacttacatcttggaattcaatagtgcaattaagtgggaacgctaaagtgacaaaaatctaactctatggcccataatggattttggtcatggcttagattctgagcccaattatctttattttaagtccatctcatcttaagctaatcctaaggagtgcttatagaaggaacatgatgagagacaaaagagagacctaatactatgtcaaaatatataatagagtgaaaaagatattcattattgatattgaaaaagagcttggaagtatatatatacatgacttagctcaactgagctgaaccaaagactaactgaaaaattaatcagttaagagaaagttaactgtaacaaactaaactaactttcttcaacaatatgtatgtaggagtgcattaataattttgccactatccgatccataaagaaaatttgttttttatacgtagataaataatagtttatttatttttttagtatgataatatgtattgtaattatagcatgcgaaaatataattcaaaattgtccactttgagcatattataaaaaatattggtgcaactactgaactggtattaaaaagattgaactagttttaattatgtattaacccaaaatatgattatttgtgaaacaataatttttttcggcaatgtaaaagatctatcaatattcatttacaataaactaatagatattagtaaagttttatcttcttcttcttccttttttgttttt

SEQ ID NO: 307584 - DNA, 3474 bp, Cannabis indica
aaatatctgcttctgatcattgccgtctgttacttgagcctactgttcgtaatgttattattccctttcgccaatttcggttcgaaaatgcttggttgagggagccgttatgttcacaaattgttatggatagttggaatatgtgtgatgggcagagtatcatggataagataaagcattgcagtgaggttcttgctagttggggccgtgattacactggcaattttaaaagccgtattgctaagtgtaaaaaggatattagattttggaaaagagggcgtgatgctttggctattcagaaacatcgtgaggcagagaagcagcttaatgagattttcaatcaaagggaggtgttttggcgtcaacgttcgaaacaactatggcttcgggaaggagatcaaaatagcaaattcttccatgccaaagcaactgctaggaagaaacataataccatcaatgctttgaaagatgatttgggagcttgggttggttgggacaatggcctacctacggtcattattgattatttcaccaatctattcaaacgaggaaattctaattggcaggaagttgttatgggagttactccttcgatctcggcattacaaaaatgatgaactgttaggcccgattactcaagaagaggttaagaaggcccttttccagatgcatcctgataaatccccgggtccggatggcatgactccgagattttatcagaaatattggtcagtggtgggtcgtgatgttgttgatcaagttcgacatttctttgaacatggaactcttcctcctagtcttaatcatacaaatatcgtgctcataccgaaaaagaagcagcctactgttatgagtgaatgacgaccaatctctctttgtaatgtactctacaaagtgatttcaaaggtgcttgcaaatcgattgaaaactgtcttgccccaagttatttctgaaacgcaatccgcttttattcctgggcgcctaatcacggataacattatggttgctttcgaggtaatgcatttcttgaagcgaaagcggaatggaaaggaaggctatatggctttaaagcttgatctcagcaaagcctatgaccgtgttgagtggaattttctgagagaaatgatgtccagaatgggttttcatgatcggtttgtagaactcatttttgctactatttctacggttcgctatatggtagttcatgatggaaaggaattggggcctatttgcccggagagggggattcgacaaggagatccactctctccttatctgtttctgatatgtgcagaaggcttttctcagttgttgaatcggttcgaaagaaatggtgatctaaaagggtgtaaagttgctaatggagctccaattatatcacacttgttgtttgcggatgatagctacatttattgtcgggctaatgaaagagaggcttctaatgtgttgcgtctccttcaaatttttgagctagtgtctggccaaagtgtgaatttttcgaagtctagtgtcttttttagtgctaatatctcggatgccatgagaacaaggctttgtggcattttaggtatggcaagggcaaatgaacacagcacttatttgggattgccatgtactatggggaggaacaaggatgcaattttaggctttcttaaggataaaatgcagcagcggattcaaagttgggaggggaagcttttgtctaaagctgggcgtgaaatattgctgaagacggtagctcaagccctccctagttatgcaatgtctgtattccttttgcctaagaaaacttgctcctatttggagggtctaatgtccaagtattggtggggttcttcgtcaaatacttctaatgggattacttggatgagttggcggcgtatatcacggcataaacacactggtggtcttggctttcgcaaccttagagactataacttgtctcttcttggaaaacagggctggagactgttgttgaacgagaattctctggttagtcgtgtatataaagcccgttacttccctcgagattccttcttgacagcttctttgggatcgaacccaagctttatttggaggagtattcatgagtctcaagatttggttaaagcgggagctagaattcgtatcgctgatggtacggtaacaaacgtcctcaacatgccttggttaccttctggtgataatccgtgtgtgttatcctctcaccctgctttagttaattgtaaagtgcatcagttaatgaaaccggggttaagagaatgggatgaggagctcatttatgatatattcaacccaagggatagtagtatcattgttaatatccctctgagtatgtcgattgatggtgatagatggtattggaatatggaaccatctggggtatattcagtgaagagttcgtatcatcacattcagtgcttgaaaggagattggagcgttcagttggaatctgacttgtggaaacacctatggaaactcaaagttcccccaaaggttgttcattttgcttggcgggctttgagaggctgccttccaactcgttcgcagcttcaaaccagacatgtaccagtggaattgcaatgtgttttctgcaacatgatgttgaaactatccttcatgttctaatattgtgtccctttgcccaatcgtgctggaatagatctgccattgatcttattccttctgctgcaggtagttttcctgactggtttgcggagttctgggctagacaaagaactggtgcggttgaagagctcctgatggtgggatggtctatttggaaatcccgtaatgagttgctttggaagaatcgttctcggtctgctgctgaagttgtttcttttgcacatagtgttcttgatcaatggattagtgctcagtcttgtcgtactgagccgctgctttaccaaaatgatagtgttggcagcaaggatttttggactaaacctgaggaaaatttgatcaagataaatgtggatggggctactttttcagctgagaatgcttatggtacgggtgttattgcaagaaacagtgatggtagagtcttggatgcatttgcttcttattttactggtgatcaacatgcttcggtggctgaaatcatgagtataaaggaggcattaagctggataaaaaagaagggctggatcaatgttgttgtggaaaccgattgtttagtggcaattcaagcattaaacagtacggttgacatgccttcaatgtttggtcttctcgttcaagaatgcaaaagtcttcttctgtctttggtaaatgtcaaaatttgtcatgttaaacggtctgctaacaaagccgctcattgtctggcgcgtggctcttgtttctggtctgaccgtatcttctctgagagcagtattccttctgctcttcaaacaattgtaatagcagatttagctatttaataaagtttctacttttattcaaaaaaattaattagttttgaaaattatt

SEQ ID NO: 307585 - DNA, 768 bp, Cannabis indica
gaaatgtgaggggtagtttaggaaaatcattaaagtggtcatatatgaccaattttaatgattatacatttaggggaaaaattatagggtatttaaagcatggaatttcaaatttccctaagtaaaatggttcatatttttttttatatgtggctagatatttatatttaatctatgtaacataatgttatctaataaaaattataagattaattaacagaaccaaccgagcaaactcaactaatcgtgcgcagcctcacttaaattacaaggccgcgatcggcctcgtcggaaatgaataagtgcagctagcactggatcgacaagggtgatgatgatcacatttcacaactatagtactatagtaccatgcaattgcaaaatgaaaaaaaaaaaaggcaagggttagggttgggtaatatgtcaaaaacttttgattttgaaagggagagtcaaagctagagaaaaaaagaaagggtaggaccattttgatttttgactaataatatgtaactgacacccccatgtgtctaagagaaactacgcctaaaaattcgtctcttttcttatccatacatggccatgcatgcatgtatccatgcaactatggccttaattattaaacaaattatataaaataaaacctatagggctcgtttggaacgcctataggttttattttataatactatgttattttataaaacaaattgtattgtattgtattatattgaattggattatatatcatatttttatataatacta

SEQ ID NO: 307586 - DNA, 808 bp, Cannabis indica
tgccacggaggttagatatcttggactatttattcctttgagtagtacttttagaagttccttcagcctcttaaactggagaaaaaaaaattttctgtaaaaaaaatcctgcaggtatgtggtaatgttgaatctgtgaagtttttgagcgagtggctacaaaaatggcgtgaaagaaactttcaaatcggcaaggatcttattgattgtgatacaaatgatagggacaaagatgattatatctgttccgaaaatgactctgattcagaaagccaatatgaggaggataggcttaaaaatgtcctcttagttacaggaccagttggggtaactacaaaaacattatctttttacaactatgatgagtgatggtacttggttttggagggaatttgttttgcacaaacctatatgcttgttcaagattctaaaatgaaaaaatatttagaatttttcataagtagttttattgaagaatggaaactacacatgttacatgtcatttacttgtttttatctttacttgagatgataagtagctagaactgtggagaaataaagcttacagatggaggcggctctttctgaagccttatattgaggattttggttttcttttatgcatttatattgctggcaaaagttgaatgtaattaactgcatgcttataaaatgattgagaaaaacagatctttgccttttaagttttttccatatatctagaatatagattctcatataaaataattagagttacaaattgtctatgtgccaaaaataaaaaaacgaattcctaatggtagtgcag

SEQ ID NO: 307587 - DNA, 1029 bp, Cannabis indica
attaaaaaagtattaccaaacgtcaccttaattttaagaatcttcattaatatggagatagatcatcggtgttcaatatcttaataaatggtattagaactttgagaggaagttcgaactggacgatcttgatttcagttcaagaccccgaagaaataggaagcgcgaattatgatctcgaaaaatttattgaaaagaacgattttagcctatggcatgtgaagatgagggtgatgctagttcaataatggcgtcaggttgagacacacgacaagtctcatgacgccattattctaaacttggaggataaggttcttcctgaggtgttgtaggagaagacaatttctcgtgtatggtcaaagttaaaaatcctttacacactactatagaaattggtatttatgacggtcctaaaaataattttttttttaagagatcatggtcaaaaaaattaagtaactgtttaaaacagttagaaaaaataaatatttccaacggtttataacactagctataaaaatatataagcgacggtttttattaaaaatacaaaaaaaaataatattacctatacccgacgtcggttgtaaactttcgggtatataaaacccaaaaaccatacaaatcccacctaattaaccacacacacaccagctataacagaatctaacctaataactccaaaacacatccttcttcctccctctatcacacgaagcaaccaacctaacgcccaacaaaccataggcgacctaacccacccacacccacacccacaccggccactaccacacaaaactcgaccattgttgacattgttttatggttttaatatgatttattttccctcagtttctatgtattatatttcattcatactttataatttcttttaatttcctgatcatcaattaatgcgagatctgagaagtgagtgtcaattatgctatagtgaaatagaactggatttcgatataggacgagagtacatgtatggtttagatagcttatagggtttctgtgtttaat

SEQ ID NO: 307588 - DNA, 2060 bp, Cannabis indica
ttaaatgaactatattttaactttccactacttatttacatttccattggagatgctctaataattttacgcatatactcatcattttataacaaaattaaataataattattaaatatcgttattggacatcaatggtgcccaacaccttatgatcggttagtaatatttcttaaaaactattttttttaaattatatgagtctcaatacttaattataacaataaaatcataacatgaaaaaaaataaaataatatcttttaacaattcacataattattatataaaaacaaccaagctttgttccaaatcccattatggggataaggtttgcccggccgtcaagccaatttaatttgtgtatttaatattttattgtgtcattaaaatggatatatagtaatcataatcatcaaggacaatctataaacaacaatggtttatatatactattgataattctatagtaaacttttgagaggacttttatatattttacatttttaatttaaattcaaataattattatctgtaagtttttttaaaattttttgaataatttataatgttaaaatttttaaaagaaaaattattacatattttttatatgtatggtaagtaagtgtttgaagtttatttcagcaccataaattattcaaaagattttgaaaatttaaataaaataaatataatacacaattataaaagaaaaaattaaactaaaatagtctcctatgctaaaacaaattaaagatgaactatagatttttttttatactatttatttaagatttgtctattttttttaacaattttattttatttattctttcaaaaaaaaaaaaaaaaaagaagcattccaactaaagtacaatttagtgacattttataagtcacttacattcgaaatttaacatgattgctatttaacataattaagcaacatatctatatgcttcatgtcaaatctcatttatatatataaatatatatatatatatatatatttatataaatttcaagctagtggataacttgtaaagtacataattaaatcactacaaccataaccattacacacttttttgtttccttcttcttcttcttttgtttgcttgatgatttattttgtactttataatatatagtatgttaatttaagacaaatatttttaattaaagggtaggtctctctataataaaatatattatattatagctacaactttctcatgtaatattatttctcattttgtctacgtgaatattattaagaagaatatatattatctatatcatggcaaaatcatggtctggcttaataggaacacatgaaatgtcattttctatgaaattttctttgctattatttaaggagttgtgtctgtatatatatcaatatatatatgtcgatatatgtcaattgggtccatgtatgtattgtcaacctcctttaaattatatatatgaacatatttcgacagccagcctttttccaaagcatgcttttgtgtataatatctatcctatccttatataaatataggcgcccgattctaacccgctttgtatggctgcgtatttgggtatgccctattttagtaaacatagatttattgagatttattgagtgtacaattaaagtctcacattgtttaaaaataaaaatgatctattcttgaattgtcaaacaaagaaagataaaacttgttgttagagtcgtcggaggtttaaatctggttcgaagggatttcgaattttgctagtgaaagggctacagaggaatttcgaatcttactagtgaagggattcatctaacttattcaagaagatctttctagctggtgaggggattcatctaatttactcaaagggatcttgagtgttggaatcgagagattcatgtttagatctgtgttaagaatcatggggttccaactcaaaaccaattggcaatgagtggagtagcccatgttcttatatatggctcaattctctatcatttattccatgtgagacattgtccacaattgactattttttgctcatcaatcttgaa

SEQ ID NO: 307589 - DNA, 2989 bp, Cannabis indica
aaataaaaaatgaatatttgtgagcattatagatgtcgtttgaaaatgaatagttcagataaaatataatttttaattaattcacgggtcgagttgtatctgcacctgcatgtaacacgtgtaaaatatacatattttaattatatttgttaaaaaactttaaaaaaccctaaaattctatctatctctcctcccgcgcctctctcggacacgatacacacacaatccctcttccatctctctccctcactttctcaatctccctcaagtcagatgactcagcgcatcgcatgacagccgcagaccaccaacgtagcccttagaccctgtctcctcaccttcctctcaatgcagccccaaactccctctttctatctctctctctctctctctctctcaactttctcgcctccctctcttagtgcgaacaactgacgtcgtcacctgttttagctgcagttgcactaccaccattggcataggtgataagagcacgtcctctaatgtcatgaccacataattagacatgaaaattaataattaatcagtatactatagttcattatgatttaatatgtacaatatcagaaataagacctattattagaaaatatgcaaatatgatataatttctaaattacgaatattttattgaattatatatgtgttgtatatgcattatgtgtgatttattatttttgtatttaacaatagtagaaattcgacgaattggtaaagatgtcacattggtatatattagtattttagatgtatcaaaaaattttatagactattagaaagtttgtgattgttgggttattagggtaatgacccttttacccttaaatatatgtatatgtaggtttatgattaagggtattttagtaatttgtcatggaataagataaacattattaagtttatcatataagcttagatttatgtacaagttgagaaaacaaaatcagaaattaggtttcactttaactctagcactctcttggttgaaccccctaaaggaaaatccaaccaagttcttgccaatttctcttaagatttgaagttttagtaactaaaaattgaagtatttgatcttggaaagttgaatttggtagaagaggaacaacttagaagagaaaaagatatttcttcaatagttttaaattactttgattctttaataattgttattcaattaggtttggattgttgggtgttggaaacagttttagatgttgattctggttagtttggcttggaatttctatcttagtggtagttgggagagaagttgagctatgagcttaagctttgagatttaatggcaaaatcttgatttgtgaattaaagtgtactctaagttgtttagtatgtttataatgcattaataaactgtttcgggaaattcgattgggtttgaagcaagtttggaaggttagaacttgaaaattttgagttgcagaaatttgcagttatccggacactcagatggtagaaccgggtgtctggtagttctagtagtgccaaaaattttaggcacccggttagaaatttggtgtccaagttgggaatttttaagggtacctcaatttttgttatttttttttttttattatttagggcattttcactttatttatcaataagacaatttcagattatgaatttaaattctagaaagtgttttagcgagacacctactagtttaacactaatgtgaatatgcacatacgcatgtatattatattttcttgttgttagcatattagagatgtgagatagtgtacatagagttgtactgggataccgacatctaatatgatcgacataaagtatgaattaacattaccaacactagtacaattagagtactgagtgcagtttaatattatgattaattatactatagttacaaacgtttgagactcagacatacgcattggatgcgattagcagattttatggtaattgggtgtatgggcgctatattacaagtcaaacatatgttgtgtatgttatgcttttcttattaggtatgtcggctcaaatatatgtttccatgtgtagataaaggcaaaacgaaaattaaacatcagtgagtggtgagcttgatgaagattgtacatattcaatcgtcttagcattgaaggttgcgatcttcagaacaccgttggcagtattttggttatgtcgctagatgataatttttggttattgtatatattatgtatattatataaacgaattttaagatcccggattataaatattttacaaaagtattttatgtttattaaagttttaattactacgaaaattttgttaagtacacttttatgttaaaatcctttgattagcaaaggttagcacaataatcaagaaaatatataacatgtcttagctagttggcgttacaatttgctattagagccgctaggtttgttcttcgaagatttgtacaatcatcatcagagagaagctcgactcacagttcagtaagcttttatatgctttaatagttttaaataagatatcatgattgaaaatgcatgataagaagcatgttagtaataaatatatggatgagtaatagattgagtttccatgttttgtggtaattattgcatgattatgatgatcgacctaccttatgaaatcacaggctcatcctatagaatggacacctggcgaaatactagaagtcagggtgatatggttgaggctagaggtggtcggggaggtaagtaagaatccccctcctgatctcagtcgaggtagaggtcatggtcggggtcgcagcgatagtaatgctaatctgccataggctccgcaagattgggaacaaaagtttgcagaaatgcaagccacacttcagagataggaagaggagctgtagcgactcaaacattaagctcctcctgttgcaccacctcaacaggtgccaccagttcctattctagtgttgctagtattgggaattattttacca

SEQ ID NO: 307590 - DNA, 1256 bp, Cannabis indica
actttttcgaaaaaaaaaatcgtaaaaattaaattaataacttgtggactgaaattttgaatttgtcattcaatatttacacaattattattattattatttataaccctaataacatcttcctacatattctctccagccgctcaagagacttagaatccatcttcgcctctgttcagaaatcgcaccaccttgagcatctgaattctccttgctgtctttgtttcttcctcctcactctctcacattctaccatctctctacttcactcatcttctctctgtctctctgtctctctcttgaggacaaatgctgggagatgctagggaacaaatgctgggagatgctagggaacaaacactggagcttctaggggacaaaggtatttgttagagatgagaggacaaacggagctgcggaggctactttcgcaggtggtggctttgatggtcacaggtaagggcttttttcttcttcttttcttacttgaaattgtaatggtgtctctcagtttcattttttttgtttggtttctacctaaatttttattttctaatttctattagatttgattttttttgctctctataaatatatatatataatccaagttgtaatttttttgtttttatttttcagtgaaatcatgtgagatttcattgatcttatcagaatagatctgaaatttttgtttggtttgttttcaattttcagctccaggcgctcctcgtgggtagtggacaatttcgggatcaatttctatttgttcttcagatttgataattataaaattagttgtaatttagtgtttagtataagttgtataaactctaaatatttatgtaatattgtacagattgagattatattgtttgtatacaggttttaaaatttgggaagatatgtatgttttgagtttattaaaataatatttaatatataataaattagtaattattccaaaatatataaaattatcttaattaattagtgtattttgggaaaggtttatttcttcaaatcttgcatattgaaagcacttattaattttaccatatatatatatataatctaggaagagagaccacaaagtaaatattagttttaggtaaagtttaagtttttttaatttttttttatttagattgtacgtgaaggtatgatcatacgaataattcgttttattaaaataatatttgtgctattataattggttattcaaataaatttgggtatatataagtcataactaaata

SEQ ID NO: 307591 - DNA, 787 bp, Cannabis indica
tttttgtaaatagcccattatttttcttttttatctccaatagtatagcatccctatattttgccacctaaacttttccacaccttaattaaatattctctaaaatattagatgctctaattatctttgaatacctatataattctttttttattatttatttttttcaagggaggcggctgtccctcttgtgttcacgtgggtccaccagtgcgaccacttgcatgtgctactgtgctagtgtgtgtttgtgtatatatatacatataaattcacaattaaagatctgttgctagaaccagtgctaccacttccatgtgctactttgatctatatatgctggtaatatatataaaacttgcattaataagcaggtacgtacatacactaatttctcttgagtatataagtattgtttatgtggtgtttgtttgcttatttgaacataatttattcatctggtttcaccttgatcattctgtgactgtttttatcagactgagtattttggtggattcttgtaaggctctattataatctgggtccccaaataaaacagcttttgtatacgatttcgttatgcactaaaccaagtccaggcccatgtctcaaggtagtcccttatatacacttgtaagaaagtgttcgtatcgcatgtgaaacttgttatactatcacagagttcatttctctaaattagcgtttagttggaaagaatggaaatatagtaatagaaataaaaataagaaataaaaaataaaattaaattttttatcatcttacattg

SEQ ID NO: 307592 - DNA, 1009 bp, Cannabis indica
taatgaaattgtgaaatgttgaggtactttgtatggatgtctgcgatatgcttatctattgatatatatctaacatcaactcttttctcagaaccttatctcttatgaaatgcacatcgatctctgtgcactttgttcgtgaatggaaaactagattgtgtctattgtgttcaatttcaagttccaagagtagggattgcagccatactacttctttatatgtcatagctagagctctatattcagctttagtgctagaatgagccacttatttttgttttcgagagctccagcttaccaagttatttccaaaataaatgcaatagcttgttgtagatgtcttgtcatcaagagagcttgctcaatctgagttgttgtagccttcaatggttaattgagatacacaagtaaatgagattccttctccaattatgcttgcaagatagtgaagtattttcttgcaagcagtccaataattttaagtagaggcttgaaggaatatttgacttaatttatgatatttggtttactaagtgtgagatattgtagggggtttattacactttgatagagagcttgatgttcaaaaacaacactatcttgaaggcttaatttgttgctttgattcataggtgtgggacatggtttagtattgatcatgttggtctttttcaagagatcaatggtgcatttagtttgagataggtgtaatccattatgccctcaatttaactatactattcgattaacttcataagtgtttcatcaatttctataactataaaagatgattctaataccatcgatgcgagtcataataattgaagaatataattctacttatgttcctatatagaaagtcacagtatctcatggaaggatttctgggaacccaccctgttaatgttagtttaaacaagtaatggatagtcctaatgttaaatttaaggacttttgtctaattttattaaaaaaattctaacatagataaaagttcaaggggcatgat

SEQ ID NO: 307593 - DNA, 1765 bp, Cannabis indica
gtttctatataattagaataataagaatttgattgcttcctttttgttttattacattaattctttgtttcagatcaacttaattgatttgattaactatgatgtaattttgtgtccatgaataatatttgtgtgcataattttgaaaaataataaatatataatctctttttaattatttattattattttttttttcttcttaaatcttgtagcatattttatattatatggcgccatcagcattatcatcttcgcgtccatggaagaagtcttccatgaagacgccttgcgcggcttgtaagatactaagacgaaaatgcaaacgggctgagtgcccgtttgcaccttactttccgtcacaccaactacaaaaattctttgacgtccacaaagtgtttggcgcaagcaatgtctctaagattctcaatagtgtcctcccctcccagagggaggacaccgccaattcacttgcctatgaagccgccatgaggctccaataccccgtctacggttgtctcggaatcattaccctactccaacaccaggtcaactgcctcacagctgagctctctgactaccaaaaccgacaccaccttatcatggcaaggctagctgcattcaatgcacctacccgggcccacaaccaccgctacgagaatctaggcatcaatgccatctctggggctgcatcgagtgttgccgccccagagcaaatgatcaactatggtaacactagcagtcttgtagccgccatgaatggcggaattggccaactgagtcactttgagcaaccttgggctgtcgccaaggatgaccaccgcaccattaattgatgtaataaatcatcatattattattattattaggtacgtacgcttaattagtctctcattatttattgattattgctttaattaatggattattactattcaatttatttgttatatatagttaattagttaccaaaagtataataatcacaaccaaattaataaataaatagataaattataagatacagcatttattttttattttttattttatatcattttaatttggaaacaaaagtacttatatatgtataagaaattcttaccaaaaaaataaaattacgagtcatatgttgagcatatgcatgtatattaattcattgatatgtttttatttattttttaaatacttttaatttggtgataaacttgaatattgtaattaaattaatgcatgtgcatggctaccttgcccatatattttatataggatatattattgacctttgtttcaacttgtgtatactgcagagttattttatgcacaaaataaagggattggaggtacattgagtttcaacattgctattagacatcttaaagtataatattatactgatgtgacgtgttgcgagtggttagtgatatcctaatatgtgaaacttgatacctgtagcgatatgctaccttttgtggtatttattaccttaagatgtcttttaacttttctttttatttaaatgttgaatttttaaacaatgttttattatttttgttgaaggatttgtgaataagttgatcaattgtgattgactcgtgttgtttgttctttcttaggtcgtcgtttataatttggagtttgtcccggttgattttcatattattttgttaaccgatttacacttttaattattattattattatttggtggaattagtgggagtgatcaatttttcatatacaggaaacataattacctaataca

SEQ ID NO: 307594 - DNA, 1191 bp, Cannabis indica
gttaagctaaccgtaaatgggttttcgtgtcgatgcaaaacccaaaacccaaaaatgagagtaaaggcagagagagcgagagaaaaagagagaagatgaagagaaagggttcgtttactgaaccccaaaagagctttttaatacccacagaccgaattgctttgcagtattaattgagagagagaatggagggagcaaaaggggttcttatttgtaagagttgaagaaagcgactggcgaaaactcgatgcagtggcggagaggggagagagaaagagagagagagatggcgcttttcagggagcagtggagagagagggactgagtgagggagtgagtcacgcgacgcgagttatataaaggaagtgaaaagacgcgccgagttggaaatggaagtggggtccagggagagttgtaaccaggtaatatggatatttttgtaaacaaagattatttttggttttttgaaaacccaaaaatttattttagggtttttaaggaggctggctgagttgtgatcaggtgatgtgggaagtaattggtgctatagattcttattttatttgtatatatttaggaagtaatatccaatcaaaaattatatatatagcagaaaaaatatagaagggtcataaaattgtgatttttttaattataatatatctttttaataagaaaatgatttgtatacattgaacctcttcttttttttttttttttgaagaagaagaagtgaacctctcttttaaacaaaaaattgtacacaatttattaaagctatgactaggactttgagtacaaatattgtaatagttgattatgttggattttattttttcacaaattgtgtcggtttctagttttataacttttctaataaatttagtttttttttttgagagaaatttaataaattagttgaaaccatagggtttaaaaaaaataaaactgtatgtgcggtacttaataagtttttatatttatatatgatttagagtgtcaagtaacttcaaaattttaaaaggcaaatacaatctcatggagagatgttaaaaaaaattacaaattgcccaatttaaatacactacccaaactattaatgtaatacccggaattaaaaatggattagcaaaaccctaactagataattatgaattaattgaggaattatattattatatagttcaacat

SEQ ID NO: 307595 - DNA, 1350 bp, Cannabis indica
tttttttttttatacatatattatttttgaataacatatattttattttttaagttattgatctttgtgtatatttattaaaatatctaatatgaacacgaacaccattttaatcctttccttttgtaaaaaaaaaaaaaaacagaaactttgtacattttgcaatggtagagcaaatttatatactattactgtagagaaataggaaagaaaaataaaaatatcatctaccaaatcataaaattgagtgaatatttagtaaatgatataaaattaatggcatttgcaacaataataatggaatcggtttcaataaagttgctctcttgagtaattacccaatagaggctgtgccatagagccactgtttccatttccgaggaagcatagcaacctttgattggcttaaaaaaagctgctacaacattaccaaattagtcacgaactatggctcatattccaataatgaaactgttatccaaggcagcatcaatattcatttttaaagctcctccattagggagaatccacttgacagtggagcttctaacaacaggagtctggtatgatcgatcaggcccttggactgttgttcctttgctaatatttgtcaattgaggaacttgacgaaattgtgcaatgtatttgtgagcaaaggtgcaaatgaggggagcaggtttgggttgtgatccatgcatggacttctttgttgcattcaaaccatatgtaccacattaaacaaataatttttgctagatcctcatttgcaaaagtaataaagcaacataatgaacaatcaacagaggtaagaactttcctgtgagttaagttcacccatgttgagattgcattttgaattactctccaaaaaaaattatgactttttgtggtaagtgtaaataccaaaatctattttaccattgacattcggaatgagaggaagaagtacgtattatctaagtactttcagccacatgatatcctgattgtatagtataagtttcggtattggtataattccataaaaggacaccatctctcggagttgggctcaaagaaatagcaagtattatcaaaatgttgttgcgaagtattcagatcttattttcagtcatgtgtgatgtaatgtgacactgtaaaatctggatctccacaataagcaaaagatgtaaagaaagggggaattcgattctcatatttaagttataattatttattttttttacatattttttagatgagaagttcatactttaaacaaatttttgttttttaattagaaaggtaaaaatatttttaaaataagggtaaataacggcataagtacccaaagttttaagtttgtaagat

SEQ ID NO: 307596 - DNA, 1856 bp, Cannabis indica
agaaaatatatagcaaattacaatttaaagagggtaaatagtaaataccattttgaatattatgttttgcaaaagttactaattggactatctgttttattaaatgacaaaatagtccctatatttttcaaaatggtacaaatagaattttgaactgaatttttatcaaaataaaatttaataaaaatctaatctaaatgtgttatgacaaaactgttcacattttctgcttctcttcgtattttgaattgtctttaagttggttatattaaaaaaaaattgtgaaaaattaagctcagggttttatttttactattttagaaaatacaaggttcattttatcatttaacaaaacagagagtccaatctgtaacttttgtaaaatacataatccaaaataatatttacccttaaaagattattcttatcctcaaattgagatttaatatttttttttataataaattaaaaattattctgagaatttttaaatagaagttcgccaagtaatacatatataacataacatatattagtatattaccctccaattccaatcactgctctccaaagaaagagacatctatagttcattgaattgtttgaagcaagaaaatcccaaatcattcaaaagaagaaagctacaaccacatttaactaactgtgtttgttctggctgaaaggtgaatgagtgctctcttgtggtaggtggtgcggagcttcttgtatttcctgcacaaaagctccaatgtcgatctccttttcaaggagctgctcgtgcagcttttcagattctcgtccaccttgttcatcgcttctgcaaaacaaaacaagggtttggcgatgcacaaaacttaaaaatttggatctatattatcaggtaggttcatgtcctgatatcaagcatcataaaactttagatgtctcgtactacataccgtaagcctttggaagagggaagcggagagcagagctttaacgttctccttttgcctctcaaggtcatttaagtttctcctgagcagcagcgagttcagtggtctgataattctgcactgtgacaccacaaaataagagaagaaatttcaccatcagatgtcagagaaactaagaaaaattactggagatataagagcaaacaccaaatttacctggtttctgagctccataatgcgcggttccttttccaagttttctcctaaaaaagtcacacattttataatttgtttcctgaggaagtaataaaattgaggaagaaaaaatatgcatatcaatttcaaccatatgtacaaacaaaatcttacttgctagctgcagagtttccttccgcagttcatctcgtagctgatgacagtcaattaaaaaggaaattaagaacaaaaaataaaaacatactaacagtcaacttagaaatggacacaaaaatagatttgtaacgaccactaatcacatatttgcaactttactgatgtacacatttaaaaaacagggtgtagttttgtcaagtgaaattatacaccaacaaatttcagcagtattgaggcgataaagctaacttacattgttttgaattttaacctgatccagggacaacaagaactgatggtatgcatccttatcagacaaaagcttccgcaactcatcaacactacaattcataaagaaaaaaaataaatgtgatattgataaatattgaaaaatttacttcatcgcaactttgcaagcataattgaaagaagggagggggaaactataatgtcagaaacatcacagaattcattggagcataaagactaagtactaactaataaaagttcattataaataagaaaaaaaaaggaatgctttcaaatgtg

SEQ ID NO: 307597 - DNA, 1020 bp, Cannabis indica
caagatatcattcttaagcttctaaatattcagggtcttgagtttaattcggtagtctcaggcatcactacacgcagtgatcttctctctttagaaaaagttcaagctctattgcttttctatgagagtcaccttgaacatcacagtgtcgtgaccaatcttagcatgaagttacaggataatgtgactttctgaagtccaaaaaatacctctacaaaccaccataaggctccaagaaagcaggtcgaagattctttcatggatctaaccctaataatcgctccctatgccaactgtgtcttcgatatggtcacaccgccccagtgtgtcattacaaatttgataaatcttgggtcactcccaagcttagtaccactgtaactaatgggaacaccaccaattaatgcttcgaatccctcccctcgtgcctacatcactgaacaagaatttgactatgacccataagccttttccacctctttcctacatgattttggagatgattcatggtggtttgcagacacgtacgccacaaatcacatgactcttagcaccaaaaacttagagtcttccactgcttacaatgatttagaaggtttaaccgttagagaatggtaagaagttggtaacattgactcaacaatttttccttcttctacttctaatccaataaaattaaattttgttattcatgttccctcaattaccaagaatttagttagtgtttcccagcaccaggtcaacgtgggtgctgggtcccaattctgactcccagatggctccgtttgtttcttgaagacccatatcttaattattgatgaaaactgagaatatgtccgaaagactttgtttgaactattgttggaaatggtacaggttgataatatgtcaacctggacgttgagacctagcaccaggtcaacttgagccctaggtccgagttttagcctctaggttgatttgaaagcactggattccttgttttggatgataatgaagaaaatgctcaggatatttctt

SEQ ID NO: 307598 - DNA, 1131 bp, Cannabis indica
cttatttttttttctactttttaatttatactatttttaattgtattttagaaaaatattcacattttcttaaaaaaaagagcccgtattttttttatagtcccaattatatttcacatctgtatatagaatataattatgggtgactatatatattacaattaaaaaaaaaaaaaacctaaaacaaaacaaaattaattatgtgatcaaaaaccatatatttgacaaatttcttggataactcaaactcgtatgaaaaacttctaatctcatctctttacctaagtttactatacataaattgtacaattattttaaataattagaaggtaaagtcaaacataagttggaggtacgtacttctttaaagctaattaaatggacagttctgttttctttcgttctaatttattgtcatacatagactttgtgatcaatggtatacattaatttaaagtttagccattcaatgtgacttgggcaatagtggagaacatgttattactacacaaaacataatatatattatttatcaaaatttttgaaaattaattaaataaaagtttaagaaattaaacaagtagataaataatggagataaaatttttatgtagtttgagtgttaattaattctaatttacgaatcaatgtattggtcgaaagaatttgttgtattacaatgggctcttatcctacatgttaagaaaccctagcttcttgctatattgttttccctctggttttttctaacttagagtagaagaaagtctagagagaatatgaaaggtttcgtcccccttgcatgaaggtataaaagaatagggttgtatataaatttttgaaaaccgccaaacttgaataacctgtccaaaccaaaccgagatagcccgacaaaagatacaaaccgagaaacctgacgaaaatataacccacccaatctttatattgagcgggttgaaaataataccaacccgcctaatcaacccgattaaaagggctttatatatatatatatatatatttatatatatatatatcatataatttataggactatttaaataaatataaagttgaaactaatattttttttttatggtagttgatttgaactttgaattcaatctatat

SEQ ID NO: 307599 - DNA, 1704 bp, Cannabis indica
acaactatttttctcacagtacaactgtgccaaactggcccttaatacagtccacaacatctttatacacattgtctcacaaaaaaaaaataaaattgagcttcttctaaacacaaatatcttcaaggaattagatagccctgtgagttccttaagtacaaacaattctaactaataatattcataatgattgatggatctagacaaacaattctaaatttctaactaatagtattcataatgattgatggacctagacaacagagcccattatatttccattttttttttaaaagccaacaacatcttcagtaagaaaattattgggttccattacttcactacttgagatgaaacattaagcccactagttgagtcattctccacatgttttcttttaagctccacctcatcaaacgaaaaagtggaatcaatctcatgcaaaacaacaacatgatcattaatgtttagtttttcaatctatgatcaatctcattgaattcacaattttgagaatttgatatcccatgtataatatttgtgtaattactatgcacaaatcgtgcctttaacttagccttatcatacaactttccaaaaaatcattctaatactgcaaataaagtaaattcactaaattgtatgaactttttcatatttgaaattggtgtagaaagcatcacctccatgtccccagaacttcattcttctcttaagagggactttgacagccatacgaacacgcactcgtaaatattctcgccaaacacccatgaaattattcgggtttgattcaagaaaagtaccaatataatttccagcccggcaaactacttgttatgtcttaaaacttgattgtagattatgaacttgaacccacatatcaagcttcttaagtgctataatcctaggattatcgcccgtctttaaccattcaataattaggtgcttacgatcataagtttatgggctacttgttacgactcgttggatatctaattcacggtaaaactaaaatacaaatttttttttgttcgagaattttcacatacattcttttctccggtttccaaagatttgttatgatattttggaatatttgaaaatttaagacttttcttgaaagtaggcgaccaacaaagcaccattgatcatcaaattccagttcaatcacttcctctttttcaaagacaatctcataatcctcctcttcatccaaacagatgttagattcaatggattagataaacctagtgaataaattcaaattttaaaataagaaaatgttgacttgtaggtgagataggtggagttaataacataaatcaaattcttttctttattattttgtgacaccacacattcatgataataataatttacaattaaaatttaaattatcatatcatatacttactataaaagaaaaagtgtcaataaatcatacgatcaattatagtagtcttttatccttttaaataaaaaataaaataaaattagtggtctcttttttttttttttgaatgaattagcaattttatttgattcaaacaatcattcaataacaaaaatgaaataaaaataaaaatatttctaatacttaaattacgatcagctataaaataagaattattgcacaacataacaaaccggacaataactttgtgtaaaaaaaacaagagaaatttgcggcaaaagtcccca

SEQ ID NO: 307600 - DNA, 1359 bp, Cannabis indica
gtattgctgtattaattttttgtgcactgtgtttggataaatatttattatttaatttaatttaacgttaaattaattatttttttatataaatgataaatatatatttatttttattttcatctcaatcaaaaattattaaatatattttttttataactaaaaaactaatagcaacggataaatagaggcggggtccgcttatattaatgtgccagataaataatttgacaagtttagtaccgacggggttcgtccctaataatccgctagtaataatatttaattgcaacagtatgtcagttcgccgctaaaaatgatcaatagcgatcctttattatcggcgggtcccgccggtaataacttttagggacggaaaacaaagtttttaccaacaaacctccccgccggtaataacctaatttgttgtagtgttataaattgcaagtatctcaatataattatttaaagttgattctttgaaaactttgttggaaaaatttaatatactttatgtatcaagtacaatattgcaatattttgaaaccatttagtatatttactttaacaaaatagatacataaaagtaaacattttttaaatattaaatatttgaagtgttttttactctattaattaattctatgtaaaaaaatttatattatatatgtttaaaaaattttctttctactttaaatttatataattcatgtcattaaggttgatactgttaacaactaaagtttgttctgttttgttttaatgttagtcagttgttggttaaaggtaggtagtagttactttctgttagttgttatattgtaacaaactctcagtacaaataaaggtaaggtctaatccttgattaacttttgctgtgctaatcttggtttataccaattttcttttactctgctttcttgctctgtttttttctttctagtttgtattcttacatggtatcattcgtcaatgtcgtcttctacagctgatcctgcacctgcaataataactactgccactactactgctgctcctcctactcaatcctggaatccgttctctaattccctcaagtcatcccatccattattggccatgacctccatgaaatactcttcactggagttcctccaccccagcatcttgtcaatggtgccccgaacccagagaatgctcaatggagaagaaaggatcaactcctcctttcctggttacgattgtcgatgacataatccattcttgcatctgttgcgaactataacagctcctttgatgtctggcctgccctagaacaaaagtttgctagccaaactaaggcttgctgttgggttttgtgccctaaataaaacccattac

SEQ ID NO: 307601 - DNA, 1386 bp, Cannabis indica
gcgcccacgtctcgaacaacctccatccgaagaagagtaccttgctctatgcctaatcatgctcgctcgtggcggcggcggcgccggccgtagtggcggttcagataactccactaaaactccatccgccgctacaaacgacggaggagtttctcgccttttacctcctcagcctccggctctgaagctttcttacaagtgcagtgtgtgtaataaggcttttccttcttaccaggctttaggcggtcataaggctagccaccgtaaatcaaccaattcatcctccgatggcggcgcctccgccgctgccgataacgtttcgacttctaccgtttcgacatctgtccctgtttccagtggtaggactcacgagtgctccatctgccacaagaccttccccaccggacaggctttgggtggacacaaacgatgccactacgacggtggtagtggaaatagtgcttccggtggcggcggcggcgttacgtcatctgaaggtggcgcttccagccagagccatagtcagagtcagatcagtcaacaacggggtttcgatcttaatatgccggctttgccggaattctggcctggttttacaattgaagtgaacaacaagaaaagtcaactttccggtattgaccaagaggtggaaagcccgttgccgatgaagaaaccacggttgtctaatcaggaagagttcggtgtttcacggaactgaattaattcatcttaggatttattttattatataatgattgattgaagaaactacccttttgtattttattataatttgtttgtgtacagaagatttattcatttactttattagtctatcactcttgattttacaaatatattcaatttatccaaattttagttcactataccaaataccattttaattttacatatgatgtaacgattagcttttggtagcaatatttaatggaataattttaatttcacagccaaaaaaacgtttctttaaccattgcacaaataaattatacaaaaacatcacttgtttcaaagcaacaaccaattccatgtaatttttggttacctaaaatttgataggaaacttacttccatgaaggaaaagaggacaaaaatagtacgaacgaagtttccttttcccagctggatctttaatactaaaatattgaaattggattagtattaaaatcttcattcaaggtcaaaaaagtcagggtcaatattgtatttgtaattcgttttaattttttttagggaaattttatttacaccccaaaaagttctaaaggcacccaattttgataatttttattttatataaaatttatatttttaattgtactaattttttttaacttttttctttcaattcatatttttaaaaaa

SEQ ID NO: 307602 - DNA, 3145 bp, Cannabis indica
tataaatgttggtatttttatcatgtgtggtacggtgcgatttgaaccgcatattaaaattcaaaaccgcaaaccgcaccgcactgcgcggtttgggaaaaattcaaactgcgactgcactgcaaagaatttcaagtcgtattttttttgcggtgcggtgtggtgcgggcggtttgagcggtttaatgaacacccctactttttatcccactagcatatatcccaattcttattttagcaagaatcgagataaatacccgtaaaaattgggattaaaagtcctttcttgtagtagtgattctaccttgacaaataaaccttactaaaactttcagtgttcgaattccattcgatcaacttgaagagtgtttacttccacttgatacaagacttgaacaaccttttcttgacggcttgcactttttttcttctcatttgctgacttgtttgattacacaaaataattacaaagacataaaaatagaggtagagttgaacacattctcctttataaaacaaacactacttgctataaaatatgaattaaaatacaaagcagtgaaaaatataactaacctagaagctagtataagtattgatagacaatatacttatattttgtagctcatagacggactcaatcatccaaatctcatagggaaacttacctaaacgattgacttctatagctacataatcatacctatataaggcaagtttacttctttttatattgattgacttcaattttggggacaagctgtgcctccctaaatctcggggcagacttgggtttaggaaacaagagagatgaaccagaccttcctggctaaatagggctggaagctgcttacagggtgccaattgttatgttgtagaattctcaaacctaaatacctcaagggacagaatatcctcagatgcaaggctaaaacctcagactcctggttctggaagagtgtggtgaaggctaatgatatccttaggagaggggcctgtaaagctatcactgatggtagggacacgaacatttgggaggacctctggatcacacatggcaacgtattctacccacaagtttctaataatcactcatgctcatacactttggtgacagagctgttgacgaaaccaagtagttgggacataattaaactgaataacttatttactcgtgagacagtggttgtcattctaaaaagggggtaacccttcgggtcaaggaaaagaccattagatttggacgaaggaaggatctggtcgtttctcttgcaaaacggcctacttaatccaagcacttcaatgattccctaactgtgaggttgccccttctctctggaataaattgtggaacagcaagatcatggaacgccataaagtgctgtggtggagcatcctctcaaatgcccttccggttaaggaagctttacttaagcgatttcatatagtggatagtatgtgcccaatttgtggtgttgatgaagaatccattaagcacgtatttcttcattgcaacctggcttttcatttatgacgatcttttccctggggtatttttcccgttacaggaacatgaattcgtatgtgggattgggtgaaatttttgtggaatctaaaaggcaggaatataaatacatatgagtttttcctttatgcctctattgtaattgacacgatttggcaggtccagaatgataaggtacacactaatagaatggatagtgtgaatcaatgtattgactatattgctcactcttatgcagattataaagattctactattcctatatcttccccgacaccccccccccccaccactaactggaaccctcccccaagattggataaaaataaattgcgatgctaaggttgatagggagcatatgtgcgtagcagtggttgctagagatcacctaagcaggctgatttgggtgtttacgggcaaaatggaatttttcaatgccctgtgtggagaagctgttgcagtttgcttggcgcttgaggtcacaaatgacaaagtacgccaatttatccttgtggaaagcgattcaaagatagtgatcaacactctcaacgacttgggccctcgatggaaaattgaaatctactcttattttgtaaaagaatcgctccttccttcattacatgtttattttattttacggccaaatcgtgtaattttatggcgcataacgtggccaactgggcttttacccataactactatggttgtattgatgttgatactattcctaagaacatttgttgtaatgaccgtgaggtttattgtcttatgaatggacattttctttaaaaaaaaagacttcaatttcaaaattcaccatttaatacctaattaatcaatcaagggaaaccacaattaaattaattttataacattaaaaatctaatatattgtcaaacttttcatagaaacgtttaacatatctatttttttaatgtataaatcaatcacaatatataaaaaagatatatatatatatatatatactatcgattataataaataaaataaaatattgttgtcaaattaaaaaatgcaaaaaataaaactaacaattttaacttttttttttatgtgtatgtatatatattgatattatatctttgaaataaatataatttataaaagatataaagagtataggttttatttgtggttttatttgtggtattttttttttaaaaaaaatattaattttatagggtaatgtaatgatttaagacaaagtaaagaaaatgaaatttgtagtacagtgttttcactactacaaaaatggtttttcccgacgtttgtaaacagtcgtttaaagtatttccgttggtgcctatacgactgtcgcaaaacgggcaaaatagatgacaattaaaaaccgtcgctaatgtggacttcttgacggttttaaaccgtcgcctataccctattatacgcgacagttttaaactgtcgagaatgtaaaaaagagaaaaaaaatacaaaaatttgtattttctcccattttttttttcctgaactagttttataattttacctaaattaaaataaaacaactaattaatttcattacaataacaattaactttaaaacatattaaatttatgcaataacaaaataaatatata

SEQ ID NO: 307603 - DNA, 2533 bp, Cannabis indica
tgttatgcgggaacttgctagatgcatgatcaaacaaggcaacaggtcctctcgagggcttcatgatggaatccaactcactttttactgcaaatggtagaatcacagttgtacactattattttccacaactcgatgtcgacttcaaccgctatccaatgtctttgttcacgaagattcagaacaaagtataggaagtcattcccttcccattttggatagaacttggtctttgcaaacaaaacatcaacaaaaacatttcatcaactatcgaaaaaattacaagttacaaaaaatagaatcttaatgtaattttttgaaaatatgtgtacctgtacacccttgcagtacatgaggatttcatcaccccaaatgaaatcagccctaggacccttgtgtgcattccaaacaccatgcattatatcagccacatatgtggacagaacgatacctctctgacaaaatgtgtttgagaagaaatagcgtcgcctcctaatcatatgggcacaagagtctatatgctgcatataatggtaaaagaaagttgttaagatatgaaattaaattaacaacaaatatgtagttgtagtaaaatattgtaggttaacttacggaatcttgaatccattctcgtagtgacagcaatctaaaaaaccaactaggaccgtaatcatcagtcttgacgtctcgaagacaatggttggggatggccccacacaaccacctatgaaagctgtccaatagcctttcatctggcggactgaggggatcaaatgacgcagaagaaggcctagcttttttcttcatctcagcatagtcattgaaccaagtaggagggactctcttcctcttgccaaactatatctccactagtggcctctctaagggcaatacatctacatcaccatgtgactggctataactcgataattgaatatcaccttgagactagctgtcatatatgggaatgatggcggcatccacaggagtacgagatgtatcatcaacaaaaggatcataaccgtcgagtacacatcagcatctcttccatggaaggttctggtgttggatctgctggcctattctgtagagctgctccatcataaggtcctagccagccttcagttttaggtggctacacatatatgcatccttcaactctgtctgaaaagcataaagcctttttacatcttgctttatcctattcaacctctcaaccagatcactattgtcaacacgatcgacgcctgaagatgatgcaccaggttgagtcacgagaatagcagcaaattcaacatgttctgcgactcttttagcttggttagcgaaaaattaaaggtcttgggtgttttcttcaacctgtgtctcatcaacacccatctcaaccaggacctcagcaccattgtatgtgatggtccggacatacgcctcttcatccgggcgaggatgtagccccttcatgactaccaatgtctgtttaacaaagaaatgcaaaacaagtgttaataataataaaaaaaatgtttacaaaacaaaaaaaaattatcgaaaaactcacaatacttaaacaaataaacacaaaagcacataatcgacaaagcatcgacattatgtggatatcatgtcgacaaacataaaatctttaacaaattaacagcctacactcaaagcagtcatcgataaattgtcgataaaatattgataactcatcgacaaactcacgatacttaaaaaatcaaacataaaagcacattatcgataaagcatcgacattatgtcgatgtcatgtcgacaaacatttaatctctaacaatttaacagtgtaaactcaaagtagttatggacaacctgtcgaccaaatattagtaacatatcgaaaaaattgcgatattaaaaattaaacacataatcgacaaagcattgacattatgtcaatatcatgccaaaaaaaacataaaactttaaaaattaacagtgtacattcaaagcagttatcgacaacctgtcgacaacatatcgacaaactcacaatacttaaaaaattaaacacaaaaacacataatcaaaaaagaatcgaaattatgtcgatatcatgtggacaaacaaaaaatcttaaaaaaatcgaacataagagttcaaaaaaaattaaatgatcatacccgttttaaaaataatgaactgatttccttctttccaatctcagccctactggtccagcttactatcctgggaaaatgaatccctgacacgaaccatacttctttcccacctctagaatggcctcataggcccaatactgtcatgcaggtgcgaatccataggctgtgtacttgtagtcgtgctgaacatccatcttcagcttcttctcataatttgccttctatttcaacatgtatttttggagggtatgcatcaatctggcaaatgagtagttcctacatgattttagtatgtcagttgtaatacatccatttccctctcggtccaacaagatagtctccacaaacaagcacaaccctagcttgtacgcgtc

SEQ ID NO: 307604 - DNA, 2217 bp, Cannabis indica
ttttttttttttgtataatgattaaaattagtatttttatcaaaagtacgagttacattatcaaactttattgggtaatcgaacaaaagtgaatagaaagatcgtgagggaggggtggtttgggatacccatgctacttatttgataaaagattattctacggatgaagtaaaacatgctctgcgcacgactccatgataaagctccaagcctagatggttataacagtgcctttttcaaggattcttgggacaatactgaagttgttctttcttatattaatattgggaagcttataaaggaaattaattccactactattatactctcattcctaagattgtgtgctttgattcagttagtgattataaatgaattgcttgctgtaatgtggctaaaatggcgacaaaaatgatttgcaacagacttagagatgtgatgtcaaacatatttctgagagccaaagtggctttataaaaggcaagcaaattgtgcacaatattatagtttgtcaagacatggttagaggttacaaaaggaaagcgatgaagtctggttgcctcttcaaaattgtcttgcaaaaggcttatgatactgtgaattgggagtttctcaaagagatatgcttgaagctcttaatttttctaagaagtttgtggagcttatcatgacttgtgttactactccacattttccttttatggtgaatggctccttacataattttattcaatctaagagaggccttggacaagggggccgaatgctgcctcttctcaatgtaattgacatggagtacctttcgaattatcactagagtagccaagaatggggattttttttccttcagagatgtaaaagcttgaagcttaaccacttgtgctttgcagatggcttactactttttttgcaaaggtggtttcaaagatcctagctcctttttagaggctttcaaatcttctcgaattcttctaggcacaaagaaaatattgggaagtctgttgtgtatggtgtaggtaccctttaacctttgaaagaattattgttacgttttggtttcaaaagagcaaactaccattcaagtatcttgaaatgataattttctctaaaagaattttgaaaatagactatgaaggtctaattgagaagataacatctaggataaaaaattggagtagtgctaaaagtctcttttatacaggaggaatggttgatgaagaaagccagaccatcatcttattgagatcacttctaatcgcatgtcaagaaattatggttgccatcaagtatggcagggatgttattgcattggaagatgttcttgccgcacttaaatcgaatgatctcaaagtacaattagaaaaggattccaagaaagaagatcacccaagaaagtgagttcgaagagtaaacaccatcactctcaatcaagataaagtccaaagagaaggacacaaggaaattaatgtcacttctgtggaaggtttggacatttgcaaagattttgcaagaagtacaaggagcaaaaaggcttcaacaaatcacacagtggagataagaaggacttccagcaccatcatcatgggaaagactctgcagcaattgatgaagataatgatgcctgctccacagatggagaattattttgcatctcagaatcttcattaatggatagtgagtggattctcgattctggatgcacttatcacatgtgtccaaatcaagagttattttttgattacaagtcagttgatggaggtaaggttcttatgggtaatgatcattcatgtagggtcattattggaaccgggaaggtggccatcaaacagtatgatggcagaattaaggtcctgacaaacgtaaggcacattttagaccttagatgaaacctcatatccctaggagcactcaaggatgaaggatacggatacacgtccatgcacggaagctttaggatcaccaaggttctttggtagtgatgaaaggtaaaaaggtcaatggtttatatgttctccaaggaaaaactctcccagctggtgaagctagtatggtgaaagggctagaatcgaatatgaagttctggcatcacaaacttggacatattagtgatcaaggcctcaaagaactacacaaacaaggtgtaattaaaaatttaaattctggtgccttaccattttatggagctagtattttagggaaacaacataagctgaagtt

SEQ ID NO: 307605 - DNA, 2941 bp, Cannabis indica
ctatataataatatagttctattaagcacgtaattaaattaatttcaccattttacccttctcgggtcataattactaaaatgcccttggctcaccaacggggtcttaacatattaaaattcatataatttcacatatattgaactatataataatataattcctcaattatacataattatctggttagggttttgctaatcctttctcataattccgggtattacaccctagtaatgagtacataacatatatttttagggggaattcgaggaatatgaattttggaaatgattaattccctttttggactacttataaataggattagaaactgttgatgatccttttagccattcttattctttaaaaaacagaggaaaaaatttccaagagattatttccctcaaattctttgaaggattcataggaaaacatttgacgacatcatccgagtagaacaagaaacttcaaaccagtgagtaagttctttgtttctttcttttatacatttgcaataaaatgcatgcttaattttttggatttcctgctatgaatcttgtctgctcttgaactgttcttggttaaccatagaattcctaggtctaaaatctagaaatcttaattgtctttaaccacaacatctgattatctaattgtgcttcaaattttaaccttacaataccgactttctctcgtcctttaggggctttagtgaaaatcaaattccaattcgaagttttgaacttctaggttgaaaattctatttttaggtgaaatttctgcttttgattcctcaatcagacctagtcggtacattcaacctgtttttcattcatttctccgaataactctcactttcttgtatcctaccatttacagatgcaccgtggtgagttttggggaggcaaacaccatatcgactaggatcttctttaacttctatacgaggatcatcctcatctccgtgctatcccatctttttccagtgacgatctttcaaactctagctttgaagactgggaaataagtagtgaacacacgccttccctggagcccaaggtgcaacatcacttctatcccgaccagattcaatatgagggatacggtcatttcatcggggaacttaagaaagcgtggagggtgttaccttcccactaactggacgtacatagtccatccaaacattgtcgacaccctgcctgagggttgtccaaaccctactgctgtaggaaaacttgttgctgacttcgctatgaccgtcgccaggcacacttctgataggattccatccagatgtaggatgacggcacagaccaaacaaacagtacggaaatcttcactgactaatccgcgcattgcctatcttgccactctacctagggcagaacaagcccgtcctactactaaagaggaggatactctaggggacattgaagtccaagaggtggaggaccagggcgaggtctgtcctgctactccttctgaggcaaaaagggatgaggaagagggaatagcttgagtgctaccatttggtggctataatgatgaaggagagccaatttctgaggcgggtgatgttttagaggccggtgaggactacgttgtcgaggaatacactgaggctatccctttgaggaggagaagttcaccacgagattgatggattttcccaccatccgtggtgaccataaaaaagatgacaaatccgctcttccctccccgactagcaagctactgacccaaggaaaggttactgtgcctagtcaggagctcacacataaacatgctcatacccaactactaccatataagttcgacccagttcacccccactggccttaagtatctatctgcccaattcgtactgtacgcctcacaaggatggggtctgtcgtcccaacatgacactaactggctttttcacctgaagtcatgtcccgaacagattaagttgggatacttctatttctctcagggcgagaaaaaatagttgacgggcaccacgaccaccgaggtgacaaagatagggggcttcgtcgatgagtactattttgtcaaagggatggataccacctacactagtttttagcaggtgccgtcctactgtcacccctcgttcacactagaatttatagagagggctcaaaaaattctccatctctctccaactgaacacaatatctctctcctagctattgacgctaactttatcaagtacaaactctatgtagctgattttataccaaaagctaaggcaccagaagacactgcgtccgaataggaagctacgagcaagaagaagaagaagatgaaagccccttcaaaaagctaagtagctgttgagcgatctttcaggatcagggaaaaccctaaaaggattagtcgccccagtggcaggaaagggaaaggccgtactagtggagcaagaataggaggattcttcagatgatgattctccttttctacttgtttgggaaaatgctcctacccacatgcatgatatttttaattgctctcaaattttacatgcatttgcttgtattgtacttgtttttaaccttcttattttattcatatgcagatatgtctcagaaggtgcttcaagctctgaagaagaggtcaagtgatagctctagcaagatacctccggccaaacgatccaaggtggatgaggtaccgcccaaggagaagagttcgattgagtcacccattgatctctccgaggaggtggtgtcagaggtggaaccactggttaaaatgaaatctaagtccaaaagtgccaaagggggaagcacggaaggatctagactgtgtaagtcctctggtgctcctatcatgttgaaccctaagaaaagaaaggcaaatagtgttggaaaattattttaccagtatcttagatctactcacgagtatgttatttaaacaccctaaatatgaa

SEQ ID NO: 307606 - DNA, 1355 bp, Cannabis indica
gtgaggtttgatatgtaatgtgtcttacacttagactcaaattgagtacatgaatcggattgtaaaggtgctagacatttgaataaagttcaattgattcaatgctaagtcttacttaattttcattcatttctgttttttagttttctgatttgtattaatcttgtttgcttgttatgttgttgttgttcttgctgttaattggcactgatttggccaagtattgagggtgtttttcaccacaattttttttttttaaaaaaaatcaattttccagcaaaaaaaaccttcccaatacaatatataagaatagataacacgctccttcccagtgtttattgatgaattattatacaacctttccgatactatcactctcattcatgtctatatatgtctatatcaatattacaatagcatatatacaccatatatatattcatttctcttctaacttatttaatctgattcttatatattcaatcattcaggttcgcttctttatctcattttttgtatttatgtaggagtgtgtagattattttgcataatatgatatggtgtttatgttcgtaatgctttattatgagttaattcatattgtcaagaaaaaatatgtgtttctactttcttaatttgattatgttcgtaaagcttattgtggtcacatataggtagttatatatgaaggaatataacttaagaacatcacaaaagaaagtaattttagtgctggtccactaaattcactatgtattgatcgactaaattgaaatcatatgtgttactaaccattattaatgggctcaaaattataaattataagtgagttgatattgtgtttatttcatgctgtaaccaatattgagatctttttgtaggagatactgcatataattttggaaggaaaatggttgaggatgtgataatttctggtaaggacataatttctagctaattttgttttaattttatcatgattggattatgagaacctgtttctattctatatttttttattaaagaaaaggattaactaatttaatattctattaactaaaaatggttagacaattttaaataattattaacaatgactagctattaataaacaaaaaactctatttttataaatttgttcaaaactgatttcactgttatgatattaattagaaaacgttaagctaaagttaaattgactctaattattattacctattattaaacaataaattatattatatttataattaatttattattataaatatcttttactgttttttaattaattaatatttatataattttaaaaaaaatacaaacaaaaataataactattaaggtctaaattt

SEQ ID NO: 307607 - DNA, 1375 bp, Cannabis indica
ctttttgtcgatgatagtcttgtattttttgaagccaatgaacggtaatgcagatgctttaaagatttattcaaaaaatattacctcttttttgccaatgatagtcttgtgttttttgaagccaatgaacatgaatgtagatgctttaaagatttattgaagaaatattccagggcctcgggatagattgtaaactttcataagtcggaaatgtgttttgggagatgggtatctttggaggtcaaggcaagagtggcaacgttaatgaatgttcaggtggtggatagttatggtaagtatttgggattactttcttttgtaggaagaactaaaaaggagttgtttgatgtgattaagaattgggtgtgaaataaactaaagggctgaaaagggtcattgttctcagcagtaagaaaagaagtgttaatcaaagaaatcgtccaagctatacccacttatatgatgagtttttcagctttcgaagagtactattaacagtttacacaggatggcggcaagattttggtggggttcgtcagacaaggacacaaagattcattggggtaagtgggcgactctatgtaaactaaaggaaaaaggaggattagggtttcaggatatgggactattcaatcaagcactacttgctaaataagtttggagatgtattcaatttctggactctttgtacaacaaagttttgaaggcgtcttatttcccaaatgacgatgttttggcggctaagtgtggcaataatgcctcttttgtttggagaagcttagtatgggaagaaagataattttgaaggattactgatggagaataggtaatggcaactctgtttgtgttctggaagatccttggttacctcagcccgtgacttttaaaatctatgataaaccacctcttcctacacatttgtatgtcatagatttaaaaagagctaatggagaatgggatgagaggtttattagagctgtcttcaatccaaatgatgctgatttaatactgagcattcctactttctgaatgggaaatcgaagacgaaatcttatggcactataacaaaaatagtgagtactcggttcgaaacggatatagaatgacagtagatttataggttcaagaagctcaatctgatactcggactggtgagctgcggtggtaaaagttttggaaactttagattcccccgaaagttaggcattttgcttggaaagtatcacattcatggattccgactaatgcagctcttgttcagagaggtgttaagatggacccttagtgtactaggtgttaagggtgtacatcagtcggtttggtctggttatggtgtatttttaccaacccaatataaatgtcgggttgcaaatat

SEQ ID NO: 307608 - DNA, 2829 bp, Cannabis indica
ttaacgagaaaccatatatcatttaatgcatatagcgatgcatcaagtacactacatctgggaagacgaaagcgacgcagatcgactgcgaaaacacttagtatataacgtacaaacacttagtatattttcctggaatattacaactatggctccagcgtaggccttatcctcataactctagaaggataccacactcactgttctttaaggtttgaatttaccgcaacaaacaatgaagcaaaatactagacactacgtgcaagactttgattggcattagccatcaaagctgacacacttctggtttccagtgattctcagcttgtggtcaatcaagtcctaggcaaataccaagctcaatggcttaagatggtagcatatttgagcaaatctaaggatctcttaacccagctaaattaatactccatttggcaagtttcactagaataaaatgacaatgcaaattctctagcaaaactagctagcacaacaaattccaacaccctcattgtcgttcctatcgaataccttgcttaacccaacataaatgaaaatccaaagaacatctcctccaagataacaagtagaaaaaacttgctcgtctaccatgtggcccacaatctaattatgtggcctcagattggatttcccattatcttgggtttaatgggagtagttggccagatgctcttctagcctgtactgtggtccatttgggatataaggttatttcccctatttgaatcccataatgagagtgtcttcaactggtagctacccagttagctgataagcctgtctgatcagctcagttgcctacttggagcagttgtcaattgctgcttattgggctctcatgatctctgtctgtttatccatcctctcctgaaatcggcatttttgctgctcaaatgccaaattcatagttgctcgggtgtcctcctagtcgtggtgaagggtgttggtatggtcttgcacccatttgaaggcctctcatagattttgcaacttagtatcattgccaatatttactcgacgctctcccattggtggccctcagttcctgcccaatttctccattatgcatattagtggtcctagtttcttgttgcctattgtgaacccagccagaggggttgttactcctggcttgctgatggggggacctgtggaggctgactagtggttggattaggatcaatgcccattggatctcttagatttgctagagtttgcacattaagattcttggccattggatccgttatttcagtgggatggcaggcccctcatggtagtcacaaccatctttgaatgttttgaagatcatcaaaataaaaacaacattcttttactctcaataaaagtactaaaatatcgacctcacttttaacaaacgacgttgagttaattaaagcgataagaatgattagaaataattatatgtaatttagcaataagaacatagagatttatagaggtttgaccccataattatggtaatagcatacttcccttcttattgtattcctttgaagaattaataagatcataaggagctagccaagtaagatttttaagaattcctaggaaaagcttgacaattctttgatagcataagagctcttctataaaatatcattttggatccctgtacaatggaatggctccactattataggggaaattaaatcaatttgttttctcaaaacaattaggaatagaaagggaaagttagctaatttcctattttacttttacaacgtgcagaaatcccaccgaaatagggatttaatttaaagatataaatggataatatccctaaaattgtgcctcaatcgcattcatcctggtcaaagtgtgtgacttcgctgagattggaagctgctctgatagattcattcaaccctatctagatgttccatacttatcttcagatgagttatttttggataataaatcactctacatgtcatactgaggaatgtacagttcgtccaggtcataaaaagttctccatgtgtcacccagaagaatgccatgtgatcttgtgcgaaaattgggataacaataataacatgaaagaaaaccctaataacaaactaaaataagggtccaataagccaccaacaatcaagcactaaagaggtgtgaagtatactaggtttctaaaccaaatagacatctaatagagtccacctactaatggctatcagccagtgatttttcaataaaaattgggacatagcaaagcactaaagaggtgtgaagtatactaggtttccaaaccaaatggacatctaacagagtccacctactaatggctttcagccagtgatttttcaataaaaattgggacatagcaaccccattatttaaatcaaaaataaaggaaataacaaaaccagttatagtatgatactcaatcacaaaagactagatcacaaaatattaggctaataaagatctaggaatctcctagatttgacgaccaaagaaagaaccaaattgcccctgccaaagctacttgaatccatcgatgagacattgatagacctaaaaaagatagaatttgaatcactctccaggacgataactaaccccattaatcttataaggtctttggaaaccaccattattatatataaataaataaacttaaacagaagcacataagatccccaaactcccatgcctttattaaagcaaacacgacccccaccaacccatgggaaccaaatcagtatgccatctaaccaggtcctaacctcaccggaagacaccccaacaagccacccaaccctgtgttggatatattttactagg

SEQ ID NO: 307609 - DNA, 1742 bp, Cannabis indica
aaaaaaaaaatggtaaatactattttggatcttgtattttacaaaaattattaattgggttttttattttattaaataataaaatggactctatatatttcaaaatggtaaaaataaaatcttaaacttaattttcaacaattttatttgttaatataacaaactttaagataatttttaacacgaatagatacaaaaaaacgtaattagttttgttataatatctctacatcagattattattaaattttattttgacaaaatatcagtttagagtcatatttatacaattttagaaaatataaaatttattttgtgatttaataaaataaaaaattcaattaataacttttgtaaaatattacaaaataatatttaaaaaaatgtaaaatgattaaaaggttccaatatgaattattgggatgggtgttaatgatgatagcagaaagaggtggaagtttatgtggcatcccaacatacacacaataaagtcaattttgtattgtggactggaggtgtttcaatgttatactccacttcccaatctattggatcagcctcaaaaatgtgtttggctttctactcctatattttaagaaaggtttatccaacctattggcatgttctgtttcattgtgaggtttttaaaacttatgggtcactcaactgaagtctctctttgctggtaatatactctacacctatttataagaatttagaaatttataatttatcaaccagtgtagttattctaattcacaatatttctaaatttgttaatatatatgtatcaaagaaaaaaaaggtattgagaaagtttcttttccacaacaaaacagcataactatagttgtttctctaccataactaccaaattgcttctaagttaatacaaatatgagatctttatagaaaatcaatataatatattaagattcaattttattgtggtgtccaatacaaaatcacattaatgtatttgttctcaaacctacccgaaaatgattttgaataatattattttgtgaaagttttggggaaagacaaataaatttttgtttgtttgtgtcttaacatttatagctgattttagatggcgattatatttttttattggaaagaataaataatgataatgtatttataagaggagtaggtaaggatttaaaataatttattggtaataataaaaatttaacatataaagtaatatgctgtaaatttacatatataatgactgataaataatatacatatttttgcttaaaagataatatatatatatatggaacatgagtattactgatagaattaattaaatttaactataaatattaatttttaaaatattaaattattaaattttaataacaaaaaaaattaaatttcaatatttcatttagctacttaattaaaataatataaaaaattatcttttttttttacattatataaaaatatagttatacaaaaaatatataagttaaatttatttattttttttgccaaaaaatttattttattatttttttcagctaataaataatctcagtccatataatgtaaaaatgagaaatttttctaattaaatacaaaaattaagtataaaacctcaaattttcttaatattatagtaatagcgtacatatatatttttttgattaattgactcacctatttattttaggtggcatttaaaaacacttttttaattagttttttgtttttaaaattagaaaagt

SEQ ID NO: 307610 - DNA, 1459 bp, Cannabis indica
ataatttttgtaaaacacaggatccaaaatagtatctactttttaaaatatgtgtaattttcaaatataccattcttttatgttttgtgcaatttacggcctaatttttttttttaattacaaaagtatacttgtaaagttttaaaattataaaaatactctttacgcagcaaaaagtaaaataaaaaaaaaatgttttattatttttagtgaagatgtatttttgtaaataaagaagttgaaggaataaaattaaaaaaaattccgtgttaaagtatttttgtttttttttttaacttttgttctatttttaatttttctattatatataaatggatgtcaatattattagaataattagttttaagaataacaacattcaatttgcagaaaagcaaattttaaatttttactttaatacgcacaagtgcaatatccacaatttaaaaattagattagatgggatcatatattttcttaacatccataattattttatagcattattttgaataagatttttattaagttgctttgagtttacagcaacaggattaaaaaaaaaacacttttaagatttgtttgtgaagttagagtttctaatttcgaaaaaaatacaattatcacaagaaaaaaaaaaatcctaaagatcctgattgaataatttccgagctgagaggatttattgtaaaattattggataaatgccaacttttttcataaaaaatttaaaaccaattacaaatgccatgtgggttgtgggaagatttctaatcaaaataaagagctttgttctattgcaagtgtagtgtagtgtgtagacactacatagtagacactgagacactgtagaggagaacatttgtcatagtgtgtttattaatttcttgtttttgtgtattatatttatgaatggttttttttttgttagttaaatgtatggttaatatcttacatataagataaagatttttttttttttggtgaataatgtaaaataaaagagttaagtctgtttgcatttctatcaaacaaaaaagagaaaatattatatcgaatccataattgtgacgtgtcgtgtaactgaaccggggcccgacaagaacaagtgcctcgtaccgctctgaatagttataatatcttggcccaatttagttgtgtgaggactgactggttcaataatatcttatcactaccaaacaagctactagtaactcggcacataggtacgtcaccaacgttaacttaaaatggtacctaaacttgctaattttgattaatcaaattttttaattattattttgttaattagtagtactgtaaataaggaccaaactttttgacgatatataaagggttaatttcacaaatgcataaaaataaccaaaaaacaacaaaaacacggttttacgaaattttaaatatttttacgatttttttgattttatttacataaaat

SEQ ID NO: 307611 - DNA, 1312 bp, Cannabis indica
tttttttttttgagaaaaaagtacaattgatgcattagattcaaataataaattgtaaatttaaaaaagtgacataattatacataatattaagcaaactcatatccttttaaattaggttgagtaattttttcattagtaactaaattttatactgattgcagttcaaaaaaaaagaaaatttatagtaattgtgtcgtggtaggttcttacatatgttgtttaccaagttagcttcttctaagcaagcccttaccaacattgcaacctagtctctcctctttcttatctctgagttggtgaatgacttgctaatattgacataactgttttctccactgtaatcatctttagaatagctaataggtttggttccttgctagcaatcattacttatcttaaaatttatgtacaaaactaatataatttatctttcccaactagtatgtgacatcttcaagctctgattctgaagtagactctctggacaacctcccaaccaacaaaagttctttcgaagatcaattcttgacaaccatggctactgaggttgacaatttcatctctcatcagtttggtaagaacctctagctttcttactttatcatttttatttcttttaaaccttctcatacaaatatcattgtaatccttgaaattgataacataggctgtttattgagtttttaggaaaccagataaatttagatcaagaaataagaaataataaataataaataaatagatttttacgtggttcagacgttaatgatttttagttcacgagtccattttattaatcttttcgggcaaatgtttttgagattacaaagaggttacagtaaaagttaatctgcttcttttgctccacttgagagagagagagagagagctctcttggaatttttgctgagtgtctgtaagtaagcttgttctttttttttttcgcctgaagataaataaggttatttataggcgcacaaggggtaaaaggcataccctttaccctcctaggtgtcgtactccatacgttactaaggctagtactgctaaaggacgatctggctattggctggatgagaaccttcttcatcatgtggtgtatagctgttgtgaggactttcgtactattcaggacacacatcacgtaaaggtctctcctttgttaaatactctctaagcaggccgttaggcaaaaaacatactttagggtgcgtacgcgcactacctgttgggaatattttactaggatctatattttttaacaagtatgttttattaacatcttaaatatgaatatctttaatacgat

SEQ ID NO: 307612 - DNA, 1044 bp, Cannabis indica
atatagatatattaattagtgctaattaggaatcaattaattaacgaacattttcattatttgactttcaacaaaatcaatttatttgtctttgtttttattattctttttttttaaaattatatatagcctacaacttctaaatcacaataaaataattgatttatttacaatttaaattgtctaattctagtttcagatcatgtctggaacaactagtaattaacttataagaatgttttataattattggattaaagagagacaggtggtacgttctaattattcaacaaaataataataactaactaatatatttgttattaataataattttattttgtaaagaatatttatatatatatatgattgtgatctctttgagaagcttgtaataggtatttttaatttaattgtacttagatgttaattaattactctaaaagtcaaaattttgactgaaacacacaaggagaacatgcttcggcttaatttctggggattttgtggactatttacaagtcaaatcctaattttatgaattatttttttacatttaaaattatttttatacaatttttttggaatgactcactcaattttattatcattttctaataaaatatatataatcattttaattagtacacaaatgacattcttgtgatgtagctgttaaatatataaattaattactgttatttatacataaaataattaattaaagatagatagagataaaattaagaagaatgaggccaaaattgtgtcagacactaattaatgatattgtcagaaactgttgtttgtttcataaaaggaaagtaaataggaagccaaaacaaatcttaactctctgttttcatgattaaatatttaaattaatactaacattacttttaattttttattaattgaatatacatataaaatttgttatgtgtaaatttgaatcatcatggtcggctatatttaagttaagattattatatttaattacactataaaaatttaatataagagccctaatgtttttttgtaaac

SEQ ID NO: 307613 - DNA, 3467 bp, Cannabis indica
tttcgtaattttttgagactctcctgttgtagaatatcactcaaaaaaagatccttggtacgaacacctaccaatgtctgaaaatttctagacttaattgatctcaagaatttaccaaattctatgccaccaactagatttgagaaatatagatgcctcaacttttccaacttccacaatgaatttggtattattatatcaatctgaggcgatactctcaaagtctgtaggcatcttaaattcccaaaagaagatggaatcttttcaattcgccaattaggaatacttaataaccttagatggatcaaattcccaatttctgtaggcagtttagtttcatacctagcatcattctcatccatgatcaaaactctaagcatcaaaaagcgattgcatacatgactcaatactctttttctgtacataacatctatgactctccccttaccatgtacagaaagggacctaagagagccatctatatttcgagcttcatgaattaaatcataattagaactttcatgaacacatatggcaattcttctaatatttgtttctattggttcttcctctctattcgttctccagtcaataaaatgtagaaagttttcttcttgagctttagacacacacaaatctcgcatgagatcatgaatgcaaattgatttaatccttcctgttgaactcatttgttttacttgaatcatactcctctccaccaactcactcaaccaatcatatgccacatcctccaaagcttccacagaacctcttcttaacgatacaaaaccttctgctatgagtatatgacacaactcttttactcttatcgtgacatcttcagcataacgagccaaatacaaaaaacaaggcttcaactgaggtggtaactcactataacttaatcctaagaccgaagaaacactacaatattttgagtcatcatcatgttgtggattaccttgacctatgcagcgaattacattttctttcatcagctcccactgatataaggtgtgtttcttagaaagaagcccagcaagcacaatgatagctaatggcaaaccagagcactttttaagcatctccaccgctagttctttcttcctttcttcatcatcatcctcatttgagtctgaatttatccattgaaaatgcacaaaatgagttatgatttaagtaatggaacattatttatactcttacatactattgaattgtcactaatgctacatgtgttttttctatggatgaaaggagtaaattaatatgaaggaaataaaatattagaatattttatatggactgacataattacataattaagtgttatttacacagcatcgatatcaacaaaggtaaaaattaatattatgatgattaagttaataagagtgaagtatagtatattacttgatggatgcattccaatgtgggagtacttgttctgaaacagctcccaactctcctcttcattgaggaaatgaggttcatggatgaaaccgtgttgatccacatgcaaagccacaaccttattccgagtagcgagtaagatcctgctatgtgtgtctccttgagtagggaatgcatgctttagaagatcccatgttgttgtggtccatatatcgtcaagaaccaccaaacatttgttctgtttctgaaagttgtgaaccttccttgctaattcatcatcacttaagtttttgatgcgatttctttctgcatctatttgagaagtgaaaccagataaaattgtttccaagacatcgcgtctattacattgctgagatattgaggcccaagcataacaatcaaagtgagtcctgacttgaggatgctgatagacctttcttgcaagagtagtcttccccaaaccacccatcccatagacagaaatcaccttatgcttaagagtgtcctctttttcagtcaaaagggcaaccaaatcttggatatctttatcgaatccaacaataacattgtcttcaacatacgaataagctttcctcaactctttttgcttctggacatagcttgatgacgcttcaattgcattgcctaatgatctgtgtacgccaagtgcttctaattctgatgtccaagtatcaatactagatgagatcttctttatctttgatccaactttatacacatcaataatgccaacacaccatttcaatgcacgtctcatagttccatgattagaagaagaagccagtttgaagacataagtctcaataacatcctccaaggcataagcattttctctgacttggacaaccaaaaggcgaactctctcatcagcaccatttctaacccaagcatctgtatctttcaagaaagcactcatacattgaagcttgatttttgctttccccacttggccttagattccatgcaagaattcagcttcggaaatcaccaagtctccaagcctttcaatcacaaatgaaacaacagcatctgccatatgatgatcttgctctgtaaacaacagaattgaattgaattgtatgatatgatatgaactaacaacaaacagatcactcatttaagcatttctatccaagtggtgttgttggtattcaatcatggctgctgtttgagcctcaaatatctttgctttttgataatagtaattaattaatgaaagggaattctttctttcgcaattcattttccatatacaggtagcactttttctacatattaataaatattactaactgtaccaagaaaaatgcaaccaccacaattgactacacatatggataagattaagcttcaaacctgattaaaatatgaataagacacacatggacaaactcatttatggtacacctgtgtttcccagtaaacaaaaatctcataaaaaattattacagcaaaaatgagttcatgtctcagctctgttataatataagattcaattgctagaaataaatcatccactaaagcctcataatgttcttcttgatgagtactacaatgctcggatttctgatttcaacataatgtttcaagatattgatgaaaaattccaagttgaagtgaatattataggccaacttatagaattatatcaaaaccagcttgcaaatattacaacttttcaaaccaatcaacatctatgttagagttagagacttttctatgctttacatcatattctattttctttacaattgctcctattgtgtatacatttaaattccaaatagcctcatttccatacagttgccatagcagctgcaaaaacttgccttttatatttactttccttcaatttttcaaggaataatttcctaaacacacaaaaataataaaataattacagaaaatacggtttttgatgtatttttatcttctactctttattttgcggttaattttaaattatcattttttgtgttgttttctgttaatttcatgtggttttcttgtgattttataaaataccgtaaaaa

SEQ ID NO: 307614 - DNA, 1242 bp, Cannabis indica
taaaatgaaaattattaaaatatacatttataaaattttagagtacaaatattataaacgacatgtcgtttacagtatcatcattaaaaattctcgcgtgaggcggtggtgtggtattgtgagtgattagtttattcaataatctcacaatagtttttggtggcaagacggtaattaaggccaattaaaatttaatttaataataataataataataaagaagaggtatttaatatttatatataaagcatagagataagctagccaagctaactaacccaacccaaacccaaacccaattccacacttaaacgcctcagcttaaccttaacacctctctctctctctctctctcttcttcttcatcttcttcaatcaatggagaatcagagccagagcacatgcgagaagcttaacggaatggccaccatagtcggtgcctacgtggcatccgccttctttgcctcattggagcgttgttcttgcatcaacctttccaccaccgacgatcacgatgggatcgacggcagcgaagagagccacgatcgtccactcatgctctccgcttccagatctgttaatctcagtgatcaccgacctcaaaacgacgtcgttaacctccctgtctgatgatctgatcatcgattgaggtttttttccttctcggttttcttattatcatatatataatgcttgtaataatgatcaaagattgaaaaagaaccagaaaaaaaaaattaacgccaattgttttggtttaaggtattggtttgcttacatttttcttgattatggtgtgctttttctgagaattttcatttctactattatcgttaatttctttgattttggatttgtatattttcttggaccgccattaatcgaaatttgaaacctgaaaatcaaattgttgatttttctaaaaaaaagagatttcatataaagaatgttggcatttaatgaaggataattgtggcaaatttaatattttcagcattgtattattttaaaaaaataatgaaaaaaacgatatgaatcatattttaatttaataattaatctgtaactaatgaaaaatcattaatgtgtttgttggtaatggttgctaatatgctcaatatattacttagaccatctccaattacatttcaattttaaaaataaagctaatgttttttctgttttattttttttttctatattttttttcaattaaaaattaatagaattataattaccaaa

SEQ ID NO: 307615 - DNA, 2151 bp, Cannabis indica
accgcaccgcaccacactattttttgcggtgcggtttttgcgggtttttaatttcgcggtgcgggtgcgatttgggaaatttaaaaaaccgcatgtgcgggttggtttgaaaaaatagtcaaaaaccgcaccacccgcaccgcgaacacccctaggttttatatggtgatcaccttctttgtggttctcccacgtaaaccaatcccctttcacaggtaattctacaaggctatcgataaattgatcttttcctgttgaccccactctctcagaagtagtaagaaaaaaatttacatcacctaagatcatccaaggccatacaaatcgctcacctaccttccaacaccctccaaggcgagcaatttggaaggccttggaagatcttaggtgatgtgtgttttgttctcgatgcttttgagagagtgggtcaacagaaaaagatcattttctcgatggccttatagaattactggtgaaaggggattgttttacgtgggagaaccacaaagaaggagatcaccatataaaacaacggttgataaagggctggtaaatgaaggatggttttgattattcacttgagtggttttaaaatctctccatactagcaactcgaatcatagaccactctatttatttttggggtcttgagtttagaatcaagagactatttcaattcgaggcaaggtggataaaagatcaaataaacaaacttgttattgatcaatcctaaaattcttttaatcataactaggctctagctagattttgaagaaagagggggtggcatttgtgttagtttttatggtctaaatcagagtagaacgtaaaagtagattttatgaaaaatgttgggaatcaatgaatgactttacggtgcaagaatactggaccaacaaacacacaatcaagaataatactatcaaagaatcaccaaaactagataatagattaaagcagttaatcaaggagaaaataacaccaggtttaacgagttcaagccttgtgtaatgctctacatctcgattggaacatcaatacccatatctttattgatatcagtgtttacacgattacaataatcctttcaaacttttacagagattacaagatgaactttctctctctagtttagactctctcactttaaccttacacaatcacaattttctctaaagctttcaatggtctgatccttggattacaaaggtcataactgaatatagatttggatagttgctaaaataatctctgattctatcgtcgctacttaatgttgccttaaattctctaacttagcaccaccaacatattccacgtcagttttagaaaggcgctttcagtacggacaatctggaagagtcaatccggacgagactatttagatgaatataagcactcctgtaacaccctactaacttaggcgtgttatcgtgatttaaaatttattgtgcaacttgttgctaatcaacatgttttattagaaatcgtgtttaattaaaactttttttaattaacctttacttaatatacaataaactttacaaaagtcaggatcccgtattttaaaagttacaatcaaaatacaacatattaattataaaagttatcgcctcgcgaccattgaaaatatagcatgctgtcccaaagatcgtacgctctaggcctaactaccccgacatgtacatcttcatacactcaaactcacatttgttcaatcttagcttttcccttacctacacatgcaaacaataactgtgagtcgatagacgatatgctaccagtccaaccttctcaagaatctcgaaaggccctgtaaacctagggcataatttgtccttcttcccgaaacgtttaatccccttcattggagatactcgtaggaatacatgatctttaacatgaaactctacatttctgcgtttcagatctgcatagctcttttgcttactctcagaggcaagcattatggccttgatctttttgttgcctcattggtctgctgtactgattccagtcctaggtatttcctctctcccatttcatcccagtaaattggagacctacactgtctaccatacaacatctcatagggagtcatccctatagtactctaataactatttttgtatgaaaactctatcagtggta

SEQ ID NO: 307616 - DNA, 2690 bp, Cannabis indica
ctccctactttaagggattttgccgcaaataaccctaaatatataaataattaaaaaaaagtgggcttgatcaatcacataagattccttgacttaaatgttgtatttttcatgaatacgtctcctctagggtgacaaaaatgtctagatctatacttatcacatgaccatggtttatttcaccaattaagaattttaaaacataacacaaaacaaagaaacatttcttagaatcattatggctgaattcaaacttagtattagttacgtaaagtggtattgttctaattaataataataataagaagaagaaagtaattgatgccgaaaatagatttaaaatttacagtactgaaaataagtttaaagtattgtaaacacgcatagtaaattaaaatatcaatatctctgttgttgatatcgtaaattatttaaaaaagattaataatttataaacttaatgttgtaattataacaaaaatcgtcataaaatttaatatgtatgtttggaggttgtagcactcctctaaatgaaaatagaccatttattttataatattattgtatcatatttttcataaaatagtctcttgttgaaaataggagaagatgtcgagaattttagataaaatgtcactattttgttaaaaagaaaaaccacacaattattattgtgaaaatgattataaataaagaaagctattgtcaaacatcacaatagaaaactacaaataatgaaaatagtatttctctccaaaaatataccaatgactttttcttcctttttcaatctaataatgctactaggaatatttgattacaacccaaactaatataagatagtagtaggcatgatcaaaccttttttatgaaatgactttattgatagaaaagtaatattaaaatatgtacaatgctatttttttcttgttaaggtaaactaataaaggttaaataacaaagataataaccttacgcgaaaaagtagagaatttattttcatttataaaaattaattgtttatcctaagagcatgtaaagatactctaaaaaaactaataataaaaacttaattaaatttgacataataaaacacttataacacaattaaattgtgtatatagtaccaaattcttatgttataattacaccataataaatataatgcttgtcattgctaataatctgatatataattatttctcacctctgaagtaatatcgttataaagttgtgtcccataactagtggcggagctagccacacttcttagtagaggcaaaaaaaaaagttttttttagttgaaaaatataattttaatggggataaaaataaaattatgtgaaaataaaataataaaaaaaaaagtaaaattatgtagaataaaaataaaagtaagttggataatataaaaaatataaaatttatagaaataaaaataaaaatatgtaagggtataaatgaaaatataaattttgtcggggtaatataaaatattcaaaaatttaatttataaaaattgaaggaggcaaatgaccccacaagctataaaattatcactatcaaattcttcctccttaattttagacaaaagaacataatttggtagttataatagttcaaaaaaaaaattaaaaacaacctaaaaaaattcgacaactcaattattagatattaataagagggaaaaaactcatttaataaaatagatttaaacttacttttcataaatatagacatgcttgaaattgagttaatttattattttttttttctttctataggacatactcatattagagacaattttcctatttacattagttgtatttaaatataaatcttctctattttttttagtgtttctcttaagtaacaataactatatttacatagggctcattttaatataattttatttaaaaaatttatttttaaattaaaattttgtcacatgccaagaagcttcactcaatttaataaaaattccaacctgtggataaagataagataatagcatatacaaaagaatgttcttcaacaaaacaacaaacataaaaaaaaaataagaaaaacttgccataaatgcaaaatcataggcagtacaacatcaaccaaccaaaagaaacaatatttaggcaaaaatatactcttgtggcacaaagaaaatatcccttagttttatattgttaaaatatagaagtataacatcatatataagatagtgatttttttttttattgtcaggccggattttagactaatgtgggctaggctcgcgtttagggtccacccatcttaaggacctaaataaaaaaaaactcttttaaaaaatatatacatatttttttaataatttttaaaaataacatttattcttataataggggtttactttttttcctatagtctatttcaactgatcagggtcttgttcattgtcaattagttttgagatagaaccccatacactttcatgttaaataataacatggtgttagagccaaacaaaactttaacgagtatctgattcaaattcaattactatacaaaaaagatgagccaaaactagccattatcttgaaggggatgttatagtcctatattgctaggtgtagaaatataacactatatatattgtgcatgaactacttttctcattgtcaattggttttgagatgaaatctcat

SEQ ID NO: 307617 - DNA, 1232 bp, Cannabis indica
cattttttttgcggtgcgggcggtttgagcggtttgaacggtttgatgtacacccctaaagagcatgatattcaaactctgtgctcgatcatgctacaacagtttgcttctttaaacaccagcttattagataaccaccaaggaaaatgcaataactagaggtagactttctatcatcatagcatccagcgcagtcagcatcagtgaaaccctacaaaattaagtcaatgagcaactttgaatgttaacccttgtccaatgtgccagctagataaatgaggatgcgtttccaagcactccatttatcaaaagttggagattgcatgaactggctcaacttattgaatgggaaggcaatgtctggtctagacattgtgagatattgcgatgctccaatcacacttttgtaggtggtggggtcttgcattggggtgcctactttagatgacaatttttttgtggcgcacataggtgtagtttgactcttggaatctagtaactgagtgtttttcagcaaatcccttgcatatttttgttgagtaagagtgatagagtctttggatagatgaacttcaaagcctaagaagtaactgatagaccctaacactttaagagcaaactaatcatgcaaggtggtgatgacatgttgtatgtgattcatgttttctcatgtgatgagtatatcatcaacatacacaaggagaagaagaagctttccattatttcttgtgaaaaataagcgggtatctgatttgttgttttgaaagccccactgaattagacaagttttgagcttatcaaacaaagctcgaggggcttatcttaagccacagatagcctttttgagcttggaaacatggtgtggatagtatggattaataaatcactgtggttgatacatgtagacatcctccttaagatcaccattcaaaaaggcattattaatgtcaactttaatgtcccatccatatgttgctgccaaagtgaaaatgattcgaatggtgcaaggattgatcagtggactgtatgtctcaaaaaaatcaattccagggagctactaaaatccctttgccacaagcctggccttgtgcttgtctactgacccatctgaattatacttaattttgtaaacccatttgttgtgaacaatggtcatatttgaggtggggggaaccaagactgtcagtagtcccgtgatccgtaaggggaaataccgggtaagctgtacaatc

SEQ ID NO: 307618 - DNA, 1325 bp, Cannabis indica
atctaacttgacgtttacaaataaaaacttttctatcaaaatccaagtcttgtttttgtcaagcccaatctcttcaacataagatcttggttcataatcatcactaagtcttgtggggccttatcccctgccaatcagtaactttgaatatttgtttgcccacaaacgtctctttggcaaccctcagttggttaacatgcaccaaactctataaaattccaagccattggtccatcctttcagccaattcatattgcatggttgtacgtggaactgttaattcactaaaaaaacttgctacttttagtgacaactttttaatcacaacataatttttttgtgactaaatgtgacttttagtcacaacaaaatatcacttgtgactaaaacataatatttagtttcaagtcactaatttattagtttcagccacaacaagtagtcacaacaagtattgtgactaaaaatacacatttagtcacaataaattgtaatttttgtgactaatacctttagccacagacattttagtcacaacataggaataataatttataattaatcacaattttttacacttttagtctacaagttttattgtgtactaaagtaaaattttttttgtaatggttaggtgctagaaatgccaatttacttacagtagctattgagtacatcaacacaaaattcttaaccattatctgttctaagctttctaattttcttgacaattaattgattttcaactagagtagttctccagctatcgttttattcttgacacttaataatataaaccaatatggagtaatcatcattcaaagattaagatataatacaaaatgcccttggttttataatgtgtgtaccctagtacaaaatttgactcttgttgatttgcctaaaatgcacagtactgcccaaaaaactccaaatcctgaatcacatcatcttcagatagtcatttcttggtgagaacttcttgtatcctaagcccatcaactatgatcaccaataatatgggttaatacaacaaaaaactatacaatcaacgcaagttttaataaagtcaataaaaagtaaatgtactaaataaaaagtctaacaacctattgctgagtttggcagcctttgacactgctaaagcaatgttattcgtggtgaaagttttcttgcaaaacataaacactattcgtgaaacgcccctttatgattaccattgacccttcgataattttcgagagagcatttctattaggcaattttatggtacctaacactatactgatatgacgcattatagcaatttttttatattatttatt

SEQ ID NO: 307619 - DNA, 682 bp, Cannabis indica
atcctggtaaaatatatttccaacacagtccaccccaaccacttcttaatcttcttcaaacaaatttagctatacaggtaggagaagaaaagatggctaatatcttcaacataattgtcacaaattaaactatttggagactcaataactctaaactggaaccatctttggcaagtcttcaatctaataagtttagctaaccataacataaaagaatacttgagaatattcaacttgttccacacaagtttaggccaaaaaagatgggttgaatcagtggtctcaaccaaattataatggagacacttttagcgatggatatattcacagataagttatagcctctatatcataaaattatgtcatgtatatatatattttgaaaaattagtgaattttttttttactcaaatcaacgatttatacaccaaataaactatcaaagaggtaccatataataactcaaagtctcaaaccaatctttgtcacttatatacttatttttctttcaaaatcaggaaacctattacaaacctcccctttaattctcctaactattgtatttatagtatacactttggtgtcgtttggtaatatttttatattttctaattttctaatcacaaaatgaaagtaaaatttttgtttttaaaaattttgtttttgaaaaacaaaaatgcgt

SEQ ID NO: 307620 - DNA, 1218 bp, Cannabis indica
  modified_base (6)..(6): a, c, t, g, unknown or other
ctatanatcataatcataaagatgacttgaggttctttttttgccatataagagaacacctacaacatattaatatcaaaatatatacttaataatttattaagaaattatatattagaaatatattttgaagtatatttatgaggtaataaaactcaacggtaaaatcctgatcatggtcaaaaaaatgtcaccattatatattccaatttttttcatagcccaataaaatacatatatgtattataaacacaataagatacatgtatagtaggatactttagtagtttcttattaagaaaatttgttaaaataaatatttactaattcatgatatgtaaaggttcattagagaataatttttttgttgataaaagtaatgtagtaaaatgaacttgttaaagatcaaagaaatgtgttgccatttgttgagtatagacataagagtagtcgaaattaatgaggaacacgatgacacaaactgatcatgtaatcttacaaaccaaaatgatcatgaaaaactagactaaaccatgaattaagattttctaataaaagatggtattctataatgtattaaactaatataattgtgacacattaattaatttaaatatcttaaagaagataaaaaccgtttatatgattaatggaatctaaaaaaaatagttagttgagttatcacacttaaattaacacctatttttaacatatcatcttaattcgactcaccatacttgtcttgcaaataaaaataggttaaataaccatactgtacaaaccaaattaaccatactagccacacccacccaagacaaacggagaccataaaacgatacttgaagtacgtaatgtgtacacaacaataatttcttaataatcattatatatttaaaaaatattttatattaatttttttaaaataatactattgccatattgtatttttgaacttgcaattatgtaataattcactaacataatgtaaaacttcttatttttttgaaattgaacatagaaatatatattagtaaaacaataaaattacttgactatatatatacatataacaaggaaacaaattgcatgtgcgactgtattttgtttagttttaattaaatcataaaactatatcatatttccaatttttatattttttgatgtatcttttttttttagtacgagtaactatatttttactaattttttttttaaatt

SEQ ID NO: 307621 - DNA, 1002 bp, Cannabis indica
ttttacatagcctaataatacaactcaatatcaaatatattattatattaaataatattaatataataaaatacaataagctgtactaatgagcccttaaatgtggaagtaagagcccttaaatacaataaaatactaagttgcaatgactaatgagatagaaaagatgaaagcaactgaaaaatgattaactatcatctttgactatgttttctaaacatactttttagctaaaataggaagggaccacacttaaataaaaacgaaaattttcaaaaatactttgttttatttattatttataattttacgacttaaaattttaattacaaaaatatgcttgtaaaatttaaaattaaaaaatacactttacttagcaaaaaataaaaacaactataaataaaatataaaataattaaaaaaaaagtttattatttttattaaaaatatatttttgtaaataaaaaagtccagagaataaaataaaaatttgatgtatttttgtaatttttttttaaaatttttggtgtaaaatttttttgaaaaaaattaaatttaaccatacaaatagtaaatctaaataataaaaaacagatagaaaatttcctagagctccctactttatttttcctaaaaaattctatatattatttatcaaaaatattattactcttacattattttattagatcaagtcatcaagatatatttaataaattcaaaatttgtaaatttatttttttagtgaatactaactaaaataggagtaagattggaatacgattaacaaaaatcggtctcttttttaaattttcagcaattttagccaaaaatttaattaaaaagaaaaaactggacaaggacactattctaaggaagggagaattatgcaaatttgtcctattaggcttttttttttttttttgtataaaagtcctattagtatttgtaacaaacttaccttcatttttttctagcaaaaaaaaaaaaccttaaccttca

SEQ ID NO: 307622 - DNA, 1878 bp, Cannabis indica
catgggatactactccataagtacacaagaatttatcctatttaacattatatataattaatatattaaccaaattggtgtagtcaaacattaattaaaaatctaagctcgtgtgttagggttgtctctcttttattatttgtgtgacatagacaactgtcacttaaaatgttgatctcctcaactcatgaatattagacaacctcaaggttattatgagtacttttgtttttacataatcacacataatgtagtttacatttttttttattttttattatttgatgaattgatcgagaaatgggaaatgttttggtgaaaatgaaaatattgtggtatatggtactaaattaatgttggtgggtgggggaatgttttttcatgcatatggtttgttattctttttgttgaaaagaaaagaaaagaagatagagcatcattgagtttattgagttgagtgtgcaaatgcatatatatatatatatatcttgaactaataaacgcatatatgtacgcatatataattaactacacaaatatcaacctactatatgtgagagctttggtcctaattcactaattcatatttatatcatgtatactttgcgatgatggatagatagtgttagataaagttgttatgtaaataaagtttgttaattttctaatctcttttgtgatttctccccagaggtattcttgggagttttttgtagttgaccattttaattacaagttgttctgaacacattttctagagtgtccactaaattagtgtactcggtaaattttggttcatactctttccttagctttttcaaagcttcacaatggttctggttcctcccgcccctcttaatttgggaatggctcacattttgttctagaacttctgtttgttgcttcgattgaccaagaacaatattgagtttggtttgtgccgctccatactcataaaaatgggtttagataagtgcctgcacaaatgcagaagatccatagacaaccaaagaatattgagttttgggaataggaacttgtggggtgaagcctaaggtagacacgaaagcgaaaggagatggacctagagggactccaaatgcttgtaggaaagtgtcttctagatcggcgatgccttgagctctggacataaactcggacaaattctaagctctttttctttgcatctctccccataacaaggaaccgattgtgagttcggattgtaggactatgagtttcatgttgtcgctaaacattgtcttgggtactacctccattatccgttggatgaagttcttcaggctttcccctgcttgctactttacattactgattgacccaacttccatgtcataatcccggacagctatgaactgtttctaaaaagtaaattgcaactctttccaactgtaaattgatcagggagataacctcttccaccaatcctcaacggatttggtaagagttaaggaaaagtacaaacacttggcatcatcacttactcttgccacctgcatcatcttgttatattttgacaggtgggttttagagtctgtacgatcatcgtacaattcgatctgtggcatcttgaaattcttcaggagtggggctttcgcaatcctcttgacacaaagttacgggtcttcgtcttctaaatctgtgagggccccactctacttctgaaaaaatttggtcaaagcaacaattttctcttctaacctctttgggtcactatctagaaggttgcgtccgcgagccttatcattcaaatagttcctaaggtcatttctttgtagccttgccttttctcctttagctttttcgtacttagcgttaaaatgccttcggaggtccacggtggaccaactatcatca

SEQ ID NO: 307623 - DNA, 2074 bp, Cannabis indica
taaaaaaaaaacaaaatattcataaatagaagcacaagaaaacattcttttgctgttatcaccagtttttgatactggggtcattcagaattagttttaattctatgtaaggtttctatggtcaatggttttatatttcagtaggtttgtttttggtatgggttgtatttgttattctcttttatcttagttagaataatttgtaatttgtcacatgctcattcggaataaaaatctagtatttttcacattgttttgatatttcataattggttgcttaataagtcatgaagatgttatacaatttttgtcttattttatataaatggcttgattaatctatttttgttgattctactgtgtgagcataatctacatgtaatagattacgttcaacttacctattaatgaaaattctatttttttttcaaaaaaataaaataaaaagtacaaactaaactaaactgaaaaggtttacatttattatatcgttgatagatgtaaattagtgaagagaaacataaagattttttatatattaaagtgtttactattgggaaagtattttatatattatttttaactcttttctttttttaaatttacagtttaagttgtatcgattacttcggtagtttttatatgaattgttacgtgaattttaattacaatttaaattgcaatgtctattgataaataggtttctatgtattatttttaaaaataaaaaaaaaaaaaaaaaaaaaacattttaaaatataaaaatgaaggtggttgttatagttataggtgtcactatgttttaacattttccttaagaaaatctcgagtactttttcccctaataacaaaggacaactctcctgtttattgttctgttcctctttccccacacagtatgaataatatatcttaatactattattcactatgttacagcctttaatgataagtatttaattttaattatacaaaccataatatttgttcttctttttctttcatttgtttatttttaaaaaaagaatttattctgtgggatgtatatgacgaaattgatgtcattcaaaagttaaaagagagaacaaaactgtcagctgatgataagggggagaaagattttttaattttaaatgaaaaaaattattaactttaaagaggtgggagacactcttttgttaatttaaatttaatttttcacaaaattattatatggggagagtggaaatatttgaagtcaataaagatatttgttcatgttggtaatggtgccccatatttctaatgtgtttatgtgttaaattttgtaatattctatttttgggaaacaaacaagatgtgtacatataaaatatccaattatttgtgttttgcttcattttgaatcaagaatattatgcctattttcttttggagacaaactttcctatatatgctattaatttgttcatatagttcaataaacacaagaattatttaacacactaaaaaggtttttaatatttccttgattaattatatgattaaaatttaaaggattccagttggccatagagataattagacaagggattttttctataataaactgaaaatggaaaaaatttacatttatgacctacatagagaaaataaacaaaaatagaaactaaaagttgttatttacaaaaatacctgcaaaaaaaaaaaacagaggggatcctccttcttcgtgacccagctgtagaaccccaacaaccattttcaaccattttcattccaaaactaggaaaatcatatctaaaaaaaatgtagatctcaaagaaaaactactcagatcccgaaaatccaaatacaaaaagggaaaaaaatttatccaacctccattgttgtacaaaaaaaaaaaaaaaactacaaaacaacattcagtcaaaagcccaacgcgttcagaggagaagaatcgaagagaaggagatctgtaatctggaaattttggtacagagcaatgggcattgggatgacaacaactcagcacaggcagatttgcagcaatctggaaacaacccggcaacaacttccaagcaacaactatctg

SEQ ID NO: 307624 - DNA, 2732 bp, Cannabis indica
ccggtttcactttactgctttctgtggatcccccgaatcacatcaaagaattcttacctggaatcttttaaaaagttttgcttcttctactgcttctgagccttggttaataatggatgattttaatgaacttttatcaaatgatgacaaggatggtggccctttgcgaagagaaactttgatggaggattttaggcaaactgttgactactgtaatctgactccattggccttttcgggagacaagtttacttggactaatagacatttcaatggggtactcatcaaggaacgattggatcgtggatttattaatgaaaaatggaaggaatttttttcagagaatcctttattgcaccttgactattttagttcagaccaccgtgctattgaattttctgtttcttctctccaccaagagcagcaggttcgacaacaccatagcagattttgttttgagcagttctggttaaccgaccctgattgtcgtgaggtgattctcaatatctggatagctggaacatgttctttaccaaacttgttgcaaaatatctcagcttgttcttctgcccttcaacaatggcatcatgataaatatggtcagatgaaaagggatattaatcttgctcaatcaacggctgcttctttacacaatagcatggataattcccctgctcacacggcccaaattcttaatgcagagaaaattttagatgatttattggagaaagaagaattatattggcatcaaagagctagaattgattggttaaaaagtggtgattccaatactaaatttttccattctagagccaagaccagatacaaaaaataataagattaaatctcttatttctggtgatggtagagtccttcatactgaagccgagtttgctactgaagctgcctcctacttctcaaatctgttcactacagcgggtgtcgataatgaagcctttactattactctttcagcaatcactccctccattacagctgagatgaatttgatgttgacggctggttttactcaatctgatgttgatgaagctcttcattcgatggctcccgacaaatctcccggtattgatggcatgtctgccatgttttttcagcgccattgggatgttgttggctcccaagttttggattgtgttctccaaattttaacaatggtgtggatattgctgaaataaactctgctctcatcactcttattcctaaagtggatcaacctcaacagatgggtgactaccgacctattagtttatgttccgttctttataaactggtgtccaaggccattgtcaatcggtttaaaagggtgttaccagctgctatttctcaaaaccagagtgcatttctgccgggtcggctaattacagataacgttctcctcgcctttgaacttgttcattgccttaaaaataagaaaagaggaagacaaagttatgctgctctcaagcttgatatgagcaaggcttttgatcgggtggaatggatttttttgcaagaagtgatgctcaaaatgggttttgataacaattgggtggaacttattatgcggtgtgtatcatcatcttcactttctttcaacatcaatggggctgtgcaaggctcggttagtcctcagagaggcctacgccaaggtgatccattatcgccttaccttctcttgatttgttctgagggactttcggctttattgcaaatggaggagcgcttaggcaatctgaaaggtttatccatatcacgtggtgccccatcggttactcatctcttgtttgccaatgatagcttattattttgtcaagctaatgattcctcttgtcaagctatcagtcgtgttttagatgtgtatcaccgtgcttctggtcagcttctcaacactgacaaaacagttatgtcattttctccaaatgctagtgcgaatttgaaggcaagatttaataatgtgttgggtatgccgctttgtgatcttcatgaaaagtacctaggcctaccctcttatgctggtagagggaaatctgaactttttagtaatatcaaagactgaatctggaagcttttgaactcttggcatgcaaagcttttctccataggtggtcgggaagttctactcaaagcagtggtgcaatctattcccacatatgcaatgagttgtttcagcttacccaagaaattctgcaaacaacttgaagctatgatggcaaacttttggtggggttctagcacaaacaaatccaaaattcattggaagaaatggagcatgttatgtcaatctaaagaagaaggtggcatgggttttcgatctttcctccacttcaatcaagctctccttgctaaacaggcttggagaattttagaggatccccactctcttttggcccgagttctaaaagctcgctatttcaaaaatggcgatttccttaacgcttcaaagggcactcttccgtctcttacatggcagagtatatgtgatggccgaaaccttcttgtaaaaggacttcgttggaagattagtattggaaataaggttaaatgcgctacggatccttggttaccgggtaacactactttcctcccatatacctatcaagctgatcctctctttactgtccaacactatatcaccagtgaccgccaatgggatataaatcttctccaacagcactttggtcaaatcgacattgatcgcattctttctatttcgattagccctaatccaagag

SEQ ID NO: 307625 - DNA, 1204 bp, Cannabis indica
gaggaaattataatttttataggtttttatattttttataaataaatatgtattttttttttcttttaaaaaggttattgtatgggaaaattggataagggtaattaagtacccttatggtaagctgagggataactaattaccataaaaggtaaccagttactttatgctgtttttttaaaaaaaattctcaagaaaaaaatcatatatttttttttacaaatttatactttaaaaattataaaaatgcacgagttgaaaaataattacgtacccgagtttgagagtagtatctgatgagtcaaaatgattttgattttgactttgagtttgaggttgattgaatatatgactattagttgaggttgagtcaattaagcatttctctaatgcatctccaacttttaccacattactcttctgccatagaatatttaattttaatcctctataccattattaatatatatatatataattataaagagaaatgataaagacactcgtggtgcctagcatcctcctacgtgtcaatatacatcgttattggtctaatttagtatcgggtctcatatagtttaatataataacttttaggaagtattgctagccaatcgtgaaacgacacgtcttaagagtgttatgcactactggtgactaatagcaatgctcaattataaaatatcacattaattaatttaatacacaaatatcaaattaactatcacctgttgtactcgctggttatcttctagtagctcaattcccttcacatataattaataaaaattaattaattaatggccacaccaagaaaaataaaataaaaagtatgtgatttccacaatgatcatagtattattaacactctctaatatatttaaaataatgtgattccattgaaatatttgagaaatatcctatcaaattttcatcttcacattcacatgcataataaatcttactatatatatataaattctttttagtaaaattcagacctataataaataaaccagttaataagttgaccatttttgtgaacaataaattagaatagaagcaaagtaagaagatatcttcatttgatatctcattcattctaacttgtagaaatatctatcaaattaagcatgtttgataggcaaacatataaatatatatatatataaacactaagtatatagtaaaaaatataataaat

SEQ ID NO: 307626 - DNA, 1530 bp, Cannabis indica
gttataatgacattaccagaaagaactgatcaagatcatggacatcgactttttcattactcttcaacatcttaatctaaagacctcttaaacttcacactttgtattcggacctttattttgatttttctttttgttacgtacatgtgacatgtactcaatttcctaagttcttcgtactaattttagactaaagacccttcattaaatttagtgatatgataatacagagtgtctatgaaagattactttttttttttaattactatcctctgttcaataataatctcaattctatagtcatatcaacctttcccaaataatatttattccaaaaaaaataaggttttaatttaggtcattactccctaatttttgtgttaaaccaacactaatatagtataattgtagcatttgtccatttaattttgacatgtattaaattaattttagttattatatagcttcattgactaatgtggtcagtacttgttttctcaaaacgatattcaaatggttgaaacttgaatctaataataagtgtaatattggtgtgtcaatggtgatatgttggcactcatctcgtgatcctctggttttggtgcctgtgcactgttgttcaactcgatccgattttggatccaaattcatcttctgccccatgactactactcgagaactaatgccaacatgccgggggcattggcaggtaaagtggtgacgattgaacttgaggaatccaaaccagttacctggaagaagtggattcgggttttggtagaagtggacgtcaacagacctctttgttgcggttgcttcttcaagaccataaatggagacaataagtggattcaattaaaatatgagaagccgggagttttttgcttcaaatgtggattgctaggtcaccagtgtagagattgcacgctgttttctcctgtaacggttctaaatgagaagggagttcccttcccacttttcggaccatggctcacccccctctttaaatacgattgttgcttctctgttaatcgtactggtgtagcttgtgagaggattaaggagaagagtaccagggatatggttgtaagtagtggttccgttggacgtgagctcggatgtggtgcgatggtagtgtgccaggcgaaattgccgattccacttctggagaaaggtgtgattcctccggccatgggagcgggtccgttaacccgtgttgaagcctcgagatctatgcgtcactggtcttcgaggggacagagagaaggtctagtacgatcagcgtggcgtccgaaggcggctagcgacgagattgtgactgttcctcatttgggtgtccattccctttcacccaagctgaatattggaaagccttctgaaacttttcctttaaaagcgaccattttgaatttggttgggattgacgaggctaacgttgaggataggttgaggtgtcaaaagaatagggtcaatcggttcacccctactgttgaccacgtggcatgtgagaaagaggggtcggtccattta

SEQ ID NO: 307627 - DNA, 3653 bp, Cannabis indica
aaataaaataaaaataaaaaggtgcatctacaatacaccttaataaaacgggtgcattagtgcattctgtttttttttttgaaagggcattagtgcattcttaactgtttcccacatttaaaagaattttttagtcccctttttcgtcgcgtatgttataattatttaagacatttaacaaaattttaaaaaatccagaataatttacaatataaaatttaatgttcaaaccatttattttacactcgtataaaataaaaaatgagcttttttacttttacacttcaaattattttttattttttgtatttttacggaattctactttgaaactcctatatcaacttaaatcgcaaccaaaatttatataataactcacataaaaactaacagagcaactaaaaccgtaaatactaaaagaaaaaaaaaggggctaaaaatagtatatggaataatttctcaataaaaaattgacaggtataacaaactctttgaactctatttttgacgtgttaaatttttttcgaatttttcaaaaatttcgaactaaatttttcttttaaatactgaaagagataaggatgcataagtgctcctctttacataatagaatttaaaaagaaaatgtgaaattttcaaaaaatattaccccaattttattggacacgtgtcacccttttctttgccttcttcttgagatgtcatttacaccattgttgtaggaagaaatcctctccactctctccacctagcaaagccctaaatatatatcaatcctttgaacttatagctttcgttctctctttctggttcatcaaacataaactttgtaagaatctaccttaatttctttccattttatatgctcaaatttacattcgaaatccatttacttataataaatgttgttaatttcattaaaccaaactattccaaagttgaccattactcagatttctttatagtatattatgattttttttttatgtatgttcaataaaatcatcagccatcccataatgcaaaatttcaatatttttgatgcatcttttattgttctttgttttcatgaaatttgaacttgtatttatttacatatgtgagatatgttcagagaacattgtctcacatggattaaacgtaaaagtattgagtcatattgatcatcaattgattttgagatggaattcgatgattaacattcaaattaatctttaccgattttttttttatttatttggttatgtttttgtcttgaatttagtagacaataaacatatgagtaagattgttttcttggtgggattcatatttatttatccttgttggaaagaaaatgaattagtattaaccatgttcttagtattagagaaatggtacttccattcattgaatttggtcttcatgatatttatatttgttgttatctcttacagtttataacatggcgaaaaagagggttcaaatggcaccatccatggctgatgatgacagaatttcgaaactacctgatgcactgatcacccacatcttatcttttctcccaactaaagaagttgttcaaacatgccttctttcaaagcgttggaaactcatttggtattccgttcccacgctccttttctataactatgatatggatgatcttgaaaagttgtacaattttatcaataaatatttgaaacgccgcaagaaaggtatgaaatttattgctgattcaggcgtaactagttttgtgcttcgtatgaacggaacatgtaaaagaagtaaaactcgccttttaggtaaatggttagcttttgctgttgagaaaaagatcaaggaaataaaacttaagctgagtttagatttaatgccacatgattgggatagtatctactactgcttacctaaaatattattagtcaatgcaagatatttgactatattggaattggaagggataatgttggatacattttatccatttaattttccatctttaaaaagtttgtcactgagatttgtttatcattcatctactgcaacagatgatggggtatttaagtttttgttgggttccccttctcttgagaaattgtgtttagatgaatatgatttcttaaggattaatgatcaaatccaattacaaagtttaagtctcaaatttctggaacttatatatttagagttagaccgtcttgaattacatgttcaagttgaagccataaatcttgagtctttggtactatgtggtgttgctttgcatgaaatagatctctcatcttgcaagaaaattagaaatatctcattagaggaatgtacagaagatgagcagtcatcattacaagctcttatctctaataatcctcttcttgagaatttgactttgaggtactgcctaatgtataattcaaagcatcttaacatctcaagccaacacttgaaaagtttcgattttacacattttcggtgtgatgaagatgaaatgattagtgctgttacaattgaatcagctccaaaattaacatcatttcattatgatggtgatattgatctaagcatatcaataaaatcacataacttgttgaatgggaaaattgttattttagaggagcaagaggttgactatgacacaaggtttcccaatatgatgaaatttctttcaaagctcaattgctcttggaatattataactctacatgtctgcaaagatgaggtattttgctttatttttatttgttttcattgctttatttcaagttagtattattaatctacatattgtatattagttgatatgtttatatgtttgcatgaaggctcttatattgccaaaaaatgtgaaaaagatggacatgtctcccttgattagttggaagcatctcagagtaattattaatgaatatgatcccgaaagattgtcagatttgaagaattcattgttgtggatttcgccatctttagaaacattatctattaacggaaatgtgatattttagtttgcttaatagtattgtaactgctgattatgagtagggatgattgtttttgtctcttttctttttgctaagtggtactttgaggttgttattttgcatgagaattaaagctcataatttaaagttaagaatgggcatatcttggaatattatttgatttatgatctcttttcttggctcctctctgccattgcatattgtttgtctaagtatttggttatttcaataataatcatagagaagagaatataaactattgatttatatgcatgagtacatatttcacaaatgccttgtttatattttggttgaaaaatgcatttgttttaacactgaaaagtataagtataataatggtaacttaaagtaacttggcacattgtaatttgtaaatgtaacaaagttaacaatattcctacgacactaccaaattataattaattataataagagcaatactcaagagaaactagaaattacaactcaaaaaagtctaaataattagaaaaaatgaagcatttttacatgaattcactatatgtacacctccttcaatcatgataattgattgtttaaccaaatgatatgtttggccaaatcgaagactacaaacacaaggttgtgaattatcattttgacaaaaactaattcgagaaaattacatcttatact

SEQ ID NO: 307628 - DNA, 884 bp, Cannabis indica
ttttttaaaaaaatagtaaaaattaatataccatgtaaattttccttaattagagtgctctttttacacactctaataaagctttgtcttaaaactcacgttgaaagcctttaaaagctatatgtattttttttttcaaaataattatttgtaataaattaaaattaaattattttataatttatacgtatattataataaattgtaaattaatgaaatacataacatatatatataccagacatgcatggtagtttcatatgtgatcaataattattttaacatatctttcccgtacgtaggaatataatatatatacaagtatatataataaatataaataatgatcacttacaaaacaacgtcgaaatcaattacgtaaactcgttgtttgtattaagcaacatgcatgacatgcatgcatatatagacaacgtttttctacaagaaaaaaataaactaatactgatacatattaagtcaactatatatttttaaaatttaatatcaacattgacccagacaaatattagcgtacgtacgtacaagtacatttatatttggaataatctctacttgacttaattaagtaatgtacacatgatacacatatattttatttatttatattattattattttcttaataagtaaaagatataaaatattggaaaaatttatgcttgatatataaataagtcttcaacattgaaaattgactgtaattgttcttaggtctcgtttgtcatttcttaagtctgttagtttatttttctaactgatccgtttaatacgaataatatgccaagtgtaaatttttttattaatccagatcataattataataaaaaataatttaaaataataaaaaaaactaaaaaaaa

SEQ ID NO: 307629 - DNA, 1979 bp, Cannabis indica
acttttttttattcaaacaatttaaaacttatttaaatttattttcatttcttaaacaaaaggcctatttataaaattttggtccttgaccccataaaaactaaagacagttctactgtagtgtacacgcactgatcaaaaacagtgcactgatgaggaaatattggtggttgggaaatgtggagaagaatagattcttagcccttaaagcttgggatcagatttgtcaaccgaaagtttcgggtgggctggggttaaggaagtgtgaagatatgaataaagcactaatgtctaagcttgcgtggagtcttgctactgataaggagaagttttgggtttcctgcttactgaagaaatactgtaagtttgaagatttctggtgcgtgaaacagaaaagtaacgattcgtatcaaatggaaaagcattctccaatcaagagacacgatcctcagaggctcgatctcagttgctgcctcggtcttggggggagaggtttacaccatcaaaaccttggcagatgtttccattgatcattgctggaatggggagattattttacagatttttggtttgagttgggaaatcgaatcctcaatatcccaaggattccttctcccttcaaagatcagattttttggaaaaatgatagacatggaatgttttcagtcaaatcaacttatcttgtgcaggatctttggaagtttggcccttctaaggacctttggaaatggatttgggatgctggtatccacccaagagtttcaattatgctatggcgagttttgaatgaggctatcccaactaaaaatagacttcatttcttaactgataaaacttgtttattctgtgatgtcgaagaggaatcgagactgcatcttttctgtaagtgtatttactcgaagtccctctggtttggtggaaagttccctatcaaaactgaaggtatcccaggaagtaatttgttatgctgggtggaaaatgtgatatcccttttgtcaattgaagcaagcaggaatgaggtgcttacatatattggctgccttttctctgaaatatggcaccaaagaaatgctttgtttatacacagcattcctgtcaatcccatgtctgctttggttaaaattgacaagtgtttccaggatcttcaaaacaagaattctcctgctactgatgccatccaggagcttcttgtgtcacaaggaggtcccgtttctgccttgtctccgtttccccttgtcgaccaggtgaattttgtgctttttacagatgcttcgtgggtgaatggcactgctggaatagcagcaattgcagttaaccggctctcgggttgctggtttgtcaaagctcagaatattaaggttaactcagctcttgaagctgaatttagagctatcaatttagctttgaactgggctgttgaaaatgactggaaagaagttgtcatcttgtctgattcgaagatagcagtcgactccctaactgctagtaagaaggcccctgattggaagttatcaagtttattttactgtattttcaatgtaatgaaagacctttctgttgttcgctttttctttattagtcgtaattttaattcctttacggatggtgtagctaaaaccgctagaacttctagtgagatggctgttttgtatcaaggggaagaaaatccccctgtgattcccatcaattttcttaactaatgaacaagtagttctttcaaaaaaagatcaaaaacagtttaagcagtttgtatattatcatattaggtccaacttggagttggtgggcaacattaattgatcactcgtgggttaacttaactcagggccgaccctgaaacaaagtgggccatagggaaatttttttttgggcccttacgttagaaaaaatgtgatatttttcaaaatcggtaagaaaaatgtataattttaaaagaggaaaaaaaaatttgggcccctgggctgggtgggccctaggca

SEQ ID NO: 307630 - DNA, 586 bp, Cannabis indica
ttatctattttcataattagtttctaaaaatctcggtaaatatttttgtgctttcattaagagctgaagaaagaactaccagagttgtcatttacaacaatggttgcaacacacaaagtagtagtcaaaccgtctactcgagatggtagaggtggtgttgttgatgatgatgagaacaagctcccctggcaaatgctcaggtgggtgtcgcgggagatgggaaaatgtgggaaattttccgaacctagaaacccaacaccgtgacaagcaagttgctaagaatcccatcgtcgaggatatgtgagatggtcatggaaatgacccaaaagatgaccacaatgaaaactacaacaaagagtatgaagaggagtattatgagcaagatcccgaagtagtgaggatggcacaagaactcactgaaactcaaaagagactggcagagcaagaagaattctctcaaaaattctaagaaattctggcgcgactgcaagctaaagctggcctcccagaggaagatattcctgccccatgatttaaccacccaaagctggtccatctgccctagcaaatgataatggaaaaggtg

SEQ ID NO: 307631 - DNA, 1471 bp, Cannabis indica
aaaaaaaaaaaaaattgaaagataatgtcaatgttgggacccaagtgccaaatgacaggtacaaagtggctgatggatttaaagctattcgacctattgcaagtaaagttgaatgggattcaattgtttggaacagataaaacacacccaagcatagttttattttttgactatctatgcttaatagaatcaaaacaaaagacataatacatataaggaacttgagaattctaaatattttctcagcaacattgaagatgagactgtggcacatctattttttgagtgctctttctccttggaattcttggaaaagattaattcatggctgaatttgagaatggctgccacttccttagaaagaattgtaaggtaagaaaggcaaaaataagcaaggtgaagagattaatttttgttgctgtcattgcagcccttgtttattatgaaatatggcgcagaagaaacacaattttatggcagaattcttatacaaatgtagatattgtgattgtcaaagtgaaaaacatagtgaaaaagagaattacatgtatatggtcagtgaaaaagaatggtttgataccttgtaaagttttatagatatttagattctcctcatttggcgaatgctattagattctacaaaaaaagtttttgagcaataaacatacttgattcatcaaaaaaaatgtcgatgggaatgatactaaggctcctgttgctaaaacagtaaagtactatagatgaacaagtttaggctgttaaggattaaaaagtgagtattgcctcaccttccaaggtcaaatgttcgcaacacttttgatgttttggaggaaatttttgtgagtgaggttcaagttggagatattttgtgtgagacgaggtccattattgatgaagagggaggtcctctactataaatggataggttgttcttttagaatgttcaggggatcaacaaaaccaacaattagcaaatagatatcacgagaatgataaacaatatgattgtttgttgatcttctcgaaacaaaggttaaagtctctcgaatgagggctttataccttaatatgtttcaaggatggtgtttcaccctaactgaagaatcattattgctcagaacctcggtagttattttgattgtgatatcaagggaggagtaagtcaatgggttcattgtcttattaaactaaaatatgtgataagtttgttgtaactatagtgtatgccttcaatgaaaacaaagggggaggcaagttctatgaaggatttggggaatattactatgagtaataaattcttttctatgatctgttgaccactacaaaaaattttaattttagtcacagcaaaatttgtgactaaaagtgaaaaaattgtgactaattataaattattattcttatgttgtgactaaaaggtctgtggctaaatgtatattagtcacaaaaattacaatttgttgtgagtaaa

SEQ ID NO: 307632 - DNA, 1146 bp, Cannabis indica
atttttctaaatatttatttaaattgctattatcactgtgttatacttataattgttactacatttaaaattattttcatcacccctattaaacactgagcaagtattataaatatgtaaactacaattatatatgtaattcttgaaagacaagcatatagtattaatttgctttatttatgaataatcttgtttagcatcaaacaaagttgataataaataatatatatctatataattcttttaatatatatatctttgatcagtttataaggctaaatctgccttcttttcctacatatagaagcagaaatagcattatatattattatttatttattttgctactaataataaataattaaaatacattatatattgatattatagttaattaattaattaattaataaccaccaccaggcctcttttcatgcttgggatttggtcctggcctgtcatagtccaatatagcatcaacacttataagaagctttctcatcattatcttcttctcatcaacaatgccctgattaataatattttacattaaaacccaaataaataaacttaatatattttaggctatttagaatttatcttcgagctataacttatacatgattgtatctactcaactttttagaccgttaaaaataattctcgagctattcatagtgttgtagattggtcattctgtcaagttttctcacatgtgacaaatagaataatgaaatgattgtttcgacaatcatcacatcagtgtcatatcaacaccacacgtgtaattaattttaagaaaatataatttaattttacgtaattttttatcattaattgattttttgtttaatggtcttttaaaaatatatatttttattattattttttattttaaattatacatgtgaaaaaagtgatcatatgtcattattttgtttgtaacgtttgacaaaatttgacagaatgatcaatctacaacactattaatataattcatggagtatttttagcggactgaaaagtctaaagtacataatgtataggtcataattcaagacaaaaaatttaaatggcctttttcttatcataaaaaaaaatgttgatagatattatatatagtaattcttatatataaaaaaaaaa

SEQ ID NO: 307633 - DNA, 1284 bp, Cannabis indica
aattattaaattttttcttattatgcattagaatggtttttcattccctttcaaaatggaatagtcattggtggaagggccattccattggaatgacattccaatactttaatatacaaacaaagaaatagaatgaaatgaaaattgtttccattttatttcattacctccaatcaaacgccaccttagtgttgtgctaaatatttgaactgcataatgtttgtagctctctactaattgactctaccatagaatggaaaaatttaactagtgaacaattttttatctgcagaacacagaaagtgaaatcggagcatcatctcttgggagaactgttattcggtaactgccagaatttggcattttgtctgggcaaccttataaagttttttgagccttcacgggatggcaaatagattatttcacgcacctaaaattgatcagggtcctgaagctccttcaaattgttgtgcctaaaacataattatgctttgaccatggattctgctgggacctgaaaggctataggagttaaagtgaaacttgctttgttccacttgaattagatgattcttactaagttttctcaatagagttatgtatagagggaggtggttaataattacttataccttctccattcccttgtatatttcaaagagagaaatactgcaaattttttgggttatatataaataaatatatttgttaggaccttttcaccaccatcatcattgtacataaactgtcagtcttctatacaagggttcagtttacttacctttcttctcacccaaggtatcattatccagatttgttcattagattagtgaagttaaacatgaaagtctacagtcctcttgaatgttttaattatgattcaagttttgcatgaaatcatgcaaccctatttgagctatctggagttgtgtttccaaatattcatcctaaacaggttttagtccaacatgtggtgcccatatttttattacttgtcaatttgagatatatgaaggaagattgactttattcctttataacttgtaactgataatggtaacttgtgaaagatcgccaacttgtcatgtgcctcacataatagggcattttggtgtgtcaaaagcaaaaaagaaatatgggggttttggtaattggatgtcaaaacatatgaatagtgggggctttatagtaaatcactatttataaagcaaggggaaattttatttacaccccaaaattttttaaagccaccctattttaataattttaatttaatataaaatt

SEQ ID NO: 307634 - DNA, 1214 bp, Cannabis indica
tattatttttaatacattattaataatattttaaatataaatatttatttttctaaacaaaaaatttagaaatctttaaaaataaaatatattcaaaatcttaaaaagactaaaatgttaaataaaactatcaatacgtggctcgacacgtacattcaccaagtatatatatatatatataattatataaagtatttagcattctaaaacttagttggaaagttaaagaaagggacttggatcgattaacataccgctcgacacttacattccaacaactgatttaattcagaattaatgtataattaggtcactttagattccattaacacttgaaaattacttgtatatattattcttataaactttctaatactacatacataaaatataattaaagtaaaagaaatatatatataatttgtacgtacacttttagattcagatacatatagaatagatggtacgtacgtaaccactatattaataaccctcatatatatatgtggcgcgtatcacatttcattaaacgctacatatgataacaagaaaaatgttgataatgggatgatcccatgagaatttttattataatacaatatataatgtaatatattaattaagagcattgtggtgactattattttctcacgtgttgtgatttattagtaatattttttaaatattattatattaaactgtatgcgattcaataattagttagaccaatagtaatattataaaatagtcctaaataccactagttagtgtcccttcccatttctctattaattcattagtttaagttgagtacccgaataaagaaatcaactatgttagtttactttattattatatattaataatattattattgttcaatgatgttgccactacccagtattaactctatattaaataaaatgtacactgcctgacaaaaaaaaatatttatatattccacttcttcactgtcaccgttttgtttaactctctttattatatagaatttgagttaaaatatatatgtgaaaactgatcatcaattaagataaattaatttattcataaaaatatggtctttgggtttggtcaaatatttgaaaaactcgatttgatttttcttagtttataaggataaaaggatgcctaataattattaccttcttaattttaaaaaagaaggggtttcaaaaagcaaaaaaaaaaaaaaa

SEQ ID NO: 307635 - DNA, 1022 bp, Cannabis indica
cggtggtctccagtgatttccaacgatcacaaggtttgaagtttaagagaaaaaaggggaaaagaaaagagttattgtaaaactgaaaagaaaagactgattttaatgtaaacataagaaaatgatatataaaaatgaaaaataaaaataaaaacggtaaaagtggagtaaacatataaaaatagcgaaatttgtggctaagtccctctatgtttaatttcttatacacttaatccccttttctttattttttgggggaaaactcctttaagtttagttctatttgtaaatcctttcttccgttatttaacctggttatccccttatgtgtagtgatccaactcagctcaactatccaacgtggcaactgaaatatcccacaaaaatatttatatatatatgtcaaatttcttcattgtcgtcatcatcaaaatcaaaataaaattcagattttagatttagccattcctaatacaaaggaacatagcaatgaatccaatgattcaagaacacataaaactctcttgacgatctcaaaaatgcggcaccatcaagccatccaagatccagcccagtccagatctcacccatcactttctaaccttggacaattttgtggcagtaaagaaagcttagcattgcacctcctccgtctgaaaagcttgcccccgtataactttgagatcgtgaagagtaagaagaaactattataaagaagaattgagaagtgaagaatgatgcaaatctctttgaccttagaacgtggatggacaacagtggcagagctcagctggcgacgattggacggacgacactgggtcttgagtaggaatgtcaatagggcgggtcggatcagatccgactctgatccgacctgatccagatcatacacggatctgccccgccccgccccgctggattagatactcggatcggatctgatccgacccgccttatacggatcggatctgatccgacccaactttttttttaaaaaaaaaatatattttatatctaaattt

SEQ ID NO: 307636 - DNA, 1306 bp, Cannabis indica
tatatttgtaaggtaagtcaaacttgatatattataattatatgaactacactaatattactgttatagttaaaaataaattctcaaaaatcaaaaatctcaaatctcatttactaaaaatttttttaaaaaaatattaatttaaattaaaaaaaattaaacatgtattgcacttaatatcacctaattaaacttaattaaacagaaaactaattatacgtgcattgcacgtaacatcaacctagtatataaacataaatatcttaaattttttaagttgaaaatttaccaaatcattaagagtattgtatatattaaaatgttatattattatataataaaataatatttttttttcatggtataaaataacattttaagttctcaataacaacaattttcttattcttataaatatattagagaaaattagcttgggacaccaagtactcaaaatgtgttgaaagccgtaaaccaaaatctcacatatggagtcacgaattatcatacttaaactacatctatcattagaagcttcgatactaagagaactatgtgtagatccaacaagctctcccaaccgagtaagaagcactaggagaattgttgagactctaataatcgacgagaaaatcacaaaacattaagactaaatagaatcattttatttaagtaacattaagaacaaatacaaccaaaatataatttaaaaaagaacataaatataaatataggtaattacaatattaattcaaatttcagtgtcccaataaccattttgaacccaagaagaattatcccaactaaggtagaatccatctgtttttaccaaccaataaattgagttgtgaccaatatctctttgtggttcataaacatgaattgaagcaatgaatcttccccaaaaagcttgtaagtaatttgtactattactttgtttaacatcaaaaatatagggttttccaccccatttcaaagtgtcttggaatcttccttcactattctctgcttcaattctaaactcttttgggtttgtgttatttttaggcaaaggatttgaaattatatgaacggtagctaatgaatcaccaaatgttgttttcaaagaaattgaaaataaaaataataagaagaagaagaagaagataatatttttagacaaagacattttttgatcttcttcttattgttattattgcttgtgtagttttttgggtgctaaatgttatgagtatttatataatttaagactttggttgttaattaatgtcttgatttgatattaaatgataattaaaaaaaaaaa

SEQ ID NO: 307637 - DNA, 1293 bp, Cannabis indica
cattaacgataattgaaacagagattgctatacaaaagattgttcctatattatattagtgtatagagaaatttataattatatgcatactaatttttggatttaattacacaatgtttcttttccttctagaggttaatggagtgatcatgcatggcaatatataacaaatcaacatataaacacacatgaaaatacattaattcgaaaaatgtattttaaaattcaatgatatgtacctgcaccaacaatcagtggttaaactagaatttaggttgaggagggtgtgctgttttttttttttccttatatcatgatatatcatgttaaaaatttgatacaaacttatatttttttaatagcaaatctaatttgaagtaaaatataaaataacaacaaaaaaattgacttcaattattaatgtactaaatataaatccggaaaaaatctaaaaagtaaaccttaaatattaaaatatcaaaatgtcaatattgttgggatttaaattattaacctttattattatatgcataagataaactaactattatactaaagttagaactcactacaaaaaataactagctttagttataatttttaggtacaatattaattttttgtcactaaatatgaattttagtcacaataaaaatttatttgttacgaaaacatactatttatatacaagttgttactaatttaatttactcacaacaaatattgtgactacatatttagtcataacttttttattttcacttgcaaaatttgttataaataaaattatttttttttctaatggctatatcacttttaaattttacttacaaatatataatattaactaattaaaatatatatggattttttttttccaatttgtttttagagagaggagagtgcccactctcccctctatgtagattcacccatgtcaacaacatgtagggtgtgtttagaagtaactgtgtaattactaggtatggtaattactagggtggtaattacactatattttaaaatgcaaggtgtgtttggatatgaggtggtaattacatatgaattcataatatcttgtttggcaaaatagttagtaattacatgagaaaataatattttttagtagctaatatttaatatggaaagtttttagtaattacacagtgtaattacatccaattctcatgggaggctatgagaattggagagtgtaattggaacccctaattgcacagtcacagtgtaattacatccaattctcatgggagactatgagaattggagagtgta

SEQ ID NO: 307638 - DNA, 2623 bp, Cannabis indica
atatatatatatgtcacatcataacgtagatagacttttttgtaaataaatattatttttagtcacaacaaaaattagtacttattactaaaaaaagtagtatttagattgttactcatttaattttaatcacagcaaatgttgtggttaaaaacacatttagtaacaataaattataattttcgtgattaatatttttagttatggactttttattagtaataatataggaatgatgatttatgtttagttacaattattttacttttaagcacaaattttgttgcaactaaaagtaagattattttgtagggaatgttgaaaacttaattctatactatatacttttcatttatatgatctcatcataattagcttgaaattcatgtaggggaatggctgttgaggacaaggatagtgaacatggtgtaagagtaataattgaagattacccatacgccaacgacggtcttctcatatggagctccatcaaacaatgggttactgactacgtcaaccactactaccctatctcaagtgaggtagagcgtgatgaagaattacaagcatggtggacagagatcagaactgtaggtcacgctgacaagaaagacgcacctgggtggcctgacttaaaaacgaaacaagatctcatagacattgtcacaaacatggcatggacagcgtcagctcaccatgcagctgtcaactttggacaatatgcttacgctggctatttccctaaccgaccaaccataacaagaactgttatgccgtcagaagagaaggagtataacctagatgcgtggaaacacttcaaaaatagtcctgaagatgcccttttgaagtgcttacctacgcaattacaagcaggcctagttgtggccgtgttagacgtgttgtctactcactcgccagacgaagagtatcttggagacaagatggaaccctcgtggggctcgaatcttgttatagcggaagcttttaatcggttcaataagaggatgaacgagattgaaagtatcattaatgaaaagaatgataatgagaatttaaggaatagacatggagctggaattttgtcttatgaacttctcaagcccttttctgagcctggtgtcactaacaagggtattccatatagtatatctatttgaaataaattttaaacattccatatagcatatctatttgaaataaattttaaacattcatgtattatgtttttgtatttgtattattgctctagaataatataaccctaatattattttgtatactaatattattgtgtacatatgtatacatgtgatgccaagtattaattagtattacttaaattatatagtgatcgagttaggattttcagtatagcgggagagaggaatggaaaggagagagagagggagaccctctaaatacacaattttcaattcctctaaaaatgaaagaatttaaaaaaaaagattaaaaaatatattaaatgtcctttttacccttaaaaataattttttataattgtatttttaataataaaatagtaattgtaatatttattttactctctattccaaatttactcttaacactaaacaattaacacaaatgagagcaactatacttctaaattttctatccatcctactctctctttcctaccaaacataacctattataggatgacaatgaatttatttgatcttaaaggtaactccaatatagtaaatgttaaatttattagtattaaattaacaaaaaaaaaatatgataaaattttagcactaaattttaatctattctaatcacaacactaaaattacattaaaatcatattttttattattatattattttattaagttataaataatcacaaataataaatatacaaaaaatttaagtataaatatattatttaaatattaaaaatcaataaaaaaaatagttagtgtagtttatagtgtcatactaataataatgagacattataaataatattttttttgagtacgtgagctgcaacaaaactgagaaaaggagaaaacagaaaacacaagctgcagcaaacacgaagaatggagagcaattaagttctccaagatcagtcctcatcacgccttagagcttcccgagcataaaggtgagcttctttattatcggtcctagagatgtgcttcagggaggcattagggaagtttgagagtgactgacgaatcatcgaaactagactcgagagagttgattatcctgccaactgctagtgatgagctgaaggcaatctgaaaccactagactagggtgaaactgagagttcttgcaccacaataagccttccaggagagattgggcttctgcaaagattggcaaagaggcccctggcttagagatggatcgacctgataaaacatgattagggccttttttgatggctgctcctagccctatttttagcgccttttgatcttgttacatccccgcttcaagcctccatttggtccttacacccacgaaataatgactcttatacacgagtatgccactctgactgcttgttggattgatgactgaccctacagaccaacacaagtgtttccaacgtgctttgtcctcactcacacgcttc

SEQ ID NO: 307639 - DNA, 3257 bp, Cannabis indica
atatatatatacatataatgatagtgttgaactgtaaacgatgccagcttgaataaactcattggaattaattcaatcatttcacacacatattatatatatttatatttaggtacagtactatatatatatattgttacatatatatatatatcttatatactatagttttttttttaattttttttttcaaaccgcgtggggaatggaagctctcttatcatggacaaagaaacttgtattggcccattgaaatataaatcaatggagtagacactacttataattttaattatatatgtacattttaatatatacatacatatatataatatatattttgtcttgttcccactcaacccgggagaaggggaaccccttttggcttgtattgataaatatacatacacttaatttgtcctttttaattttaaggttgttaataattaattaaacactatatattgttttcttttaattataattaccaacctcttactttgtgatttttttggacaattaacttttaatattaaactcaccataaaacattggttttttattatacacaaacatataagaataacttttaatttattatataaaaaattaaatctaatttaagcgtattataaataaaatttaggtcaattttaaataaaaataacatctaaaatataataagtatatattttctaagtgtctattaaaaaagtatatatttatataaaaataattatatcttaataaaaaatatatataatttataaatttatatatgtaaaattaataatacatgtataaatattatatttatttaaaaattaattttattttaatatatattattaatgatcacttattgttattgttaacattaatttgatatttttttgatgttttgatttttttacctttatttattagttataacgtccttataattaacctataattaatttgtttcatcctaagtatgtatatgaaaagtcattttaatttagtgtttttggtcttttgttttatttattacttatatgcattaatcgatatatatatattttggtaatttatatattagtattgttattggacattagtaatggtgtctagtatttttttatatgtgtcgccttgcaaatattagttagcgacacttcttaaaagttattgcattaaattatatgagactcgatacttagttggactattgtggacattttcctacatagaataaacggtagagtattaaaccatatataagaacatgagctactgaactcatcaccaattggttttgagatagacccatataattctcaacatgatgtcagagccatatcccttgcaggcaagtgattctatctgatctgcacctatacagataatgaccatgtcttctctgatacggttcaagattggtgagcaactccactcatcacaaattgggatggaacctcataattctcaacatggaccaataataatattaacacgtaacaaaatactagacgtactactggtacttttaaagatttcatcttatataaatgagcattgctattggatactgtctagcacattctgatgtagatgtgttgtattacaattaattaacgatactttctaaaaatattatattaaactatgaggacatatttaattacacaaataacaataatgacacgtaaaaaattattaaacaccactatattacaaaccaaaataatgaaaaaatgctgctcgtgctttattcgcatgttactatctaatcatttcccactatacatctttcatctacatatctatatatagatatatatatatatatatatagtactactactcattatttgaaaaattaattttataaaatagattataattaaggaaaagaatgtgatgattttcatagtcggcattcacatcgatcttgggagttggaataagatgataacttaaattaaacaaaattatgcagacattaattaatgtattaactcatcatcattagaagtgtgaatcattatactaataattgaatttaattaattgataaaactaaatgaaaattatatatacatattaatttattattatcaattataagatagtactcacattaagtacgtattatatatagtattatcttataagttaacatgcatattatttgaattaattattaggagaattattcttatatattattttttaattatttttttcaaatttacaatttagattggttcagtagtttttatataattactatatagatttgagttacaatttagaaattgctcctataatataatacgtacgcagttaattttgaaaatgtctacctatgttattatatatattacaataacatgtatatataagatttcttctcgaaataattaagtaattaatttataattaatatataaaccgccattaattattgttgtcaagaataaaaaaaatgaaatgttacatttaccaactcttgtaatcgttgaaacattgacctttttgttaggtttgcacttggaagctacttagaatttgtgccttgcaagataaaactcaagtacacatcaattatatttaaatattataaatatataaaaaataattgatatattgtatataaaaaaattaatcatatatatatttaatttataattataatatatcctataataaaatcccaccttattgtattgatgaccaatatcatcattgctacatagactgcagtttattttttaatatattatttaattttttcttttaggggattggattgtgtggtcacaattcaatatataattgtttacacataataagttattcaacttctaaagaaaactaactaaaaaaattgatataataataaccgaaatgcaatgttcaatatcattctataataactatatatactcaaaaatttatatctattaattcatttaaattactttatatatataaatgataccaatttttaatttatataatgcataattgataataaaataatgaaataatccacaaagtattcctcttttgcatcatgcatgtgttgtcttattccccgcgtttatttttttgtttttattataattatagggttcatacttacttcttaggtctttccaaaaaatatatgggaaaaattatttcaaaacccataataataattattattattaactatatatctagacccatatattatttttttaattttttttttctaaattttacga

SEQ ID NO: 307640 - DNA, 2076 bp, Cannabis indica
atttttaactgtaaaaaaaaaaatagaacctaataagagtaacaattatataactattatattttaacaaaattttttaacatactatatatttcaggaaatgtttatttttcaaaggattgtacatcaaaatatttgacatttttttattttgaaatgaaaaatatttaaggttataattctctaaataataggtggttttggctgaaaggacaatatataaatattattgggcggggtatcgaaagtaacagaacggatcacacgtctctgcaatctgattgcgccacgtaaacgatccttactgtgctttcactgacactgagtaacagatatgtttcaagtacatatacagaagtgtatttcttttctctgttccaatatttgttgttttttctttaacaaaataattaattaatgagtttgcaggaaaatttgttgaataattcgtatggataggtagggaggaaactccgacttcatacttgtacagtgggtgttttccacgtgtacataaagaaaaggctttggtttcccatatctctaacccgatactctatctctatgtgaacagaggtggcaactatcgagctaaagacttgagaatgggaagcacgaagctacattgtttcttttaatgaaacacaaaagaaaagatattaaaaaaagtttgatataatcaatgaaatacgaaaagtggagccatgtatatacaaatacttaattgtagagggagggggaccgatatgtttgttttccttttgggctgtatatgaggggaccattgtagaaaaaaaaaaaaaaaaaaaaatcttatgcgtactacaagtattcgcagggtaaattaataaattataaattagtttcactcttgacgaattttagagcaaaaggaatttatgtttcttttaatgaaacataggaaaagaattttaaaaaagaaagatgaggaaagatattaaaaaaaaagcttaattgggggaccgaatgtgtaattaatattggttgcagtttggtagtgaaagaggaccatgaactatttttactttatttataaactaggaaacaaagctgggttttgcgtttggttatattttgtttaataatactgttttttttttaaagatgaaataacaacttcattgaaatgttagcattcaaagtataagaaggcttttaaatcagcccaagcattatgctcaaaaatactacaactaggaaaaaatcgagagtgccttgcaacaacatgagcaactcgatttgctgatcgtctaataaaaaagagatttacattgtgtaaagaggataacagaatttgacaatcttgattaacaagtccaaaggtagagttcatcttttgattgttgcgaatactttggacagtgaccatgctatctgtctcaatctgtatattctgccattttctatttttcacccaactgagagcttgcttgataccaatggcttcaatagtttcagcagaaaaatcacctccttggtaacaagtttttgcctcaattagcttgccttgactatcgcgagccacaattccaaagttgtatgagttttcttgtgcaaaaagggcagcatcaacattgaccttgatgttgtttttgattcaggtttagtccaaagttgagtgttacgtgcatgccaagatggcacgttacaagctaagtgatgctcacaagtttgccaagtggtggtcaagtagtggcgcatgctggtggcatgctggtgctttgtttgtatgcagtggcatttttgtaaatattttcaatattgtccggatcgggaggggacttggtattcgccatttatttgggtctacaattagaatggtgcaatcggtttggaaaaactttgtgatttggtttactgtttggctgtatgtctacaaagtcaaattcatgtatgttcctggtagaagggtaaaagctcagaatgctctttgagggggtaccctagtgtcagctctcccccaccccttgcaccttggtgctaagtgagctactactagtcagtgagactagtatggcgggcatatgaggaccatgaggggactcatatgtctcc

SEQ ID NO: 307641 - DNA, 2315 bp, Cannabis indica
aatacaatatttattgtgatttacaagattttagtgaatagcttattttatcttaagtaaaaatagaaatggtactcctattcaaaaattttgtctaactctaaaatttaatgtaaaactaggtttatgggatcataatttaaaaataaaaaataagtatttattaagaaagaaatcatcaaactaaaaataaataatgattaaaaataaagaaatttaagtaaaacaatatatattttttaaaattacaaaacgtggtgctgataaataaaaaaaatcatgtgtgataaaacttaacaaaataatcactttataatattgtaaatagtttaaaaacaatttttaacgagttcaaaaaattaaaaaacacaataggtcataattttgagaaataaatgtcctaaataaattgtctaagtttgtacaaataaattttgaatttaatcattattatattttaattaacttgcaaagtcaatatatattagtaataaattttttaattttgtctaaataaatgagaagttatgattgatattaactttttttccttgatttaacttgtatctttgacaaaactcaaataatccgataataattataataatgtcaaataaaataaattaatttaatcaccactttccaccattaatagaaaaatattttttattttcttaactaaaaagaaataaaaataaataaataataatatcgtgtttccaactcagccatgaaactttttgtcggtggaagatcctaacggctgtaaaatgacagcatcttgatcgtacacgtgtcagcctcctatacggctgtgaccagtctggcaagcttagtatctatcttggcacttctcacacttttttttccaaacctacccctataatattgttaaaactacgaaattgccctccatctttgtactttactactttctaccccttatgccgacatgctgatgtggcactttactatcattttcattttcagccaatcccacacttcataaatatgtccatataatattttctataatatattattgttttataatatattatatattgttgttaggaacatgtatttggaacttatatgaaagtaacatattatagatttcttttttaaaagcttgtgaaaaatgtgtactaatatatttggctaatttaaatttttaagtttgagatgtattaaattatgtttttgaatattttaggtcgttaaaaattttctttgaattatattagaattgttagatttaaaaacttttgtttaattttattaaagaaagtttgacgttgatgaaaatttaagaggtataatttggtatatattaaagttcaggagttatgattttgtagatattaaagtttggagacacaacttagtatatgggcaatcaccacattagtaaaattgaataaaattcgataaaagtccttaaatctaacaattttaatagtttaagaaaaatttttaatgacttcaaaagttcaaaagatataatttaattaatacatgtcaaaattaagaaaataaaaattctaattagcctacatatattatatttggttagtgatatataatatgcttacataggaaattaaagtaccatcaataattcattttttttttatatttattgaaaatacaaatttactattaatacgataggtcattttattttacaatgagagaacaaaattgtttgaaataaagaatttggatgactaaattagagtcactcatctctatatgtaagctcacaacaatgaactctttttttttttttttgtaaagaaaatgtttataaatagaaattagacctcacgatcgttacacagaatattattcgggatagacgattcactcaacctaccaaacaggtagttcgtgaacagcccatttgaccacattatgagccataaagttacaacttctacaaaagaaaaattacaaccatcaaatagtcgagagagttcaaacatgcaatcatctaacttattacaaactgtgattaagttcaaacatatatttctaactcaaaatattatttgatccgaatttactgagaatatttaagcacatctgttaatgactcaatcacgaaaataatgtttgagtttcttataattagcacgagattgctggaattatcaaaagtacatcaaactcagtctaaagtatattcttttctacttaaattaaagttcatcaaacaaagcttttattatctcacgaaatcgaaatagttttgttataatatgtgttaactgttagataaattaacaattaacaattaacccaagatctat

SEQ ID NO: 307642 - DNA, 727 bp, Cannabis indica
cttagtttgttagagtgtttataagaaatgatcttatttaaatagcaatattgtgtatcttaatgagtttggtattttttttcaggataaatactcatttagcagtgtatattttattgaataaacatatatgtttctaataaaacttatttggcattttgtattttgtattttgaaattatatttactacccttaaatcaaatttagtaataaattttatcaagatgactattatgcatttgattatagggacttagataattaattttaaatttaaattaaaaagccatgtaattaagagcaatttgatcatatttataattcttttattaatctttagttgagtgtattgttttttatcaaactcatgatattagataaatattatcaaatatatagagtactaaacttatatttggacaaaacaaatactacatttaccaaaaaaaaaagacaaaacaaatactacgaaaagggtaattaaatattttaacttttgataataaagtgggtcataacattgttaaccatgctagactaaacaataaacttactgggtaccttttggttaatacgctattacctaattcaattaataattaaatgatcttttctcttgttcttcttgtggctcgatttcttattataatttatttttttttcctaaggagtaagttaatactcaaagtttgaaaaatttaaatacaattctctatttaattaagg

SEQ ID NO: 307643 - DNA, 1216 bp, Cannabis indica
gagtaaaagaaccgatcgatgaatttgttaaaaaatatgaatttaagaattagtttcagagaaatgtaacgaagataaataataaataaggaaaccggagagataattttggtctctctttttctgagatacaacgcaaaataataaattattgagagaggaaagcacaaaagccactcaactcaactcaactcaactcaagctttcctcagtcttatatgtctttgtttcatatttccattgctaaataaatagaaaaaaatttaaaattacctttctaccctctcgtttgctataattgtcagattttttatccctggtaatttcttaaatgaccaaaatgcccctgtttatatttgtaccctaggtaagcaaggctgcacaatttttttttttttatttcttaaagaaaatatatatttttcggaaatatgtttataccatattttagaataaaaaaaccagttttacgataaaatagctaattacaataattttaatttcaaaaagtatttaaattttagattttgaaaaggagaaaatctatagatatttatgttatattataaaagatgaaaaagattaatctcaaatatttaatttaatttgtttaatagttaacatatatttaacctcttattattttttttagatgaataaagataaggtaatttaaattatttttagattgtcattgtaactacctcaattttaatataaatatattttagagtgttaatataatgttcctataaacacttcattatcaaaaagttaataattattttcaatatatgttaatattgacgataaaattaaattattatttccataatttttatcacattttcataattatttaaatgtatttttttttttgtttaaattattctaacaattatacatatatttagtttaatggttattaatatttaaaatatgaaaatgtatatttaactttaaaatatttaataaattgttaggtcatatttttacttgcaatgtttaagagcgctgactacactctctactttatcattgtaaaataacaccaatttttcttttctttgaaaaagaaaaaataacaccaattaaacttgggaaatttaaatttctatgtatgtattaggggataatttttttccctaaactaatacttttctacattgaaaatatatgaccacttttctaaaactccaaaaatacccctctcaaa

SEQ ID NO: 307644 - DNA, 745 bp, Cannabis indica
tgagtgatatagaaactaacacaaagtacttataaagttattaaaaaaaataaaatgctaaaaattattccattttgatattgatattattaatataatttaatatcaaattttactaataatttattttaataatgattaaaaacaattaattatttataatgttgaaataaagtagtagaatttgcaatactcgaataattgatatatgaagatgattatatgcatatatatgttcctatagattattaaaagctaggagtgcttgaaaagtggaacctagtctcatctctccaccactcgccctaatataagtgcgctacacgggatattactagtcatgtggactagtgaatagtatgctactaaaaaggtttagatgtttgtgttcctccatttgtcgatatgttgcttacaaggaacatgacctagacctttgagagatgttgtcaatggccataaacctaacacaacataacacatgtagtgcatgtaacttcttatagaacttgttagcataatgcaagcattagatagttgcaccttgcttaaaaaagatataggctcagtttggactaaggcggactaaacctatgtttaggatccacctaaattcaaggtccaccttgcttaaaaaattaagaaatttacactttatactgatttttctcattttatttctttttgggttaatactattttggaccctctgttttacaaaagttaccaattggaccctgtgttt

SEQ ID NO: 307645 - DNA, 1122 bp, Cannabis indica
aaaatgtaagtatcagtatattcctatggattaattcaaatttcaatatcacacaccacatattattatcaacatatatatagagactattaatttgaccaaaatttatgctgtaaaaaattgctttaatatattttatcagaatatatatgttctggccttgaatcttgttatttgactttatatattttattgataatattattaatattaaacatatatataattaattctttgctatggtcaaaggtcaagctgttcctactcaaaattttgtaatttctggacttcttagcttcttcttctcatcacataataaaataatcataattaatccacgaaaaaagctaaaacaaaagctaaattacagtttttaattaattaattaataataatatcattacacacgttaattaattaaagagtctacaaatgcttattgtctttgttttcattaaaatataattaatttaattgatctagtttaagcacgttaattacaatatttcaatgaaattaataatctcttcaaaaccatttactaggaccattaataatgacaaaatcagaattgatcaattattggaaaacctaaataacttaattaagaattattcactttttttttgtcatcacctactcggcctaattgtctaaattattaattaatgtgttaaaataaattaaaataaaaaagaagaagaagaaagactatataacatatactagcctctatagttggcatgcagctttaagaaattgactcattaatttttatatttatatatatatatatatatatatatttagacttctcatttaaatatcacctaattgtttttttaataatattattatagaattagagtagttttataccttatattacacaaagtccattatatatcttctgatgactatatgctaattaattcttgtctaaattaaagatgtcaagttgagaaataattaagtcattagcagataaaatacgacaagattagtatcataattaatatgtttttagatacaaaaggggccggccctgggcataggcgggctaggcctgtgcctagggcccacctagtctaggagcctaaaaaaaattttctcttttaaaat

SEQ ID NO: 307646 - DNA, 1494 bp, Cannabis indica
acttcatcgctgattatcacatcagtgtaaatctagtgcattgatgaatcagggactttgttttttgaagcatataatcacaatcacattccactgtgttgacatcactgtaatcgtgaatgactatatgttctgaacttgacaaattttgtgtatattaaaccataaacatgaaaactacatgtaaaaataaatgacttctaatctttcattgataaaaaatcagattagattgaaatgggttttatttagggcataaaatcccaacaattagtattagacacaaattctctcctcgggcacatgcatgcatattcattggttatcccaatggcatgaaagtttacagacttctcaacctagccactaacaaaaattttcactctcaagatgttgtattttatgagcagatttttccactaaaggggtcccgaaacacccaacaactggacatcttacttcctactcaaagcaccaaatcttgagtctcttctaataccccaacacaccctgtcaccactcctaaaacaataccaaacactgttgaccttatccattaaccatcaataccccctgatgaaactacaccagccaatgcctctgctgatctcacaccagcaactacatttgttgattttataccagcagaagcacctgctgcaattccatcaacgcaagtccttgatgctcctcctaaggtcatacaacattcctcaatcaccatagcagctcgacaaaactcttccacctactcatctaaaagactacatttgtcagtctttaactaatcatcccttggtaaaataccttaactatgacaggttaagtgttgcttttagaaatgccatatttcatgcctatactgaactcgaaccaacaactttcagacaagcatctaaattcacccaatggttgaaagccgtggataacgaatttttggcactcaagaaaaacaaaacttggtctgttgtctccttaccaccaggctgtcgacccattgttaacaaattcagtagttggatcgaatgactttcttaacaaactctttaatagtttgataacaaaaattcgagacagattttagaattaattcatgctataaaatttgagctaaagtgtaacattaaccataaaagttaacaaagatttaaatttttaattaaagcatataaaaactttattagacttttaaataaaataggaaaataattaattatatggtaaatactattttggaccttttatttagcaaaagttaccaattgaatcaactgttttgttaaatgataaaatagacctgtattttctaaaatagtataaataagaccctaaattgattttttgtcaaaataaaatttaataataatccgatctaaaggtgttataacaaaactatttacattttttatatctgttcgtgttaggaattgtcttcaagttaaattttttttaaaaaaaagttgtcaaaaattaagttcagggttctatttttac

SEQ ID NO: 307647 - DNA, 2043 bp, Cannabis indica
ttgattttgatgttttagcttttcataatagcaaattttaataatcaaagtcccatatcaaactgttgaagaagttctaattagaagagatgttaagttgtaatgttgcttttctaagctgtcattttttgaatcaatttatcttgtgagacgcagggcttcggattttccaagggattatgatggtgcttctcttcaaatgaggatatcatacagtcctgctgctcacttgttcctttttcttgttcaatggaccgattgccacctcgccggagctcttggactcttgagaattcttatatacaaggttgaatttcgtgtcttctcattgtgtgctcgtgtatgagcgagcacactttttcgattgcattcatcggttgtgtgtatgagaaccgaatgaatccattgaatttctttctaaaaaggttataggattactaatccttaatttttcgtggaatccattatgaatgattggtttttctcaatcttttctatcaaccttggtttcgtaggaatcatgatactctcttaagtaaaaaaactgatttttattcattagttgggcataaaatcgagacatcaaagttagattgatagaggatcttgtttcgtttcgtaggggagcaattgttgaatgtgacatttttcttttaagttaattgtattttaatcactttagactcattttcgggtgatggaattcgatacgagtattgaccttggcactttgcacaggtctatgtggatggaacaaccaccatgtctactcatgaaaggaaagcaagtattagagagttctatggtatatagcatatacttgctttcggtttgtatgtatgtatctatctatctatgacttatattgactgattttgtgacttttttaatcatggccagcggtaatttatccttcacttctgcaacttccaaaaggtgttactgacaccgaagatagaatgcagaaagcagtgtgcttggagaggtacaagagaagagacgatgatgagaattggcattgtacagatatagaaatcgaaagagaagaagaatgtggtatatgcatggagatgaatagtaagattgtgttacccaactgcaatcatgctatgtgcttcaaatgttatcgcgaatggtattgccatctctctctttttgctcttgaatattagcatactattattttatcgagctgctcgaatgccttagtttcggtcaatagcttatattttattcttgttatgtcctatttaagtttgatcagttaaaatgaggaacagttaggcaaaaggcatgtggttgctctcacatggtcccgagggaacgcctactaggtacctacattgcaattgctttagttttctagtcgaatgttaggccgggaagaaaatgagcaattggctattagtgccttttcgaaactcttttaatatcgagttaggagaaagattagttctaaagacaaaatgtccttcgaattgtactaaaggattgatttttataacttcatcgagttttgaggcccgaaatttgataacatgtgttgcttttataactcctttgttagttaattcggttaacatttcctaaaatgtttaaacaggcgaacaagatctcaatcatgccccttttgtcgggacagtcttaagcgagtgaactcgggcgatctctgggtatatactgacactagagacgtagttgacatggcaacggtgacaagagacaacctaaggaggctcttcctgtatgtagataaattgcctcttgtcattcccgatgaccttttcgacaaatatgattctcatctgagatgattttcgtacacaaaaccccgaaaactaaagaaaaaaagaaaagcatttgaatgagtagttgtaatagtagtaactcatctactttcgcttacctaagaaccgagattttgctcggtggaaaatttagaatcagtttcttccctcttctgatgagaagatcccgaccagaattattgttggtcggccggtgaagttaagatagtagtttttttttttttcctttcgtttt

SEQ ID NO: 307648 - DNA, 2469 bp, Cannabis indica
ctgcatctgcgtagccaataagttatgacccacaattattagaatagaacaatcatttatcaatagtacctttaaagatgatgaagtatgtgcttaatccctttctaatgtctatatgttggagcataaataaatcttgctaacaaattgataaagaaagctatattaggttttgtatagttagcaagatacatcaagcttgcaagtcatgatactatccctaaaaacttagtaaattaattaaaaaagtcaagaactaaaccaattttcacttataaaatatagtaaaataagtctattttgtagagttatcaattaccgttaataaaaaagagttataactctaatttgaaaccattgttgggtttcttacttatcggttgcctcactaggcaacgatagtgacattagtttacttgttgaaaatgagggttgatggatactttataagtatcgagaatactttgtcttactagacaaataattgaattattagtattgttatgtactgtaatgttatccaaatttcttcaaggtgatgtggcatcattctaggtgacatctggaacacatttcataacctagatggacagttctactcttagtaggccgtatagaagagttgactctcaaggtcaaagacaaaagttgtggcatccgagtagagtacatgaagacatcggaccaacttctatcaagcaggtggcttgcatgcacttactggggaatgcaaattagcaatttcaaagatatatctcatgtaatctcaagcttgcaagtcatgatactatccctaaattcattagatagattcgtatctctagagaagaaaggaaatctgccaagtttctattttgcttattgtaattatagaaattaaaccagtttcccatatttcttattagttttaggaaaccaatttaattcatccctgtaaatagtggattcatctcactatccagggacacaaattattttcaaagagagaacactcaagagagaaactttgatctaagagcaaaatactcagagatcgttgtaagagcttaagagagagatcaaggcttccgtattcatcttctcataagtcaatgcaactaaagggaattaggctattaccattaataaagagtcgaacctctatagatctggtgttttcttttctttatattatttatgtttagttattcaattaatcttaattgctttaatttgactcttggtcattgattaacagcgaggtcaacattttagtgctttcattgagagcaaagacacacaagtttttgttttaattctttttcaggacacataatagttgtgcaaatgcaaaggggaaatcagattgatacaatagatccaatggccatggatccaaatgtgcacacacctgcaaaccccagagatccaacaacgacagatcctactctgactaatttttaaccaccaacaggcccataaattgtaggtcaatgagtgactacccctctggctggttcactccaagcgtgcaagaaactagaactacaagtactcgaaccgagcaaaccatccccagtactgagattccatctgctacaaactctcaaaggccaatcggtgatgacaccgagctatagaacttttgtgctgcactaaggcaaatacaaggccacaataacactctttatcatgatcagtaagatacttgagtgactataaagtttgccttacggaacaaagatgccagttcaaagaatggcaagattgagagatggaaatcatgagagtctagcaagcaaaaattgaaaaccattttaggcaggccaccatactaatcaagagagcttactaagtcattggtcaacaattagtagtagatgtaaacattcttcttgggccacaacatgggctagaagaacgtctagctaaacacactcaacaaacctaagttgatggtgttggattatattttaccaggatctagatttactaccatgtatgttatttgacatcctaaatatgaatttttaaaataatgtaatttaaacacatataaagtttgagaaaccttacagtggttgcagcggaattaaatgactcattctgctcagatctctaacccttgaatcctttctgtagcagagtatcaccaaaatctgagcccgaaactccttccttgtgtttggattcttcacagtcttacatactgtgattgaggaccaacttgatatgtgtgggcatgtactcaatcactaatggctgaattttatttggtgaagaaagactaaggatttcgaaaatcaagagaagaaaagaaagaagaagaagtctcaaaacctagagagaaagaaagctaggttttcttgcctttgaagcattagttggataatgagactttcttttccttttatactacttctcttagggttagggttgatttatttggaataaaaaatgataaaaaaaaatggaccaaaattaccatct

SEQ ID NO: 307649 - DNA, 1519 bp, Cannabis indica
catcaaaattggaaaatggattatggaactttcgaggcttttgaaagattgtgtgggcacaagggtgaagtcttgttgtccaaaaaattgatccttaaattcctttttgtttggaagatctacaatgatcatgcgatcccccgtaaaagtttcaaagtaaaagaagccttcaaaataatttttttttcacttgactaaaaagcaatgttaacaggagctaaaaacaaatatttggctaatgggtatttagtaagataatggggctcaggccaagcggcttctagcaagaaagaatatttaccctcaagaaagaaaaaataaagagacaatgagggcatacaaaggggatgctgctaattttgtgcttgatgtacttggataacaatggtaaaaatagtggtaagaaataaaatgctagtcttttaagtaaaatcgtaagcactgtacgattaaaagatatatttaatcaaggacgattaaattacaaggtagttggaaagaacatttatcaccaaagacatggttaactctttatcgggaagccaaacaccaccaaagcaaaaatttaatgagcttacttggtacaaaaaggacaagtgacaactatgatttaaaaagtcttttacaaaataaaaatactttttagggggcttttgttatgcccatatttcgagcgccaaatatggacacaacacgtgtcatataagtctaaaagaagaaagagaatagtaaatgtgaggaatgaataaataacatgcctcgggataaactacggttaaaaggatgtgataacgtcatgtgatactatcaatactgattcgcgagaataacaggattacaagttaaatcctcataacttgaccgatatgaacaaatattttgtgaggataacgggattacaagttaaatccttagaacttgaccaagatgaacaaggcaagtgaattacgggaaagaatgagttaagtagaaaatgtcgataacgagtttctttaagagcttgtaactcattgactcacatactcgtgagtagtatgttgaaagactaagagaaataaacataatacaacttatatcaaaagactaagtcaaagggttgccctgtaaagactatagcgatgacaaatatttttaattaacatcttgcagaatacaaccagttatcttcaaataccgttaaataatgtgagtcatagctagaatgtgtcatcttggtaaaggctaactactcctcgataagaataaaaaaatggttaccaataattattttattttatctatatgttgtaaatataaaatatggagattattcacatttcatgaacaattacttagataagatcaaaggagaataattgttattcttagaaccccttcaaataaagagagaacctaaggggttggagattgatcattttggggaggagagaccttgtgagattgagtgaagtttcatagttatttctctatattctaagtatatttttaagaaatactcaaaaataataatgactcgtgg

SEQ ID NO: 307650 - DNA, 3607 bp, Cannabis indica
tatatatcatatatatatttattttcttcaatagtgcatatagtattaattgtgttagctattcttttttattttattatgttttttccatctgctgaatgctgatcaatatatagtatgaatccagagggtgttgttgttagggatgccgatataattgagagaaaaactataaactaggaaaatacggtgaaaagtgatatagttaactaacctgatatagttagtcattgtatattttagaaactataacaaaattttgattttctactatattttacttttttttagaagaataaataatttcattaaaaaaggaatgaagccaaaaacatctaaagatgaatgcaaagagaaccccattgcaataagcttgtcaattttagtattctgcttaatactatttaattgattacttcattttcttatttaaaatataattgtaaaattagattaaattgataattgttttatgtaattaagtagttgttattgtcaatgaacatcaacaattttcgttattcctattatttattaattagttatatataatatgtgttatattaaattagattatatactatatttttatataatattatattaaattttaacttatattaaaatattatacttctaaaatgtctataaaaataaatattaccacatataattttatataaaaatattgtataatgagcacactattttatgtgcaaatatggttatataattataagtgtaataatatgattggtgtacatttttcacaaatttattatatactctagtatttttggtacaataattctaataatttaacattagatatcatattaaatacaagattaaataaaaatattttgcttaaactcatattttatattatttataataatggttaataataaataattgatgatataattatgtatattatcaataaataatttatgattatttttaaaataaattaaaaaaaaagttttagaatgaaaaagaaaaattgttctaatttgcttgaaatctatttcagtcaatagtcattgatttaacatgcactaacttgatcatgtttcagatatgggactattttccgaacaagcatagcaggacgacccgttataatgtcagctgatccagaattcaacaatttcattttacagcaagaagggaagctagttgagttatggtatatggacaccttttcaaaaatctttgcacaagatggtgaatctcgaaccagcgcagttggtacagtacacaagtacgggagaaacatatttctcaatcactttggtactaaaagcctaaaagaaaaactcatacctcagattgaacaagtagtcaacaatgctctcacttcatggtcaactcaagattctgttgacattaaacgagttgcttcagctgtaagttactttcagtcttaccaatttaatattcatggtcttactacttaattaaccctgtaattatttatcaacagatgattttagaatttagcgccaagctagttttcagttacgatgctgaaacttcacctataaatattactgaaacttatagtagaatcataaatggtttcatgtcttttcctttgaacatacccggcacagcataccatcaatgtcaaaaggtaagaatcgaatttttcttctttatttgtaccatttatttctattgaaacatttgaatttattagcttggctttgttatatgcaaatttaggaccaaaacaaagtagtgtccatgttgaaggataagctaaaggagagaaagaatgcgcccgagttgaatcatggtgatttgttggatcagatttgtaaggacatggaaaaagagaagttcttatctgaagatttcattggtcaactgctttttgggggcttgtttgctacatttgagtcagtttcaactgtgattacattagcatttttgttacttccagagcatcattcagtattggaggagatgatagtaagcaaacaaagtttgactttaattgtctttttgtacgaatcttcttcacatgtatagcattggtcttatgatgactaattatgtttttcttcattttatgttaggcagagcaggaagcaattctcaaaagcagagaaaatacaaactcttcactcacatgggacgaatacaaattgatgccttttactcttcatgtgagtcttacaataaaatgaatttattgataaattaatttcagctgccatgagttttgacatgcttatcgatttgggaaaacatatacaggttatcaatgaaattcttaggctgggaaatgttacaccaggattattacgcaaagcaatcaaagatatcccagtaaaaggtttgattgatcattatatgccttttttttttcatgtaataatgtaaatatgtattaggattaatgggatcatattggttttataggatttactattccggctgggtggaccattctgttggccacctctgctcagcagttaagtccaaacacattccaaaatccgcttgagttcaatccatggcgttggaaggtttgattttctcaaataaaactttatttcagcctttcactaataaaaactaaaagaagctaatcatgtaattgttatacaatttgtttgtaattaggaactcgattccgaagttatatcaaagaatttcatgccttttggtggaggaatgagacaatgtgcaggagctgagtatagtagggtgttcatggcaaccttttttcacgtcttgctcaccaaatataggtagatttttcattatgtaattgctttgtttttttttattaagtagagtagttacacaaagactaaacaaacttattaatattgtggattgtttagtaatttcttttttgtttaaataaacttttgtaggtggacaaaaatcaaagaaggaactatttctcgaaatcctgttttaggatttgggaaaggcattcacattaaattttctaagatgtaaagagcgaaagaccaaagtggcctgtcattaaataaataaatgtccttgttttaaaaacttaattacaaaatgaacaaatgccaaaatatgaaaattatgcaaatgacttactccttattttctatggtattttggcatatgtaataatgttagagacacttaaattacacataatgtttacacacagtggtgtgtatttaattttagtcatattagtgtgaaaaattaatgaacctaatgtatgcaatcacccaagtaatataataataagtgaatagtctcttcagggattgtaattatatatccaatgcaattatcaattaccctcaacatagagtataagaaaaataaattggtggtttaatgataaaaaaaataacttggtagaaattaaaatttgcttgaaatgtgaccagattgctagataaataatagcacactaaaagaaagtgatagaaaaatagacttaattaaatctgcccacaatgttatagcatcacttcaacaaaatgcaccgaactaagaattttgaaaaaacttatgagatttttccaaaattcgatgaataaagttttactaccaaattaaatatattaatatattttaagaacacaatttaaagcac

SEQ ID NO: 307651 - DNA, 723 bp, Cannabis indica
ttttaaagaaattaatgtatagtatcctgtaaaaatatgctgtaaaaataaaaataaaattaacaatatattttaaagatagaataaataagttatttgaaataatcttctatttcggatgataaagagaaaattttgaacttattattatgaaaggattagttggtgatcactttgaaaattgaactaattattactatatgttatgagtgacaattgaatatgattacaaagattagctaaatccattaggaaaatttacaatatgactgacgttatatcaataagactttttcttttttcacaaagtctataactaaatctttgactgtgtaatgtgattagtacaaccacaaaccccacctctcatatcatgaataatgtatatttaaaataattataacacatgttggtattttgaagaagataagaaggggtcactatcattattaattaatttactatgtgacatatctctagtactacatatatagtcacacaagtgataccacataatcaccattatcatttggtaaatagttttttaaagtaagtatttggtaaaatgatagtacattttagagtaatgcactcaccctcaccttatcaaaaaaaaaattcagcaaatcatttaattgtacaaaataatataacatacactttcttataggaatgtcaatgggcgggtcgggatctgatccgactctgatccaacctgatcca

SEQ ID NO: 307652 - DNA, 1140 bp, Cannabis indica
tgacaccacccctcaaacgaaagggtgaagttctcacttcgagtttgtcgatcagatacaatcttgaatgtgctaatcccttagttagacagtcgactacttgatctgatgggggaatgtagcaaatttctaattatttcttcagcaccttatcatgaacgaaatgtatgtcaatttctatatgttttgttcttgcgtgatacaccgaatttgatgctaaggaactagcggtttgattatcacaccatgtgacaggagtacttggaagcttgaaattgagttctctgaggagtgattcaacccacgtaatctcagatgcaacatgagcaagagctctatattctgattcggtgctcgatctagagacaactgcttgtttctttgatgaccaagcaactagtgtttctccaagataaacacaatatcctgtaattgatcttctgtcatcagggaacatgcccagtctgcatctgagtaaccaactaaattcaagtgatgattgaagccaatgtgaagaccgtggtggatggttcccttgagatatcttaacactctcttgactgcactccagtgacttgtggttggtgccagcagaaattggctcaatttgtttactgcgaaggcaatatctggtcttgtatgacacagatattgaagagctcctattgcactcatataaacagtaggattaggaaagaacttctccatcaaacttcgacatagatttccctacaactataggtgtggggcacggttctatattaagcatgtcatacttatgcagaaaacatcatatatacttggattgtgttaaatatagccctgtgttgtcacggtagacttcaattcccaagaaaaagtggagtggtcctaaatccttgagagcaaacttcttattcaacttggaagtgaactcattcagccttttttcattgtttcatgttataatgatatcatccacatatatcaacaccatgaggatgatttcatctgtcatgtagatgaagagtgaggaatcagcctttgagttggtgaaattccattggtgcagggtcttctttagttgattaaaaatcgttctagatatgaacatttgtcccaagttcatgttttcttatgtcaaaccacaaaattacttac

SEQ ID NO: 307653 - DNA, 705 bp, Cannabis indica
acatatctttcatttgcatttatatttactaataattaatacacttgttggatatttatttatgcaaatcatatttattttgactataaatgtatagattggtcaacaaaggatgcagtggaaatcacactaaaaataaattatttatattaaatggaagaggacatcatatcatatgtctttttccttcaacaaactttaggtacgtgtcttctctacatacaaattaattatatatttccaaatactatttattatatcctctcaaaaaaaaatatcatttattataaaacacatgaaaataaaagattactactcataaatcgataatgaattgtttttttaataaaaaaaattcaatgaataatgtcacacttatatatatgtacaaaatatctcttcattattgtcatttttaataataataataatggtggaacttaacagccacataagattcgacctttgtaattttctaataataatttaataaataagaaaaaagtaagatgatgcaacacgaatcttttttcatcttaaactcaattatattttctttaattatacatccatttaatttctaaaataaacactgttattcagatttttttaatttattcactattacctttttttataaattaaatacatgcttctatttttttctttctcttatttcttatgtatatatatatttatttattt

SEQ ID NO: 307654 - DNA, 1754 bp, Cannabis indica
gataactaatcagattgtaaagagttttatttagggcataaaacccaacagaaatggtataccattttttcactgtagaaaaacaaagaacctccaattttactcaaacctaccctaaacttttcaaaactctccaaatacttgtaatcatccatatgaatcattttcaagtgacagaatcgaaaatagcacaaaaatacacaatctaccattgttgagccaagtttgagttcaaaactcaaaacttgctcaactcaaccaataatcaacaaaatcacttcaaacaagcttagaacaaccctactaaactgcaataaacacaacaaataaaaccataatttgtacaggagctagctcattcatttgcaagcttaaacctagctaaaacatactaaaatcaataggaaatgagtgttagggcttaccttaggattgcacgtcttgaacacttgctaaaaacctttgaattgaagaaatcaagctaggttttcccctggtttcttggctaaactaaagcaagagagagatgctaagagtttttttttttttttttttttttttttttttttttttttttttaattttgtctttctttgattatcacttaatttacaaactaaagataattttaaattatcttatttcttttggtggcaagctaacaacaaaagagaaagccacctacacctcaaaaccaaaatgactaaaatacccacacttaaattcttaaatggtaaaatggcttaggggtaaaatgatttaacaccataaccccgtctaatcccaatattccaaatatcaacttatgaataccccgctaaataaaaaattactaaactaacccatgtgactaaattggtcattcgtcacattttccatcgtcgccgagcaaaaatataaaaactgtaaaattttgcatacaacataaataatacacttacagtttaataaaatcttaagaatttagattttacaactctaattcccatttttgaaaatgggaccacaataaatataaactcgtgtataattattaaatatcaataattaatgctaattgcctttactaatctataatctaattatgtgatcattacacttttggcgagatgcatcacctgaccacttcttcaatgcgtgcaacatcctcagtgacatgattgtacaaaaaaataaaggaagtatatgttagaaaacataaatcaagtaaggacaaacaaagctatgtaaaaattgtctaccctgcacatgtacagaagcaccctcttgaataagtaaagaagaagcatcctcatcagaagagtcctcttcttcctactcaaccacaatagctttttcctttccttccacctggacggaaggatgaacaacctctttacgaccatctctgatcctgataagccgctcagtaggtacttggtcactttagggagccttcttatttttcttcctctttggggcttctttcttgagtgcgacctcctctcacggttcaggcacaaccctttctgttacttgcatggtctcttgaccctcctcaaatggataaatcttgtacttaataaaattggcctcagtagctaaaagcaaaatatttcgagcatctgaaggaagttggagtattttctgagctcttttcctaggggtgaaaatcggtcggttatggtcggttttaacaattttataaccgactggtcagttacggtttttattttacgaaaaccgtaaccgaccgtttagaaattataaccgta

SEQ ID NO: 307655 - DNA, 1469 bp, Cannabis indica
atgtaattattcttatatagaggtatactttgataatacgagacttaaaaaatatataactaattacactttagaggttattcttatttataactggcccaaattaggacttgatttttttataacagattagaggttattcttaaataaagtattcttaaataaatgttctattgtactaataataaaaatataatacatccatctcaacaaaaaaaaaaaatactctaactcgtaccttactgtacacgatggataaaagtcacaccaccaccaccaacctccgaccaacaacattactttagaggggcaaataccttaaatatatgtaaaaactccacctgaattcagtgaggtttaaacctcaaagctatgattgtccatcactaagtcaaataatcagtcatcctaattaaattaaagagtatccaaggtgcttagcattttcataaaatatcatatcgctattagtttaatttaatatcaagtctcacttattttttttatatttatttttaaataattataaaaagtataattaatcatttataagacattattttatagtagtgtttgggattatgatacctaataacaatacttttaaagtaattatttatctaaccactttttttgatattcagacaaaaaaaagaagtccaattttatttgtatatgggaaacaaatcttatatcttaattttaatttttgtttttataatctttttatttaataatatatacacccaaaaattactccaaatattacaatgtagtaatttaaataaatatgatcaatttaaagtaagaagttgtgacaagactttagaagtgtgtaattagtggcgaagcagccactaatggggtaggtaaaaaaactttttctcaataaaaattggcattaatgaaaaattattatttttattgaagaataatatgtagggacaaaatgaaaatgatataataactacttgatattgagattgtgggtatcgaaaatctacttaatattgagatagtcaggtagcatgttctgttgataattacgacagtacaagatgaagatcggtgttaggatctgtgtcgaaagttttcctgacaaaggtgatagtcaggcagcgagtttcgctggtaataacgcgacataaggtggtttcgctggaggggagaccacgagtatatggtccttggtttgaggggagaattattggggtatcaattaacccaagtctcacattgaaaaaataagagttgccttagataaaagtgttccatgtactctattagtatgaggcattttgagaaggtgccaaaaaaacaaaaaggaaattacactctatgcccacttgttttataggtcatatcaccattatgtgcattaggaactctgattttaataagttatgtgaggttatgtttggtactttgattataaaagaagatatttatcaattaaaattattttagag

SEQ ID NO: 307656 - DNA, 1108 bp, Cannabis indica
ttttctattattttaatgctaatcccatgtctcgggtccgggtccctatctatggtgggtcctacgtctcggtcgaggttaaaattcgggttaagatttgggttttcgtgtcgggccctattctgtgtttgggtctgggtggcggtcctaatctcggtccagttcctagtttgggtttgggtgtgggtggcggtcctagtttgggtcctgggttttggggtgtggtcttgggattcgggtcccgatctgggtctgggtccggatctcggcctaggtccaagtctcggtatgagttctggtccatgttttggtttgggttttggtttgggtttttgtttgggtcatggtctgggtttgtgtccaagtcagagtcctagtccctttccagtgtcccaatccgctttcgatttcagtatgaatttcgaggcctagaactgggacctggaaacaaaacgggccctagtctcggtcccagacacagaccttgagctgggactcggaccgggacaaaggacttgaaccggaaccagaccggtacccatgaccgggatccagatcttgacccgagatctgagaatcggggtttagaccagaactgtatttgtgtctggatttgggagtcggacacgaaccctagaccgggaataggacacggacccaaatcaagaattagacttagacccaatgacccagaaaaggacccagacctggacctagacccgaactcggacctggacccaaactcgggatccgatccctgactctgactcaaacccagacggggatccagacacggatgggggacccgaaccaaaactcgtacctgaacccaaacccataccaaactcaaacccgtaccataacccaaacccgtacccgaactcgaacctagactctgaccgggatcgaaaccctagagttggacccgaagccaaactgagatccggacctggaccaagacccgaacccaaactcgaaccaagacttagaccctgacctaaatcaaaccctgacctggacccgaactcgaacccggacttggaaccagaaatgctatgaggaacaaaatccgaacctggacccaagccagtgttggaaatattttacc

SEQ ID NO: 307657 - DNA, 1090 bp, Cannabis indica
aaaaatatatatacataatacatttgaccaattagtaacaaatcacttttgactttaggtggttgacactttgggtaggcaaacttggttcgagtatcccatctatttgtagacatatacatttaatgaaggtgcatggtggtgattttattatattagtattttattagtaattagtcttcaattataatttttttaacattgtgccatggattgggtatactctgggagtcatgtggtcaaataagtagagaaaaacttctatggcaatcttgactcttttcacataattggatacatagcgaatcatacaagaaacgtgttaaaattgagataaaataaaaaaaaataataaataaataaataaataaataagacctagttataatttttattattattatttattattatttgttctaagaaagagcagccgtcaaagtggaacatcttatatagactaaattaagttagtgggtttattaattaatgttttggccaactgtgtgattaaatctagtaattaagttgaattctatgattgttggccaactttgcccagattgtgtccacttgttctaatactatatatacacaatactatgtttcacaataacgctaatggataggattatatatattatatatacgttgatctttatgccttttttcttgactaattgttttaataagaaaatttcagtaattgttcacgaattattcaccatttttcattcacagttgagtatttgaataaatttaattacaaatattaattttaaaaatattaaattattaaattttaatataataaaaaataattagaaaaaatttaaatttttatgtttaatttaattatttatttaaaaaataacaaaaaatattttttttacaataaagtaaaatatatttatataaaaaatatttactatttagtactattttttaatttttaattttttttaaatttttaattggtttagtttcttaaaataggttgtcagcgctagttgcaatagagatttcttatacgatttttggtttgcaatttaggtttacgagcgctagttgcagtaggagtttttattgt

SEQ ID NO: 307658 - DNA, 3025 bp, Cannabis indica
ttttttttgcacattttttgtaattatgttgtttttgttgtacatttatgaaaaaagccatattttttaagcatgtgaaataaaattttccattacaaattagtagggtaccttcgcaaggaagttcaaatgtttagatagtacaaatattgaacgtattctctaatggttgtaccttttttgttttttgtatttttttgttatcaatttagtaaagaatctattatttttagtgagcatcatctttaccatgggtttctcccgacaacaaatatcctcggtagaagttctaccaacaagatatcgttggcataaaaatataaatgaattatactttaaaattacaatccatttagcaatttccccagctgggccctccacctcacctttcttgctctcgtgaagtcttttccatacttaagatctatcaatatcgataatatggtggcctgcctctttctccatttgttcttgtaccattctcacaccacctcatctggtgcgatggttgtaaacatttttttcccttctcttttgggctttttcctcttctccgcaaattctgtactcaatctcaatgccacaaactctttccatttgtcctcatcaattatctcttcatacaatctcagtggcttctcaagaaggtggggagccctatctttaaatttgaaaatacctgttgttaggatatttttccaatccctccatttttctccagctttgaaatggtttgtttcgtcgccgtctttgacaaatcaaactcagactgaaaaaattgacaaccatagttataagtacaaatcataatcaacagtataatatacgaataataaaattaatattacctcaatgtaattacataattggtttttaagttcctcatccccattaggccacgatatatctcttaggggaatattaactctcacccatgccccaattcaggtaactgatgcagtcgctctttttccttaatgttgtctatagttgttgtactcaacttccatttttttcccttgctttttgttttatttatatcgactcatttgcttctaccacgagtatttttttactttggttcttcaggttcaacacttggttcttttggcatggatggtgcttcttcacgatcataaacgaaatgatctcaattattccaatccttgtctggtgatggttccataatgaatagtcctacacaaatttgaaaacatacaaaaatatgtaaattgatagttgaaagtaaatatatcaaaaaagactaaataccaatacgtgttcaataactcacgtattgataggtttgttcacccatcatcacgagatgatataataccgtccccaacggtaacatcaataggttatggagtgatttgatgatttggtcactaagcattagatcatcgccattagactcttagatagcataatctttcagttgtgttatcaagacaactgacaagtgtgcatctaatgaattgctcatgtaaaacgcttgagtggcttacgacaccattataaacctaccagacttgtgaccaattcgattcaagtccactaacttgaatccaaattcatcgtcattaatcccatcatcattcctaacccaaccataaaggaaaacaaggattcgaaaactactgtaatctaatttccaaatttcttgaattacactgtaaaaagacatgtcttaataagatttttttttcttttgaactagatatttggaaagtcttagcaactatcataacaccgctattctgtattttttctagatttatcacggtcttgggtgtaaaattgagtactatttatatagtacgatcggtacttgagtacatcacacgaaggacctcgttgtatgcaaagtagtgtgttaaatacgttgcttggggattcacacatttccacatacaagtggattagtgagaagatgtaaattaatataatacgtaacaaaacaatatgttaataatatattttttaaccatgtattgaaattttgataatgttcatcttgtacccatttttgattccctgccttagtcggattagtagtcttgattcaattaaaatgttctcttcaagtatttgatttattttagtttcgattgaatattattattttttaagtatgaaaaggtatgttaaacttactcaatgtatggttggacctcatcaatattttgcgaaatgagtcagtgcgcttcttcacgatcagctcagcttacaccacaaacaaaatcccctctactccttctacttatttcaatatcggcctgagtagggtgaaagccaataattgtaacctttgacaagttgtctaagcaaaattcaatcgtctcttcattgatgtatgattcaacaatacaactcttggacacttctatttctgacataacccttcaaaatttttatgtatcgttcaaatgaatacatccatctcatgtacataggtccacacaactacacctcttagactaaatgtattgttaggtgaaccactatgtcgaaaaaagaaggtgagaaaaatagtttcaaatgacacaaaacttctacaatttctaacctgaaattctcaaatttagtcacatcaaccactttataataaagagatttgaagaacaaagacaacctcgtgaatgcatttcttaggaaacacaaaacagatactcactggtagaatatgttgaatcaatatatgatgatcgtgagatttcagaccactcaaaattaatttgtccatatctacccaatctgagacatatgaggagtacccttcaagtaccttcacctgggagatagaacaacacaaagattgctcttttactttagttagagcatgacaagcgggtggtaaaaatgtttgtccaccaacaacttgtgggtctaaattggcccagatccctaactatttcaaatctaggcaaaatttgattctatctttgctctgcccagtattattgaacaaggtaataagcaagttgtctaacacatttttctcaatatgcatcacatctaa

SEQ ID NO: 307659 - DNA, 2345 bp, Cannabis indica
aaaagtaaaaataccgcctgagtatttttgtaaaaaaataacaaaaattaatataccatataaatttctctacttataagcaaaagttgtgtggttaactatcaaaaccacaacttcattttccattgccatgttaagcctgttattatgtattatatattatagtgagggaacatgttttccttttacagtgtactattataaattatatttttggtgttggttttaaacttatacttatatgtgtcggttcataaaattgacacttgtattattgagacaaaaagtccaatttttcaatatcagttctaaattgatactaataaatttgggtgtcgattctaaaccgacacttaaagtatacatatattttttctcatttagtattattttaaaattgatactattgagttttgttattgttttataaccgaaattaaaactccctttaatgtcagtttaaaatcgacacttaaaaagattaaaaaattaaaatcaacaaaacttaaaaaaattaaaatataatgaaaacattacaataattaattggtattttaaattaatatttaacgttttatataaaaaaactttaaagcaaaattcatttaattttataaattttaatttaagcatctttacaccaaatttacaagcattatacactgtaaatataggtgtactcaagcaaatttacaaacatttgttgcatagatgaagaagaaaaaaaaaaaattcagatggtatgtatattttagagtacttaaaacatctctaatattgaaaatgttataaaaaaaatgtttgatgatatgaatatatttttgaaaaaatagtactatttaagatactcttaaaggtgctctaaaaataaaatatgtgagtgctcttagcaatggaccatatatggtcttacttgccgccttgtgatctgtttacggtttggtcaatgaagtgagaggaccgtacgtttataatcttctgccatcttattcttatctatctatttatatatatagattatacttaaatggtaatggttttgttctatacataaaataaaatgatcacgtggcatggctggctgtttagaccactcttgatttacacatgtagtgttgctgttttcctttaaggttctatggttttttttttttgttttaatttattttttgtcgaagtagttagaatcactcatgaatttacgatgcaaatcgccactagtgctggaaccttctcgaaccaagatagttcatcgttcaaccgcagagcatgttttgtcaaaccataagtcgctaaatatctaaagcgagccacataagctataacattttcaaacaccgctcgtagcttattgaaatacacctgaaaattatttgagttattaatatgattaaatttaagattattctataaggctattcattaattttcagttctaagcaaaatctatgtcaattactgttttttttcccttaggacaggttgtacacattgaatttgtttctttagtagttcaataattttagtttattattagagaatattgtaagtttgttatttagatttttatgaatactctctctaattcatgcacctggaacgattaatagataactgtatatagattaattgtggatacttttacccttttttttgactagatgaggttttttttttttgtaattgtatagtaatattttaattatgtatgattttatttggtttttaatggtattggtcattagtgctttaaaccaaaaaaaagttcgtatatatatatatataatgaagtaagatatagagagagagagagagtgacatacagaatacagtctgccatacaaaatttctgtttcattaattaattatttgatattatattttataaatacatagtctatattatataaacaaaagaaagtgagacaaagattacctctatttatagttagtcgggtaattaagtttatttagttcattaatattcttaaagcttttacattcatttatttgtttgtttattcatttttgctcgaatttgtttgtttattttttatataaatatttttaatattttatatttaaacgtacgtacatataaatgagtagagataaacaagttatatcaataagtagaaatttgcggatcggataaacacctttaattaatagttgtttgtatatttattctatataaagtgtgcctatataactgaattcttggtttatgaaaaatttatgatgactttttatttatatataataaaataattaaatattatttatatataataaaataataaaataaaaataaaacaaatcttgattacaaaacaatcagatga

SEQ ID NO: 307660 - DNA, 890 bp, Cannabis indica
acgtcaaacaaaaatggaatatagtacttatatccattatgagataggcacaaagatggaccccaaagatacggagtgaatcaattgtagaggtgctgtaaaattagtttcagagaatttgggaaaagaagtttgtaatttttcctaaacaacaagcattgcacacaaattgagtcattttatttatattcgaaagattacaatgagacagaacagacttgacaaccctctcagaagggtgaccaagtctattgtgccaaagctcatactcattatttgacttattacaattgacacaaactgaggagtaacaagtttgagaggcagcagggacattgttgacacaagtggaggctgtgttggcataggcagagacagctggagtaacagaatgcttggagacacttgaagatgggcaaggggatggggagccagagagctgaaactgactagagtcaaaagtatacaggccattgtgatgtctcccagtcagcagagtagtattgctcgcctgatccttgacataacaagtgttgggatagaaaacaaagtacacattattatctgaggcaaatttggaaacactaagaaggttcttggttatttcagggacatggagtaatttgctcaagattaaaggttttgaacaagaattagagtgcaaataagtgttaccagtttgggagattggtaaggcagctccattgccaacaaacaattgatctggcccttcttgttcagtcggtgtcatgatgttattgctgtgaggagtgcagtgattggtagctcctgaatcgggataccagttatcatcttgatcctgagttgtatgagcaatattagcctgcggatgagaagaatcagtagctggaaaaacaccagtgaaactt

SEQ ID NO: 307661 - DNA, 2061 bp, Cannabis indica
caatacgacctaatacggcgttccaaacgagccctaacagtaaaaattaatgcaaaattgtaattaacttattacataggaaagtgacttttgttgcaccaaacttaataatgccattgttatgaggttagttttgttgggcataacacttcaaacaggcccaaaataagaataataagaagtgactttttttgcaccaaacttaatgatgctattgttatgaggttagttttgtttggcataacacttcaaacaggcccgaaataataagaataatcagtgaggcattggccttgtgataatcttgagtctcccctaatttgggtgccataaatagatagacgtaagcctctcttctcttcgccatggcatgagcctggggccttttttttaatgcctcaccctaaggtgggcctcataaaaacctttttagacatcatagcctagttcacttttctctccaattatacagtctcccatatgcaatatttgatggcccattccatcctaaaattttaactagcacatatttagcttcccacaaacaataataaaaatagagatttctattaaaggactacttattactactaaatatttaatgacaagtcactatattagttaggaattataccaagattcgcattcttcatgtcatgactttgttcacttaaatcaatttaatatgaaggaaatatcaaatctagttgatctatttaagttgggagctaccaaccacccaagctttcagcaagtgagcaaattatagtcatatttaggtcatgccatatgtggtatcaacaaagaaatcttcttttcttatatgttacaatagtgatttgcacaaaaagtacttagcataacaagcttcaaagtttcattttcaatttcaatttcaaaaaataaataatttgtttttctttccccaaagacaactctaacatacttatctaaggatggtccaattaacttttctcgccaattatatggacacatcatatgcaacatttgatgggtcaggccacactaaattcttaataatcacataattagtaacgaacataagtaaatgattagatttctaataaataaaagtcgttacaagtaaacaaaataccataagcatgtacatagaaaaagtcaaattaagagcacaattaaacaaataagaaagctaaatatataaaaccagagtccactagactgaaaaccaaaaccatgtataatatttccttctatcctggtacggcataaacaaaagataaaaaagaaaatgcttttttgaaccaattcaaaagaaaagagaaaaaaaaaaagttattctcccaaaggcatttctttcattagccactccatgctccatgccataatgttaggtttggacctatctttagaaagaagaaagaaaagacaataaaagtagtggtgctgatttactagctggcttaaggtttgaaatctaaagaatttttctggtgggactgtgctccaaattttacttttactggcattagtttaaatactgttaaatgcactagttgcaaatgaaagctagaattgggtgagtctcttatcagtgttctttattttcctctggtttgctgatttatgtggccttttttttaggggtttggctgctctgcccaccccaaaagtgaggggttattttttgttaacaaaaagtcgcctaggttcaaaagcatataccgcatgttgcagggccttaagctattttcaaatacttctggtttacaaccaaacagcaggaaatctgccatttattgcagcggcatggatgaaaaggaaatcaaaagagtagtagatatttctggtttcagcaggaatgagattccttttaaatatcttggcattcccaattgtgccaagaggatttcttcagctgagtgtagattgcttgttgagaatatgacagctcgaatcaaaatttgggggtaactagaaatttgtcatatgctggaaggtctgttttgatcaattctgtcctcctaactatccatgcatattagagtcaaatcatgattttgcctaaaagattattac

SEQ ID NO: 307662 - DNA, 1690 bp, Cannabis indica
aaataatttccaacagtaaggtcacagtagagacacttgacgagagacttgaagaaggcagtgttaagagtgtttcagcatcagtcaataggcgtggttgtgggatggttgtagtgtttaagcgagggatggttgaagtaagtttggtacgagcaaggcgagtcaacaaaggccacacatttccttttgaaaagtcagtccggtatttgtcataccccgttgtaggaagcttcgctcttttcatccaaggaccgtaagggagatcatcatcgttaccatggtccatacgttccatgaatttgatacacttctcaaatggatgtccaagcaaaccacactcaaaacaaaactccggtagatgctcatatcggaagtcaatccaaaactcatctctaacttttggtaggctaatcattcggccacgaggaagtggcttattgatcaataatttcacccggatccgaagaaaaggaccccaaccttcatcaagggaatcctcatagacatccaagaactcaccaataaggtttcccaatgcttttgcaagagtcttggacttgcttaagaagggtaatcgatagatttgaacccaaaatggagtaaaaatcagatcatttattgagacattctgcagagcacttggggtgtacatcacaataagatgattttgaaagtgcctcggttttttgttcatcactaaaaatttatcaccggcacaactaaaagaaaccttgaacatgtcctccttgtagacagaaatcacagcaggaaagcgacctttccaatgtcccgacatttgatcaatgaaagtcggtttatggacataagattcagtgagaacccgtgctttgaacaggtgttcagaatgctgggtaaaggtagcagcaacctcctcaaacagggtaaaaatagagccctcatcttctgttaaggacagagtggtgttgaaggcattcgcaatggatcaatggcagaaaagcagcaaagagaacagaggggctatcggggaaacagggatcgattctcagggagatggtggcaagggcggttgaaggtggagtaaaccagaaaactggaaaaaaggggggaaaaaagtttgaaacgaaggaaagttagttaaaaagaaaaataaggtagttataaggcatgactgcaacagaccaaaaaggcacaataaattcttgacatattagaaaaaattacatttaccaaaaaaaattttaaatataaaaaaataccataagagagtgacaaacatataaatatcatatttttgtagctttattatcaaattccatatttaatataattttcacacgtatataatagttgttgtttcgtctatcctttataaatatattttaatatataaaaaaactccaaactaatttattaattacatcaaattcaaataacaaagtataatatcatttaattttatcttaatcctttcaactatcgccccacttacatttaatcctctaaacttaaattttaacggtaaaactcttcaaattaataaactactaacaaatttaaagtatcatttattttttacaattaattgtcaatatagactacttatgtgtacacttttgtacatatgtcacattgatattgttacacctaatattattatttaaaaaagggtaaatggcggcaaaactcccaaaacttttattttagtttc

SEQ ID NO: 307663 - DNA, 998 bp, Cannabis indica
tttttttttttttgagagaatcctcaaagaacaccaccttacaattacaaagcaatatgctctaaagaaaggggttggcgaaaccgctaatctcaaagtaagagttcaatttcaagattaaaagtgtctttaacacaccaagctgcggaagccaagaccactctaaattcatcccgaaccacaataccaaggcttgaagatcctttatcgacattaagagcattatcaatgttaatcttgatagtttcatgccttgacatgaataaaacccaaatcaatatcccttaatggagacacgacctacccaccattaaccccaacaatactgatgggtcctgttggaaagcccctaagaaattaagagcctggggaactaccaaagaaggctgaatatccatattattataaatttttatgttggattttataccttaaataaaatctaaattcaagttaatattatttttaatcaataaagttcaaaaatcatattttgactttattaattgcttagttcacatgtttatttacgtaattatatgatcaatatacaaattttatttaaatcatggacatatatttattcatagttatagtggcgttatcacgctagaaaataattttgattatatgcttcgaatattttaaagttcaatgatttattagtgcattggatttacactggcataataatcatcaataaggtatacttacacctttggtaagtggtgtgtcttttctaaggcattaagtaaagtaaacttgtcattggatgtatagagtttacattgaaacgggaccgatattgacaaatagaatagttatcataatttacttttatagctattctaaggtaatatcacatagtttatcatagctcaattagatctgaatcttgacatgattaagctttaagctacttgttaatataaatagtgttataaaataatataaaataatataaagtagatgaaaagaaagaagaagaagatgaagag

SEQ ID NO: 307664 - DNA, 1781 bp, Cannabis indica
tgtaaaaataaaaaaattcataataataataataataatagtaaaaatcagttttcaaattccaaatataaagttcaaatttgtttcaagatacaactttatttcaattatcccaatattatgctaagtacacgtaacaaaaaaaaataaactttcctaaaaacaaatacaatataatttatctaattaagctaaatatatttttgtaggaacaatacatatatctaagttaattgttctgatcccttccaaaaaaaaaaaaaaagaagttaattgttctgaaaattataaaatccccaataattcctaaaataataataataattttcttttaattttagcactcaatgatttgaaatatcatttaaagtgaggaaattttccatgtaagtgccaacatgagagcgtattgaaatatcatcaccaccatcaatttgaagacaacaattgtactgttgagatctaatgtcaaacaaaataggcttattactactaataaccaatataataaattcactcaaaaatcccaaagccttgaaccttttatccaaattaatagtgaactccaatttgttccatgaataatcttgagaattattatgatcatacttgttcaccacccaaacatcacaacaaaataatctcgaaccataattatccttattgtaattgtagtagtactcgaacaaaactagagaagccttactaagatcatgatcatcaataaataaagaagcaaactccacatgagaccaatcatcatgataattttcatctcccacttcaaccaccattgttgcaatgttttccggcattgacatttgaccaaaaaaattctcctgaaaatcgaaaaacaacatacttcgaaacaagtagttattattgtccttaaaaagagcaatccaatgaactctactacctatgttctgcgaacgccaagcgatttcgatgagtttaatcggtttagggcacaaaaaaggttgaatattgctaataaaatgttggctccatttattttctcttaaggaatagagaaaaataagacaaaatatatttctatctttatattctaaatgaacaaaattaaccactttgtaatctttagtgttagaatcatatccaaatccaaagcaacatatctcttgtttgataagatgatcattttctcttttactaaaaattttaatatttctacaatcttccattgacctactaggattccacaaaatcaaattcccataattatcaggtctatgtcgatagagacaaaagattccattaactgaattgacctttctaagatacatgtctgagattgtttttgacatgtaaagttgtagtttattattgttattatttatgtagtaataaagctctttcttattagaactcgaataacatttgaatatgtttttgttgcgttgtgaaatattattgatttgataatcgaagtgattttgaaggaaatctaaagttgatataaacatgttatattgtttggagacacttttcaatctcgttagtgatttcacatcacatcttaatagaatctcataaaccatctcgaaagggagggagaaatcttcataattcatcttgatcatatgacccaatattattaattatagggataaatatttattaacaatctcagatttatatatagatagtactatatatatgtatgatataatcctatatgtattagaattttgtgtgtattgtactatatctacgcctattattaattcaaaaaaatatgttaataataatttttaaaa

SEQ ID NO: 307665 - DNA, 1020 bp, Cannabis indica
tgttaaacaacatacttgttattaaatctaagatcctggtaaaatatttccaacaacttgctattttcatcagccattaccatttggagagacgaacatttcgagttatgcataagggagtcgatattggtgttgaaaaatattgaggattttcccaaattaactttttgccttgaagcatgttcaaaaatttgtagtagttcccaaatgcaattagcttctgacattttggctttacaataaagataactatcgtcaatgaatatcatgtgagaaacacgaggcacaccattggccaccttgtaaccatgaatccaaccattgagctcaaatttctggataagagcagacaaccccttcggcacaaaggataaaaatgtaaagagataatgggtcttcttgtctaatacctctcttaggaattattggacccatctttttttcgccatgaagaatagtatatgaagttgaattaacacaactcatcactagttgagtccaaacatcactgaaccccaattttctaagaattgcttcaagataatctcactcaatcctatcataagctttacccatgtctaactttaaagccatataaccctcttttccttgccttttccgctttaaaaaatgtaaaacttcaaaggacatcgtgatgttattagtaacaagacaacccaggatgaaatcactctgagtatctgaaacaattttgtccataaacggcttcaaatggttagccataaccttggtaattaccttatacaagacattgcaaagagaaattggtctcaaatatgccattcgatctaggtttttcttttttcagaatgagcacaatgttagctttgtgatagtcattttcaaagttaccattcaaaaagaaatgctggaccataagaataacttttgaacccactattggccaacatttttgatagaacgctggagtcataccatcaggacctgggcttttatcgggatgcatgtaacgccctgtccaacagggacgccacgtgt

SEQ ID NO: 307666 - DNA, 1504 bp, Cannabis indica
ttttttttttaaaatttaaattattattactcttgccaaaacttgtcagccagctataaaaacttgaacacatgaacttgtaaattgtaactcgtggtttcaaaataaaataaaatttaacattaaaaaatattagacatctaattattgccatataaatttttaagatcgactcaatccttatataaacaatttaattatttttaagtttttagaacgtacatatatcaggacttatattttaaggataagacccaacatataatttagaagcacgaaatattcatttcatgttaagcttggactcaagtctatgtcgattttttataagtcgaaatataaacatgaataccggccatagaaatatggtttggaatacaaatatatttttgtacatatattgttattttttttaaaataaatttgttagattttaatagaaaataaatgatgtattatttattataaacataaatgatattaatattaataattttaatatatgtaacaagaaaatatatgtttatatatttgaataaaatttatatttcttttattagaaaatagatattattctttttacccatataaacatatcaatactccttagataaaaaaaatccaatttttttcttggattcaaaataattgagatttatttttagaaaattaaacttaaatattgtatgattttataaaatttagaataattatatatttaaaaattaaaattgttaaataattcaatattttgctctattttttatactctttctccttatcataaattgacttttttttttgtttgttaatttctcatgagctcatcgtttgaatcaataaaaaaaatttggggactagcttggaggtttattattattattattattattatttgatttattttgacaattattcatggaagtgatgtttaacagttgtttaatttattttcaaacttaataacttcaaacaagacaattaattaatgttccatattaatattataaacatttattggttatattatttacagtttttgaaaagaaaacagtggtcgctgttcaaagtttgagtattatatatataatagaagaaaaacaaatactaattaatttagagatttgtgtgtgagtgggtaaacatagggtgaagtgcacaaatataattaattagttaataaaattgggttttgggaaaaatattaataaaaaaagaaaagaaatatacattgatatttggtaattggtaattggtaattggtactgacaaatgggttgacttagtttcatgtttacttacgtgccgtcaaggtttggcactacaactccctctcttttctcacttcaaaatattcaatttcattttcatctctcctttttaaattctattattattattaataataataataactaataaatcacaccattatcaaaatactgtttttttttttttttgaaaatggcgttttataaaataaggagttagacctctcggtcat

SEQ ID NO: 307667 - DNA, 1659 bp, Cannabis indica
atatagaatattacataattgattttctccagatttaatgaatataaaatattcatttatcagaaaatcaattatttatttatttccttaaatagaaaatcatttccttaattagaaaataacttccatatataaaatattctaatagaaatgtgatctcttttaaattggtttgatcctgaaatatataagacacaaataataattatttaccaatatatatatataaatatagaatgaaatcataaacaaattataaattaaatgtataaaagaaggatcatgatcaaacctttatttcattaacacggcttaagctaatatgaactgatttttctagtttctttaattcttcaagacttagttcttgaaggttttctcccataacatgtctgtatgcatttaaattagttagatattaattagttaattatatatatcaaattatttatatgcacatgtatatatatatataaatataatgtaacgtacctaaagttccattgcttcttttttcaagtctctttcttcagtaatgcatatcgttttctttcgttctaaaataataaagtagaatattattaaaccattgtcatataatctattaaattctttctattaattaatcataatttattatacaatattagacccattcataatttacattaattttttaaaatattaatgtatcagattcttgtttttacaaacgtaatccaattaataagaaaatataactaaatattcttatggcttactaattaagtatacatacactatttcatgaattgttaattgtaatatatatatataaatatatatatatacgtacctcaagcatatcagatggttggctcaatttattgtgaagacgattttcatctgagtgagatttatgcctttcaatcacttgcggcatactaattttatatacatatatatacaataaattaaaggtataaaacaaatcttaatcaactactatataacaacaaatgatatacatatttttatataattaagttcatatacaattagctgaaaaaaaaaaatcaacatctgatatttatcattactttcaaaaccaagaacaaaaaaggtaaaattagtacaatacgtacgtactatatataatatatatatacctatatatgcatagtacagtatttcaaataagtactataattgtatattataatataaatataatgactgaatggtaagtacaacaagacaagacaagaataaattatatgtttaagttgtaattaattaagcccagattttattattaattaataaaaaaatgaatagaagaataattagaagaaggaaataaataaataaataaataaatgaatgaattatataaccttgaagttgcataatgatagagttttccagtggttgaaaagacaatgagagcaatttcagcatcacaaagagttgaaagctctaaagccttcttaaaaagccctcttcttctcttcgaaaatgtcacttgtcttgccgttatattttctatcttcttaatctctattttttgtcttgtcattctaataaataattaattaaacaaattaatataatatatatatatgtatatgtatagtatagatcaagccataaaaaaaatttacccaagataataagaac

SEQ ID NO: 307668 - DNA, 842 bp, Cannabis indica
gggacgggaggagcactccctaccaattttctgctcagtgtgcatccctggccagtcttgctcgaaagaaattataaaaggtaataatcatgttcctcctatactgcgatctaggaatattatgcaaaatttgagttctaaattttctaacccagaaagttagtcaaagtagggatgttaagattgaattagaagatatagaaaaaaatatttcttattgaaactcttccattatttattatgttcttggaacgaaccattccttgtcaattttggaagcttttgcaaggcaaatgtggaaatcaaaaggtgtagataaagtggtatgctttttcatagcgtgtttatcatttgttttgattgattgaatgttcgagatgaggttttaaatggtggctatatttgcattgacaagaaaccttgggatgcaacaaaagattttaagaaagaggatgtctataagattccaacctagcttcgtttaaataacttggaattaaagtactagggagagagatccttattcaaaattattgatcagttgaggaagcctttgatgattgataatgttacaaagttcagagaaaaactcaactatcccaaagtgttggtggaaagtatctttaactattacaaactgcacttttggagaaaaagtcaagatttaagcattgattataaactgagacaaatgaattttggtgtcattttaaaaccgatacttaaagtgtacatatatatttttttctttagtgtcagtttaaaactgagactaacaggtataagtgtttgttttaaaccgacactaagggctcgtttggaacgtcgtattaggtcgtatt

SEQ ID NO: 307669 - DNA, 1866 bp, Cannabis indica
agataaaatgaataaaaaacaaaacaagcggccgaaggcggtgggaaacgtcggcataccgtgggccaatttcccataataatacacttgcgctgcttgtgcgcgtgtgcgtgttgccgtaccatcctaatccttcctcgctgttcttttgctttctttatcatcataaaacataaaaatatgtcgataaagaaaaaattgtttttattttattgccacgttttattaatcccatcaatgatttgactattctctcatcatattttacacacgtcttacactctcctctcctcttctataaatatacattttttagccataattaactcacacaaagagtaagaagaagaaaaagaaatgtgtagctacaccatgcatgatgagccactgcttgagagggtttttgagtacttcgacaaggacaaggatgggaagatatccccagctgagctgcagagctgtgttagagccacagggggagaactctcactagacgaggctacagcagctgtggagtcgtcggacatggatggggatggcctattgggttaccatgagttcgtgaagctgatggaggggagtggagaagatcaggaagagaagaaaaaggagctgagagaggcatttgagatgtatgagatgggtgggtcgggctgcataacgccagctagcttgaggaacatgttatctaggctcggtggctcacattctcttgaggattgtaaggctatgattcgaacctttgacatcaatggagatggggtgctcacctttgatgagtttgctgttatgatgcgctaacaccaaattaaacaccactatttctttcattcatatatattatatatatatgctttcattattaatttaatttaactgtgtacattataacaatgctaatattaaataagtatatatataagtgtgtgtgattctacaaagatttctatttcttcttgttttttttctttgtatactctcaaattccgccaaaaggtttcagcttggtgacagtaccataaattagagcctaatatttttctcatttcaatctaatttaattagtaattagatttttaattgaatatgtaattacacacttaatttaattacacacttaattttttaattttttttttatttttacacttctgaatatttttttttatattttgagggaattttatacaaaaaaattttatagcaactaacggagtaacttaaattcgtatagtaacccatataaaaactattagaacaacctaaaccgtaaatttaaagaaaataaataaaaaataatatatagaataattctcctaattttttatatttactcaaaaatataaaaacatacagaaaaatacttaaaaagtataaaaacatttatttaagtttaatattccatatataagtttaatgtaaccaaaaatttaaaataattaaaataataacactaccaactaatgaaataaaataaaatatcattaaaaaaatatcaaaaacaatcaaatataatcaaaatatttttatattatttataaataaaaatataaataatttgtttgatatgcattacataaagttaaattttaagattggcatttaataatcaattcaattaaaatctaatttttaatatttaatctaatttaattataattaaatatctaattattttatagttaaaattatttgagttcgattagattgaattatattcacccctaatagaaacaacaaaaattactagaccatccccaataagaaagaaaaaatgtgttatatttagcttaacttttgtatatgtgctccaatgtacaagtatacgatataatatattaaaaataagggtaaatagtggcataa

SEQ ID NO: 307670 - DNA, 1784 bp, Cannabis indica
tatttttttttatttatttttgctacagaaactacagttttctgagattttttctcttctttttttctattattttagctctggtactactcaaggaaagcccaagtttgtacctttcaatgatgaattgatggattcaaccatgcagatatacaggacttcttttgcctttagaaacaggtactgctactatattgtaacttttcttgtctgtttgcattttcttacctcaactacctagtttataatatctgtgattctattaaatgttcccttcttattcccttttacggatgagaaaattcagtaatcttgtgatattttggtgaataaagtatacgaatattttttctatccaaaagggaggatacagatactaatcttattatatatatataattcttttgttcagagaatttcctataaggaatggaaaggctttgcagtttatttatagcagcaagcaattcaagaccaaagggggtcagcttgcaggaacagctacaactaatgtttttcgaaactcgcagtataagaaaactatgatggcaatccaatctgagtgttgcagccctgatgaagtaatatttggtcctgattttcgccaatctctttactgccattttctgtgtggactcatattcagggatgaaattcagctgatatcttcaacatttgctcatagcatagtccactcttttagaaccttggaaaaggattgggaagagttatgtactaacattcgagatggagtcctaagcagctggattacgactccatcggttcgagctgcaatgggaaaattgctgaagcccaatcctgaattggccaatttgatctatgacaaatgttcaagtttgagtaactggtatggactagtaccagctctttttcccaatgtgaagtacatttatgggatcatgacagggtcaatggagccttacttggccaagttgaggcactatgcaggggaggttcctcttgtaagtgctgattatggatcctctgaaggatggattggagccaatgtcaacccaacactgcctcctgagttagtcacttatgtggttcttcctaacattggctattttgagttcattcctataaatgatagcattggtacagagacaaagccattgggtctcactgaggtcaagattggtgaagagtatgagattcttgtcactaattatgcaggtactttgtattatcttttttctaacaataggctataaatgtattcttcctttttaacatcttcatacttgttctggtccccttaaatcaagaaaaaatatgttacttatttttactcacttacttccaatatattgtccttttatctcagtggcactgacaccctcaattaaatgcgccccatgtgtatccatgagttggggagtagagtttctatttttgtggtagtacttagtgattactccttctccatacaaacactattgcattatacattctctaaattattagtaagggttttctgtagtcttgggggtagattctctattagctaattgacaatgacatgactaaaccagctggattcgacacttgcttccacaattatttttgtgaacaaattaatcatccaaaatagtgccacaactcttaaaaattattagtgttatagtaaagattcctcaactattgcattcttgagttaagtaggttgcatatgtattgtttattatttgttgcaaccattacaggaaagcacgaatgcccatgtgaactgctctaatataaaatatttgtatatatatata

SEQ ID NO: 307671 - DNA, 1551 bp, Cannabis indica
agtagagatatgtgaactagtataattttttaattaaaagtagattattatatttaaagattgttatttaagattgttaattttggttagttattggttattttacggagatcaactaatcgttaattacagaatattcttttatttttaagtatattactgttaaaccaagaatgttaaactaagaaatgccgttagataggcacttttaatatataaagatatatatatatatatatatatataaagaagaagaaagaaataaactacccttttcagctatgtttctctctctctctcaggccataaaaagagcagtagacctttcgtttttttttttttttttgaaagggtagcagtagacctttctgattgtggaagttagactacatatgaatttatttgatacggtactatgggggcaccacagaaaataattacctgccatgcttacttaggatcatttatatattagtttggtaactctgaaacttttgtttttgttggtaatctctggtcctgtctttcccttttcttttctcttcattcttggaaaaaagaaaatctggttctccagtcatcaccatcaccatgtccatgtaccacttgatttttttcatctgggtcctcttgtcatcgagtttttcagtcattatcggttcagattcttggtgcccacatcagattttgcagagagaaaaccaacagtttgagcagaaaacagataggttctgggagttcaaagaggaaaccaacacctgggttgaagttagattgccttttgatctggtctcttgtgttgaagataactgtactaaagttggttcaattcgactgaaaaagagtaataacaatgacaaagagaaccaagaagaagaatatgatgctgcttcagaaaagatgaagagttctaaagatcagaaagaaacttctgatgatgatgatgatgatgatgatgacaagggtgctgttcttcctttgagaaagagaatttctttgaccaagatgtctgagacttctgtttggatcactagtcaaagtgggtgtatctatgagaggttttggaatggtgtgcagtgggtagtagcaccacatgacttacccatatccgaaggacatgcagcttctatttttattgttaaccacacaattcttgctctatctgaatcaggctatctgtatcaggtattgacaatccgactgttaagacatatctatgaaaatatttgtttttcttgtttttgatctttggtcctggtctcctgacaaactggattaaacagggtatatataacttaaactatgtaataataataatcaccaaccacataaccagcttgtcacatgaaacaatggattattctaagtactctattatactgggcccagtactaaacaagataatttgtaaagtgttttaccgttatttacagtaaccatctgattcataatatgcatggcgttttgtattccttctgtttttcttgttttttcttttttttcttttttttcctttgttttttctttttttcttatttctagatgcaactc

SEQ ID NO: 307672 - DNA, 584 bp, Cannabis indica
gagtaatattaattaataagcaagattaatataattgtgatatatattataagaaagtagttatatgttttcgaatgtaaggaacgaagactcatatttccttccataagatttttggatatatatctattgttagaatttgttgatggaatcataagattattacatatataattatatattatctagttagtcaaaattatatatgttttacactaattatattaaaaataaataagtacatgaaattctcaccaaaaataaaataaaatagttgagttatattacaaattaaaactttttataatacttttttttttcttctaaaaaataatatttgcttagaggcttcatgagaccaagtaggaggcacaaatccgagttcaatatcgaggaggttatgagggctccgatttgggaacccatttccaagtattgggagcataatgaagactccattttgaggtttacattttcgagcttttaagggtaagaaagagctagaaatggagttgattttgagagtatgtattgttgagaatcatggggttccatttcaaaaccaattgacaatgagtggagta

SEQ ID NO: 307673 - DNA, 2571 bp, Cannabis indica
atatctgtaattgtactaaattatttttaactttttcttccgattcatattcttaaaaaaatatacctatacaaatgaaaaataaattatattttaaaatatcaatgaacaaaaaaattaaaaataaaaaaattatatgaaattttcttaagaaaaaaaattaaaaaaaaaatatatacatgagttcgaaaaaaattatgaaaaatgaaaatcaaaaataagtattgaaattaacataaaataatatgaagaaaaaaattttaaaaaaatattgagaggaatttttaaaaattattaaatttatatttttttcgataatggagtgtatttatcattttatgggggggtgcaaatagagctctccaatacaaaattatacttttattacaaatttaccttcctaggcatggattaacttttgtacattctttaatattttatttacaaaaatactatttgcacacacataagccttctatgctcatgtcattaattatactataatgacactaactatttttccttctcttttatatgtacatgttgtctattttattctcaattttcattttgattgtgattttcatttcagattgattttaaattatttctccacgatcaaaaccattttttttttccaaaaaattgctcccctacgatctccaactgccattgaagctccaccccatattttttcttcctgtttttttcttcttccaagctatgtataaatggttgtgtcttgtgcttcttcttctctatctcgtcgatgaaaaaactcattaagaagctcatttgcaaaagttctaaacatgcaacaatgagtgttgaatcgttgtcgaacaaaagaaaaagaaaacatgttatagttaaagatgatgactctaatgaaaattttgttgaaccagcaacaaaacctcatcgtggtcctttgatgaaaaaatcgaaaaggaatgaagttggctagagttcaattctagaaattatgagggggaagaagcatgtggatcaaatgcctacggtttgatttcagtttccttttgcttttgccctaattttaaaatgttgtctttgttttgtttagtgtttatgcttctagggttttatatattttatttgttttgttattttcttagtgatagaattttttatttggaatattgttagatttaggttgtttttttagttttttcagcataaaaagttattcattgatgtatttaattctgttaaatttagactttattttgtaatgaatatttgtattttttttttttttttatgtttttccatattctttgggcattatttatcattttgttagtttggtatggtgttgtttttaaataggttgctaatagatgtattgtagtttatttatactgtgatcaccatttgcattcattttgatatttttttgtttgattttagacaatgaatgcaagtaccctatttttgatcactataaatcgaaagtggcctcaaattgcaattacagtgttattgagaagcttaattccactcttttgaaaaatgccaaggctttgttgtgtgcaacacacctaggtaaattttaaatattcctccattcaagttgtaccctcaagttgttcatggtcttcttttaagagaggtgcaacaatccagttaaaaggaaatttgggtgaacattgatgtagctacgttcgttttagtgttgaagagttcactttggttacgagtttgggttgttatgggggattgtaataaaatagattttcgtcatgattcaaactaaattattgacacttattttcgcggtgttaaagagatcactcaaaaatctatagaagatgctttttcgggttgtgtatggggtgatgatggtggtctgggtttaaaggtggtaattctatattttatatattgacatgattagtagggtagaaattgacatgattgatagtgcgagatatgatggatattgctgggattagagagtcatttgagttgacattgcactctttcaagggtcatattgctcatggcatcaagagtaaaaataaacatacgggagaaaatatttatcaaggttggtatagaatattgagttttccctctatttttcaaaattagttttatgaatgttgtatgaaaaagatagaagattttggtaaacgattatattctcgtattccaagaattttgaattggagcgatgataattctcctgctgttggtacactgactttacttgatctcactctaaaaaatttttatttgcctctgaaaaatgataatttctcaattattagttgtctgatagttgtttaaagcatgatttactattcattttctatttatttattgatttttgttgttctttctttcagttacaagtgaagaacttaaggctgacgtttgaagaatttaagcagtttcctttaaatggtttgtttgaggatgtttcaattgatgatcgttccctggtcaagtgtattattgatcctcgttctgttaggttttatgccctaaataaaactccatttcaatgtaatctattttattcaacatcaataaagaaacagaagt

SEQ ID NO: 307674 - DNA, 889 bp, Cannabis indica
acggagaaagcgtgtacgagtagtcacatcgtacttgacgaatgtccccagaaaatttccaaggataatgcccattgcctcggaattcctcagggttaatttgatcagcatcaggggggtctaccaacaccatatgtcgttgcaaataatgccaaggttgtccttcgagaaccctcaacttctcagccaccaagctgaaagagagcatgaagagactctccatgaaaccatcaatagagagaccgttcctaatttgacagaagttttccagaaaatctttcaactttgatagagataaggtacgattgaggaaaactctgcctacaagaatattggaagaaaactctgcctcagtattaagtgaatccccttcggtaatcaggagttcattttccatagaagaggcagcaccacaggttccaaaagattggttagaagtagtcatttcgaaggatagaggagattttgaatgaaagaaaattggttgagaataaatggagagggaatcccctcttatatacgtgggattaaagttggttattagatcatgtactgaacagttgaagatcatggggtgaaagaagggcattaccagtgatccctaaaaattaggtcaacaaaactgatgccatgaaccccagtaaatcattatccgaaaaaactgaatttcttctcaacaacattacaaattcatgggattgactaactccctgctcgtcatcgaatgactaacattctctcgaaggaccactattaaggggaatttctactgtaactatatcgtggaacatatagagcgttctatataattgaaagtgtattcaattccaaatctatagtggtgcaaggaggaattaataagttagggtattaacttggtaaattctag

SEQ ID NO: 307675 - DNA, 525 bp, Cannabis indica
actattgatgaatagtcgaaatcgtatacctaatcaaaaatcataagtacttttgtagaataatttttttgttatgtattatacgtattggcaaatagggtgggacgatggatcatattgttttattccgaaagcaacattattactacaatttgttgtaaaaagtaaggcaaaaaaaaaaaagaaaacatttgattcttcatgaggaataatttttattattattattatatatacatgagaaacgacatgagatcaaattcaaatctcatttgtgtctaaatatatttatattaattgaaaaaaacgagattatatatggtatgtgacatgagtggaaaagtagttacatgcatgatattcgatcattccactaattcaatattatttacgattaaatattattgttgacttttttagttgtttatatatataattcattgtttatctattctatataaagtgtgcctatataactaaaattcttggtttttgagaaatttatgggtgacttttaatttttat

SEQ ID NO: 307676 - DNA, 1376 bp, Cannabis indica
aaaaatatttttaaagtgtttgaatattattaaaaaagattttttgttgagtaaattaaaaatcatataaattattttaattttaaaaataatttctcaaatttttttttattgagaaactatattgaggtaacaagagtaaaattggtaaagtgttaaaaagaaaaaaaaaaagacaaaaatgatagatttaaaaaaaagagaataaaaataaaaaggacaatataaaaaagactataaagtctaatttccttttgccttagaaattcacccctttacaaaaacatcaattttactttttttttttttttgaaaggaacatttatttacttattattgatttaaattgaatagaataattatttgtaagtaacgtttaattatctatgttttccctcgtcttacgaaagaaaattggtattaagctgattttagttaaaagctttaaaaacctgagaagagagagagtctgagcctgcgacgctttctcatctatcacttctttcctgttaccttcactttctcggacaatacaaataaaataaaataaaattaaatcagaaatcaaaagagactaacacaaacaatacacacatttcttttaaaccaaaattcgactcaacaaaccctaatttcccccctttcttcaacccaatttcattacctttgaaatcctctaaatcacttactcactcactcaattctttgtatagcttcttcgatttccttttccaattcacagaccggtgacctatccatcaatggctgggtccacagcgggggacaagagtccattactgtcgccgacgagctctcggtcggtgacggagacggtgaacgggtcgcacaagtttgtgatccagggttactcgttggctaagggtatgggagtcggtaaacacattgctagcgataatttcatggttgggggttatcagtgggctatttacttctacccagatggaaaaaatcctgaggacaattctgcctacgtttcggtcttcatcgcgctcgccagcgagggtaccgatgttagagccctgttcgagcttacactcgtcgatcagagcgggaaggagaagcataaggttcatagtcatttcgatcgttctcttgaaagtggtccttacacgttgaagtatcggggcagtatgtggtacgaactgaattctgatttctgttgcgtaattggtactttttatatttttgtttcaattagctgaattgtttttggggatggggtagtaatctttgaactaaattcgattatgcattataacttgatatatgttgaggtgtcatacaacaaagatgtatgaagataaggtttttttttttctttttttttttaaatttattgatggacattatacttt

SEQ ID NO: 307677 - DNA, 2564 bp, Cannabis indica
tttgtgtgactaaaagtaaaatattttgtagtgatgacagttttgtgatgtgcaattcatgacctagttaacaaatcatgaacgaaaattcaaaccaatgagcaactcttctacaagtctccagtcatccgtattataagctttataactcagattaattttaatcccacacctaaaaaaaatatttttccttctataattcttgaccttggaggatgagaatgttgtgaggaatggatccctactttataaaagctccttgatttagattaattagagaatgaaatattttctcaactcttttatacatgagcttagtgatgcctttgtagatggtactacaacatgctataagtttaaaattaatagctttacttggcaaaaatatttttggaactagaataatgactctcattaaattgataaaaagaataatacctgtatcaaaaaaaatacataatggctttgctaacttccacaccggccacataaccttaaagaactctgagttatacccatctggctcagggcttttagaacaagggatactaaacgtagcagtcttgatctctttgaaagtgaacgaccgaatcaaaccaagatgttgatttaaatccagtttatttccctgctccaagcaaacagaatcaattcgatcagaagttgtactagaactattcatcactacagaaatgtcacttttactagtacaatttgctactgtgctggtaaaagtaacttttaccaacgtattttgtaaactgagctggcaaaaaaatcaaagttttgccagcgcacatttgcaatggttaaaatctaacttttacctgcgcatttacgcgctgggaaaagtcatttttaccaacatttttcattttgtgttggtaaaagttctaataccaatgctgatttgccaatcccttttgccaacacatcataagtaaattttaatttaccagcgcaataccaaacttttgctacaaaaaaatgtgctggcaaaaataacatttattgtagtgcatatagctcttaaaatgatcaagaaaatgattcaccacctctgcataattgtctatcaaatgccctaaattattcatgaagctagtgattatattctcctgatcccttctcttcttcaaactagcatagaaaaaagttgtgttgtcatcccccttctttaaccaagttattttgcttctctggatttggaaatttctaagaagtttttcctataaacagtactgatcagcagtagcctctttctcagaaaaaatacaagcttcatctctcgaattcgaatggaacattctccttagccttttggtatctagccttagcttgctagcatgcttattgaatttcctaagctagtgcttcagtcttactaacttaaaaaagatcgagattaaaccaatctctctaactgggttacactagttttccataacagtgtgcttaaagtcattgtgatcagcccaaaagttgtagaatttaaacggttaaactcctatattctccataatagctgaggaaacaataataacacaatgatcccatatagtctcccaacaataagaagtaatcaagttaagaaatatgtctaacccaagagcaagccaattattattggagtcctccagatttgtagtagagataaagcccctacctactctatcatcatagctgaaaattgtattaaaatcccccaatatcaaccaaaacttaactggaaatttaaggcttattttatattatttgggacttcaaaattttaataaaaaggatagaaatgattataataaaatataaaataatacataattatattaaaataagttttagtattgtaatcacattttatatattatttactaagattcaaatctcaatagtactctaatgaaaatattttatctatgaaaaataaaatattataagtatggagaattttaaacttgtgacctcattaaattttaaaaaatattttcaccactacactaaataatataattatttaataatattttatcagtatttgtataaaagccgaaaaaattttatttagggataattctcaaatgatttagagcaaccaatccatattttaggcaaggtgacatcttttttggactctaataaatgtaaattgtaatctatgttgtaaaatattaaaaaatgagtaatttgcagcacaaatttttaagtttaataaataaatatttaaatttaattattggcagtaataataatacctgaattataattctaaaatttttgtaagcacctgactgtgaagtattaagtaaattggcaattggcttgatccaagttattaaattataatttacaaaaaatgtttaaatatatcaacaaaaaaatgacatgtgaataataacttaatatttacgggccagatacttagagagttttagaattataatataagtaattatgaggaaattacactctataccctttttatattgttctcttctatttttaccctcctttttaaagtctattatttttacctcttttttttaaatattgtaccaattttgccc

SEQ ID NO: 307678 - DNA, 784 bp, Cannabis indica
tatatatatatattatagataaatataatttgtgttattttgtggtgcatatatatatattttgaaatggatagtttaggttatttgcattgataataaagaattgaaaattttatatttaagttgatggggtattagttacgcgtgggctggggttggtgatgtattttctacgttggaactatatttaaccaacagccttaaagaactacttaacaaaaaattgaaagcacagaataatgaagttaaaccaactagttttggcttttggtggctctcattaaagtcataaaatttaatacacattaactgaatgccgcttacaatttattgtatttaaccaaatgctctgttctttcatcacttcaacaatttatttatcttacaataagttttgaaaaataaaataacaaattaattaataataataataagcctaatggggcatgcacatgcagcatgctgcttgtttggttaggaggaaaattcaattcttcaagaagacaaataattatttatatatatgtaggattataggattatgtatatgtatttatttcttttgtgtaaataaatatataattaattcccattctggtctgaggtgagtttaggcacctgaccctttttcacgtgtaaaatatacagagttaggtgaaaaaatgattgggactgaattatagtggggtttcatagccagttagaccattcttgtcatggcagttgttaggtaggatgatataacatatatatttttgaacttgggatatatatatatatatat

SEQ ID NO: 307679 - DNA, 1757 bp, Cannabis indica
atttaaggtgtttaaaggatttttacccctaaattttaacatgtatcaaatcgccccttgaattttttggctgttaaaaatttcttttgaactattaaaattattagatttaagaacttttgtttaatttcattcaatttatactatttcagtaattgtttatatattaaataatgctcctcaaacttttatatttaccaaatcatgttcctcgaactttgatatatactaaatcatgtcctttggactttcatccatgttagattttttttactaaaattagataaaagtctttttaaatttaataatatcaatagtttagggatatttttaaagaccttaaaagttggcatgattttgtacatgtcaaacttcagaaggtaaaattcctaattagtctataattcctaaattacttacacaatattgtttttaatgatatctaaacattttaaaaagtattcttcatttaaaaaaaaaaaaattatctaaacagtaaaaataagtcaaaatttattttattttatgcttttaccacaagcttgattactgaatctcttgaagattgtgacaatgtagcttacaagttataagctatatcatatccaatcaatttaatttccttatagaagatcttaatattgtgcaaaacaatcttttttgtttttttataaccaaaaatatatttatcttttgagtgtggcataatggtattacaattattttaataacttaataacctaacggtcttgggttcgaacccataaccactctatttttcccatctctctcttaccattaagctaactttagtgacttaaccaaaaacagtgtaaatatcatcaaatctacctttttgaattgcttggtgtatgattagaaaatgtttcctattttaatttgggatgatgaccaaccaattatgtaaaattttacttatctaactatttttgtgacaacgtaggactataggaggagtactttcttgtcattttgttcatagtgcggacaacaaagtatgtaatatacatacttctcagctttacaaaagaggtagctatagtatgctttgaaaattatttgtttgtaactattgattttgtataaatatattaaaaagtatgaacttaattttaaaccccaaagatatatgcatacaaaggttgcgtgaatatagttccttcgtacagacaactctgtcacacattggtaataatttgaagctttgtcgaaccccaaatgttaagccttaaacattaaattaaataacaataataaatgattatggaaactaaacagaatcaaaccaatccagccacacactagtgtctttttaaccgcctatacgttcttttttgaattattctttcgtttttttgtgtcataactttgatccaaagtataatatttcgtaactagattcggtttttttacatgtaatatttttgttaatcaacaatgtaccagatttaagagcaataatgtagaagattccttgtggcttgtacaaagtaaaaaaaaaaaatatgggagaagtttgagaatgttttttttggctaattagcaatttttcccctcgaactttgatatataccaaatcatgcccactgaacttttttggccgttaaaaattccccctgaactattgagatttttaaatttaaggacttttgtctaattttatccaattttactgtttcaggtactaaatcatgctccccagactttgatatctaccaaatcatgcccctcaaact

SEQ ID NO: 307680 - DNA, 2535 bp, Cannabis indica
gaaaaaaaaaaatcgagaaaaaaatgtatatggattttaattagttacaacatatatttgtattaaaagatgatatttatagacataatagtaaccttggtgtaatggttaaggtagttggtaaataggttagagggtaaaggttcaaatcccactaactacactttatattttctttttaattttatttacgccccccctcactttaaattctgagtccgccactgattctactgctaaatatcgtcatacattgaggcaaataaatgaaggctacaaaataagctttatgtccctctttacacaaaatgtctgaattttttcatcccaagacgattctccaacataagactggagaccttttgaattgccaaactagggtgattcaaaaccaaaaatgggttttctttatctggaggccaagggtccgtaaggatatcaatactcattccagatccaacaaccatacacccctttttcgaataagagattgtgctccatggatactattgcatataaaactcgaatttcttcccaactctgcccccaaataggactcacgaggataataacaagctttgaacacatggctaactaaagaacctaaacgtctgttttctaagaaacataatattaaaatcatgaaacttccgaaatccaagcctcccatgaacctttgggacacacatcgatcggtcccaactcatccagtgaatgtcactgccatttttacctgaattcttccaccaaaaagagcacattaattttttgatctcgtcacacatctttttaggcaaaagaaaaatgctcatagcataggtccgtcttcaacaaaatcttttactagctctagataaaaacttactaccccacccttcgatctgattcctcaaattttccttaagaaatcccaacacgactgacttgttgtggttcatagtatttgggattccaagatacgaacaatattccccagcttccaccatacctaagatggaacacacaagtgccttcatactaacatcaatattcttactaaagaaaataaaagacttgactagaattaccatctgaccaaaagctattttaaaactacgaagcaacgacatcaccctattagcctcattctcagcgcctaacaacacaaataactgtcatctacaaagaacatatgggagataacaagtgcatgacgagcaactttacaacctttaaaccaacccctccgtacatattcattaataagagtagacaatcttttcgcgcataagataaataagtaaggagacaaaggatcctcttggtagataccccgagttggagtaataggcccaaaagagaaaccaccatattgaacccaatatttaatagacgagactgatgccataatcaactccacccacaactatccaaacccatcctcaagagcatagcctccaaaaaaagtcattcaaccctcttaatttactcatgtcaagcttcaacgccatttgaccttctttcccaacactttttctttttaaataatgtattattttaaaggatattatcagatattagtctccaaaaatgaaagtactttgagaattcaaattaaattactagtatatatgatcattaattaatataagttcatttcacgatcgtatatcaactataaattggaactagctcatgaaaggtttgtattttatttaatgtatatatttagtacttgagctatatgtacttaattattagagttagtatatggttaaacatatacatactaagttatttttatgcaatatatttagttatattttggtaattatgtgtatttttattagttatataatttatttttaattttttgaatattattcaataaacaatatcattttgtattaaaaaaaatatttgatgatatttttaaaaaaaatgtaatagtattttaaaaataaatgaaaatattatataaagttttaagtaaattaaattagattcaaaatattatcaagatgtatgaaataaaataatatttaaattttataaattaaagaaaatcacttatagtgatttctgcctagtagttttacatctcttgtcacaaaaaagagattccaagtttgaatctcatcttctccattatataaaaagaaatccactgttaaacttcttattgttattttattttttaaaaaaagtttaaggttttgaaaatttaagaaaaacaaatataatgtttaaggatattaaaagtgaacataatctcaatacaattatagttttttatttatttatttattatgtttactcacatttttgttaacaacaaattaatgaaaccttgtaaataaaaattaattatttataattaatatatatgtaacactaagaatctttatgtggttttatagtaaaaatttacatacttcacgagtcattattatttctgagtattcccttacaatcaggggcggacccacattgtagcgagggggggcagtcgccccccctgaaaaaaaaaatcgagaaaaaaatgtatatgtattt

SEQ ID NO: 307681 - DNA, 972 bp, Cannabis indica
ttatcttatttactttaagactggcctatatcggtagtggtgcattttttaatatttctctagatatatataattgatttgctagctctctcttgactatatatgttaataattttaaagtttttttagttgagaataaaagacaatagatataaatatgatcatatattcatgtgtacgtacgggacaataatatattatttattattattattggtttttggtttgtgactttaatttaaataatggaattaattatattataggtaaatatatatatgtgcatggccgtgatcaatgatggattatatataataatgtcagaatttggtattggtataatcttttcattgctgcgtaacgcagatgatcattattaattataatatttgttttttgatgatatatatttataattatatatatatgcagctggagtctgagtcatcataatatgtccacgttgtactgtctatataaatatatatggcccatccatgattatataatatatataatttatatgatgatctgtggagcgacatagaagcaattcatatatatacaaaaagtttcacatttattcaatatataattattatataatataagatcagcagccatgcaaagagattatatatatatggttcaattaataatcaattagcttttttgttattgattggcttcttaatttaacattttaaactttattattatataatatttataattacatatgcttgcatgcattacagctttaaattaatattaatcatatgtataaaaagttgttttttttcttttttaatgtgtgtatttatttaattaatattatatatagcctacctatatataagaggttggagtgttatgatatagctatatatagctagcaattaataataatcatttcattcaactcattattcgatgattatttttttctcttcatcatcgctttattaacat

SEQ ID NO: 307682 - DNA, 612 bp, Cannabis indica
ttggatggttttttgtaagtaaattgatagttgatggggttttgccgcaaattactctgttttattaatgtcctaatattaacaatggtattatttatacatgctttagcaaaattgtttcttcttttgcttaggtgacaatagatttgaatgcttaactgtctaaatttcttcaaatcaacttttgcatcaatggtatatgcaatgtaacaacattcagattagaatttaagataaggtgaatggagttccattttaaaaccgattgacaatgagaagagtagcacatttcttatatatattttattatctttccatacattagcaatgtaggagtctctaacaaatacaatgaggacgactaaaccaacaaccatttgaaaatagttcgggaactctaaccatcaattcacaactatttcctcatgtactaaattgtaagacttttgctcagcatcagtttcgactcagcgggtaagatatgtacttagagtatctctattagtagtatttcttaagagtgtctaaaactacatcacttaaaaatatactattttattttatttctctttcatattagttttagcactttttgttctaaaatattttaat

SEQ ID NO: 307683 - DNA, 2252 bp, Cannabis indica
taagaattagaaagttaacactaattgaaagtgggatttcaggttttgcattatgacgacaacttttaccggcacatttttgacgaaatgcaccagtaaaaaggccttttcttgtagtaaggaggtgtcagtgatgggaaagatcccttgatcaggggttcattccgcctgcagaagtaagtccaggagccgagttttctcggcaggagctcctgagacgcgtgcgcatgggacactgctacgtcccctatttttgcaggcatggatcctactacataagatagatacaatgctaataactctaagctctcatttttaatttttcttctaaaataattgcttttatttgcgttagacttcaatattcttcttttaatttttatttctaaatagaattaggaatttaatttaatagtacttaactacaatctttgtaggagatcgacctcactcctatgaatatatacttaaaattgatacgtatacttgagtggaaaaaaaaatcaacaacatctatgatacctcacaccattggtatgtagtctcttgaaaagatcttaatctttgattaagacttgaaatcatatttgcatccatactcgtccatatttgcatcaaactcgtaacttttaattaatcccataagcttggacccaaccacagtaaaaccaccataattgaacttgtatatgttcatttttcacaagatttacaccattcaaaaaatctttcaaggatctagaacttttatacagaaaccatcttcacattcgaagtgtgtcagagtcagaattgcctcccaagtagcaactcacaaaagttacggtaatacacattcatccacatatagtttgattcatcatgcaagaacacaaatcaaattgttagaataagaactcaaacaaggtttatatcttcacaaattaatttttcaattgttcatacattgaataggtccatactcaaaatattagaatcaaacaatactatgtttagaatcaaaaactcaaaacttcgttatggatattaattttttttattgctggaaacttaggaggattcttatggttctaataatacattaatagaatatgaacatatataaatgtcaacattaattagaataacaataaaaggagtaaaatcaacaacaatagaataagaacattaacaatgttcttatggacaacaagactaatccaaaagagtaattaagcataaagattagtttagaaaacattacttttgatttctataaatcaatcttttatcaagaaggcttgccatattaagtttaatgttatctaaaaagcctgtactccaagcctccattggatcgctaatgggttcttttctttggaataatatctgggacttcaagcctttgatttgttaggactagcaaaatcctaagaacaaatattggagagtactagagaatatttagagagaggtatttttagagagacagagagtaaaaatgggtgattcatacattttttctctcctaacacccttatatagtgtaggaatttcattaatgctaactcacattattaggtcacttaagttcatttgggtcacttctcgcattaagaaacttttacatttcccatgcaaagctccagtcaacatatcgccaatcactgggtgacatgtcaaatgctcgagaaataaaaatgcaaaatatgaagttttttcatgctctaggcgacatgttgcccagtgctaggtgacatgtcccttccaagtgatatgctgtctaaacttggcgacatatcccttgaaactttaacaatttcgattcattgctcgaaaaatattcaaggcaacatgtcacttgtcgttgtgcagttttctctaaaacattagacatttccaaattgacctaaaacttctcaagtggcttcaaaacaagattttgagaccaaagagaaagttccattatgtgctacaatgtcaagtttaaatgtacaatcaaaatgtgctttagatttcaacttgaactattatgttaagcatattatatggtttagtctccattaatcttcatattttcatgttttaacattacgtgtttaacaaattccaacaattagcacacaatacttttgatcaatggatataaatgctcgttgttaagcaaaaatttcacatttagaatattaaaaataaaagcaaaacacaatttcacctatgctgaatttatagcataagagttaattaatttaagttcgacccatccaagatta

SEQ ID NO: 307684 - DNA, 897 bp, Cannabis indica
aatatcgctaatcaattgtaaaacgttacctaaaaaatgtggtgggcactactagtactcaattattactgagatataaaaataagaatacaggtggcaatatttgagtgggtagccctaacaagagatagtttagtagtagtagtgtagcgtcagcttattaagaaaagtcattgatgaagagagagagagagaggagtagggggtttgggtgactgtagtagagccagcgccacaaagagtagacacacaggctgcttttagaaccatttctacataaaaacatagtcggcgacttatacgccggtctgacctattataattggtcccactcctactcctctctcactctcactattataaatctaataaattcatactccattatatatatttttaatttttttgttggttggtgctacacttctggtcgtaatcatcatcattgtgtatttatatatttatggacccaataaaattttggcctctctttagaaatgctaaaaggccacttctatggtgtaatattattattatcttataattaaataaaatactgttttttttagaactgatctgtacattaataaaatttgaaaaattcagttacaaaatcagaaaatacacacattgctaccattacaattccaaatccaatctttattcattcctaaagctttttttgcaagagcatgtgccatagtattgatttctctaggaatatgataaaccttggcactagaaaaagaagataaagatgatattataagaatatttttatttaaggaaatgtatttttatttaaagaaataaatttttatttaagcaaataaataaataattgattttttgataaatgaatattttatattcattgaatctggacaaaatcaatta

SEQ ID NO: 307685 - DNA, 1639 bp, Cannabis indica
ataaccaactttaagataatttctaacatgaatagatacacaaaatataaccagttttgtcataacatctctagatcagattattattaaattttattttgataaaaaaatcagttcagggtctattttgtacaagtttagaaaatacagggtctattttgtcatttaacaaaacagatgatccaattggtaatttttacaaaatacaagattcataatagtatttaccctatatatattttacaaaatcaaagaaaataatggtgttagtttttcaggaaaaaaaaactaatgaagattgcaagattgaaggagtgaatagtgatggtactaataatttggaacgtgtgtgtatagatctattgaagattttttaaaaattagttttcaaaacttgtatatgtataacaatgatgtaggaaaattttgggaattgaaaggatttttgggtctatattttgtgtataaaagaataacaaattgagtccatatttcataaagggaaaaaaaaaggctttgtgcatgtgctcaacttgtacagtttatggaccggccttcgttaaggtacgcttccgctattcatattttttttttctcgtttttaaatcaacaaatgtaatctttacttataataaaatgcaatatgtttgtctataaaattaattttgatattgcatatttttttcatgagtgataaagaattctaacattgcgcccaacaacaacacatataaaaaatccaactagctagaggctaactaaaaagctagccaaaataaaattaaaattattaataactacatattcccctagcacctagccacacaatagttttatgggtgagaacctacacaacaccactaaaaagcttattgctagcatgaaaccctaacctacaaccaaagtatcatacccgcaaacgcttacacaaccacttcatcttaggcaaactaacactaactcgtcgagtccaacgactcaaggacaaggcactgttctagaggcgaatctcccattgccagaagcaacacagatgaccttccatctaccctttgcacactagatttgtgaggattccaccgtccgagactacaaacaaaacatagcatcctcaaccaaggcaaagcaagttgaacgacgataacaactccaaccgagagaataaaacgattaattatgagttaattattaaatttttcacagttattttatgttcatatagtcaatgattgtactaaatagataatcttaattataagtgtcatttaaatattttaatcattcattcataacatgagatgagaggactatttattgattttgtcttctttaaaacttatcaactcatcttgccatttttgtctcctcttttgcatatataactttttctaacataatcttttgtttcaactttcaattcgtcaatgaataatatagtaataataatcaacgaaaaaatttgagtaacactaaaccaccggcaaccaaataaaaattagatttcttttgaagcaatgataaaaaagttagagtttttcaaaaataataaaccaatgctcacattattattattttattttatttggctgaaagagacattattttaaaaatataaatcaataagtagtatatattatct

SEQ ID NO: 307686 - DNA, 3189 bp, Cannabis indica
aaataaaaattatttttttttccaatctattttattttattacctcaaacctacaccacttaaattttaaattttgaacaaattacccaaacccataaaaggaatataattatatcattactattgtttgcatgcaactagcttgattatagttgggaccactaaataaataaacatcaaaaacatgtgcatgcaaaacctacgtaatatctcaatcacaaatatatttgaaaatatcttatatatctttttcttaggtctgaaatctattcacctccatcaagttcttaattatctctattatgcatgttaactctaatttaattagttacatgtatatatatgtgtgttaaatgatcaaatcttgtcacttatgcattaattgagtaatatgtacttaattttaattatatatatatatcataagaaacaatacaaaatgtttaatatattttaaaattaatttgctcattatagtttctttttggcgtgtaaacctagcaccgcaaggaggggagggtctggattcttatttcttcttcttcgctggaatctcgctggtccttaatttaggcttggtcgcggggttctgatcgggagggtgtgctgatattgcgagagacaccacaaaagataagtacttttggtaacaatattttagtcacaacatgatttttttgtgactaaatatgacttttaatcacaataaaaaattactcatgactaaaaaatatagtatttagagacaagttaataatttagttttagtcacaacaagtaatattatgactaattaaaaacacatttaatcacaagaaactgtgatttttgtgactaatacctttcgccacgaacctatgatttataattaattagttacaacatttttacttttaatctacaaatttttttgtaactagaagtaaaaaaatttgtagagagagttacggtgcctttgactttccgtccaaacgcttttccaatctggtccattatcaagatctgcatggcttcttctctccttgtgtttcattcagctttcgattcgtctccgactccattgtaccagtatggcagtctggtaggtagcgaggtgaacggttcaggagtggttcgtcttggaccagtatggcggtgtagtgtacgggtttttggattgtatgatcagtcattggaattatggagacatatttgattctacttctcgtttggttgcttggtgttattgccagattttatttattttaatgctttattttggttttttatttttataataatagtgtttttttacactgttttgctagattagtaaggtttgttcgagaggagattgtcctgatctctctttcattattaaatttgaaatatttttagatctataattggttgttttgatatttcccttatttacaatttaaatgggattgttattttctaattttattgacttattggaatttgagtttgagattgttgttaggatttccttctatgtaatagtaaacggcttggtaataaagcctattattattgattttgctctttaaactatattttaatttttttaatttacctattattagatatttccccctttttctaaaaaaagaaagaaaaatacaatatatataactatttaacttagatttatttgacgtcattaccttttgaaatggtgacgttggcttggacagccaaattttattataaaccacaaatctttgtggtgtaacgtaaacctatagatccatatatggaaaagtcacatgcataaataaaaaaaatatgtttgtaaatatatatatttacaaaactatatataaatattaatgagggaggggaccatttttatgaactatttcatatttgccattcacacactaaaaaaaataaataaaaaaatagttttagtaacaattttttagtcatatatataacataaattttttatgattaaatgtgatttttagtcacaaaatatagtatttgaatacaagttgtcattaataaggatgtcaattatacccgcgggtaagggtacccgcaccctaatggggcggggatgggagttgactttcgggggcgggggcaggtataggtttaaatattcatacccgagtcggaaacggggcggggcgagagaatagatacccacctcgaagccgccccgatatgatatatgtatatatttaagttttaaaatcataactactacaattaaaataacttaatattaggtttttttattgattatacttcatttttttactatacacactattctacttaagtttattgttttactgaatttttatgaatatatttttttattttcttttagaccatcattttttttaaaaaaaatatatatgtaatgggtacgtacctgatgagaatccttccacgttgagtaatccccaccccgccccgccgcccccgctttaatttaaacgagtatatattggggcgggtatgggggtgaatttaagaagtgggtatgggggagccattcctgcacccgccctgtttacaattattgtgactaaaaacacatttaattagttacaacaaattgtaatttttgtgactaataatactttaagtcatggaccttttaatcacagaatgataatttataattaattataatattttcacttttagtgatcataagttttaatattgtgacaaaaaatctaagacttttgtagtgcattttcacgatagataagtaacagtgtcaaatatttttagagtaattttcagcattcgattgcagataataataacttaagtataaatattttcgataatagctagtacttaagttttatttttagaatttccataaatacatggccgtttagtgtcaagttaatagtcacatgacaattcctaatcggtccatattaatacattttttaattttatttaaaaattaatttaaatataccaataaaaaaattgacacgtatataacgacttgacacttaatgtccaggtacttacaaaagttccaaaaatataacttaggtattaccaccataaaaaattaaactaaagtatttatttacaactgagacttaaacttaaatatgtacaccgcaaattattatatttttgaaactcttaggtggcgtttggttggaggtaatgaaatggaatggaatggaaatgaaataattt

SEQ ID NO: 307687 - DNA, 3515 bp, Cannabis indica
ttgattgatgatggatggaatgatgactactaagtggtatttgtgtaataaaaccaacattgtaagtaaaaaagttggtatatgcgtgtaggagtattttggtaataaattgtgcaaaagtgatttttcatgtaaaaatttctatatattatctcttttaatatttttttaaaggagggcaagttagcttgctgctcaccctcgtctctatataaatccgcctctgataataaccaatcaaaatttaaatttaaaacatgcatgtctaagacaaagttcacctaaagaatcccaccaaaacaaataaataagctaggaaatattgctgaacaatttctttattctttatcatttttttcttatggaataaatgtattaaattgaaaaaggaaaaaagtacgtagcaaaaaagtaaagataaaattcttatgatatagttcttttaaataaaaaagttttcaaaaattatttatttatggagatttagatatcataccgaaaagcgtttttggaagttaatcttgtctatccaagagtctccatggaaagtttttctccgaaaaagagttctagatagttaattgttcccttctagaagggagtctcaaatagtcgacttcagttaccgctattcctatttgggaagtcctttcagcatactctttggtctatcttccagtaagcgtacgactcatctataagcgctttaacttgagctgatgtggagatattttatgcgagaagtttgttaagttcgttaagttgtaactaacttaacaacttatcatttgtagtcactgcatcactaatctataaataccaccgacacttgttattttgagaatgacgaatttttgataggcgacttcaaagttgaagattaagattgaagagagagattgaaaggtagagagaaatgtacaaagaaaagagggagaaagtttaaaatttgtatgaagaatctttcgtagatgaagaagattcttagataatagtgtgagagataaacactttgagagaattcaaacaaagaatcgatctcgactgtatttgtactatgttcttgctcaatcaataaagacgatttcagtggtaaccagaacttgagtagagccatagatcacatcgatctagaggacttgaaatagtatatatcttggtattgatttttattgttttattgctttaattatttcttgttgtaattactctgttcttccctgttttatctctaattcttgtttgtgaactgttaatcttatcattgctaattgtttgttgattaagttttggttgatttaattttgtatataatagttgtaattttcccacaattctttttatcaaaacaaagttaattgtctaatccaaaaacaaaatatacttacactatgtttggtaggaagtaaggatgggtagatgtataggggctaaagttgaaaggagatgaataattccttgtaaaaaaaccgtgtttttacatatgccaataaattttattaataatagtaaaaaaaatacaactgtaaagatctgcaataacagattggtttgttactgtaaaacgcatgttgtaacaaaaaagaaacaaaaataaatgttgcaaaatttaaaacttgacacaagagaattgtacgtagtatcagtgttctttcaaacactactattctacagggtcacgtccagagaaatgaaatcaattagtaaattatcaaacaattataaatacaattgacttaaataagattagactctctctaaagctttaccgcaatcctttataatttactttgctaatcagatttttgaacaccaccaaatagcgaactcccttcgttaaacaaaaaaaattatttttgaaaaaagaaagtaataatttgatattttctattttttatttttttaaaattcagttttaaaaaaataattttaaaaatttttgccaaacgatcccttttagtttaaaaactgttttctattttaaaaaattaaaaataatttttaagttattaagccaaacagcccctagaagtttctcttagcttgtttctctttcgatcatgtaaaaaagagttgtaatattgttgcccatgttgtttggctaaattgacttttgttattgtaactaaattatggaatagaaactttactaagtgtgcatctgctcaaattagtccagattttcttccccttgtttagttttgagtaataaaagtgtctttaagaaaataacaaaaatatcaattaacaataaaatcttcttaataattattgttctaaaaatatttatgtaaaattgtaatctccctctctctcttattttttttttttttgcaaagatttatgttaaattattggaaatattaattcaattttcagagttcttaaaagatttttttttttatatatatagttttttaaataataataatgtgatacagatatagaccaatataaatataccacgtatacataaagtgcgcactcaaaatttaagttaaagggagcatgcttttatatatatatataagtgagggatgtattttttttcctacatgatataacatgtttaaaattgatacaaatttgtatttttataatattagatatggttttaaaataaagaaaataacaatagaaagattagtttaaatgattacgatcttgattgtaaagattaaaaacaaaacttacaatactagaaagtaaacatacttttgttgaaatttgaactcataatttctatggtgaattctcaccctcaaaacaggttgttacagcagtaacaatgtctaagaaacacaatttaaaactaaaaccaatcacaaaatcaaaactcgaacttaattgaaaatagataaagaaaacttatcttgataatgaatgaatgatggatctttattgaataagaataatcagtagtacacaattgaaggagcccaagattacaactcaacacagtataaagtattataaaaaaatatctcacattgagggaaatcacttcaagagtgatactcccttttacatccatccacacacactcactatgatcttggactctctctccctctctcaattgaatctaaagtatgagctttggagattagagatcagaactctctccactcagaactctctttagaatagaggaacccctatttatagttgttggtggggtcctctttaagttagtattaaagccaactgttataactagcaacatctttctcaaattcatctaatgagaaaatacatggacaaacacttgacaggttaagtgagtttaatcccaataattctacatgattagactcacttaaacactaatccaaaagaaatgagtgaggacattaaatgtcctgaatgctcaacaagtttagtcagtacctaaacttgtctctagttatacttttagtgaaaatatctgcatggttatcctgtgtgcttattttcttcacttgcaccttcttggatgacacaatatcccttatgaagtgtaacttgatatcaat

SEQ ID NO: 307688 - DNA, 1506 bp, Cannabis indica
aaataaaagtgtattttgtaaattttatttttattctcattattgattttatttaagttgggtctgggtttgaggccaagattgtgaattggtctaggtacggggttggagctagggttcgagtttgagttccaagatctacgttagggtcgaagtctaaaatattgattaagaaaaaaaaaactatttaaaaaaatttaaaagtgattttcgtttgtttttacaatttttaaaattttaattctcaattaaaaaattataaagtgaaaacaattttataaaatatattttaaaaaatattttcacttttccgattttaaaaacaaaaaaaatgattaaaaaaatgttaccaaataaaatcgtagtaaaatattttaattagagtaatttgcagtataaatacttaagtttaatttttagcggtggtaatatctaattaaatttttataattctataagtaagtgaacattgaatgtttttttttttttttttttgataacagaagtgaacattgaatgttaagtcatcatctacatgttatttttttacttagtgtgtttttaaactattttttttaaaaaaataaaaatttaataatttaaaccaattaaaatatgctacctaataatttatttaagaattaacacttaaatttaaatatttgtttgtaactaaaaattaaatttaactaattatgccacaaattattcttataattagaacgccaaatacggctgtcaccagtcaccacccctacattgtcctcaatctgtgtgttttggactgaatgctctcttttccataacaacattatattttatttatattttttctatccttatcatcaatccacgtgtgaaacatagctagtgagtgagtgagtgagtgagtgggtttttggtctataatttgacattcatatattcaattaaaaagagcactatggatacgaagattttaagcttggattggagccgactgctttgactttgaccataataaacaaataattatacatttactgtacatcaaattatgaaatatgcacttttttctttcattctgaatggatgaatatacagtaaaagagagggagaaaaggggtcaaaattgttgtctatattttcgtacagagaagttcaaatattgttgtattaataatatggcatgacatgagatatacaaagttacgttaagtttggatatatgaaataaatgaaagtgtaattcaattatagatatgaatttcctttcaaaaaaaattatagatatgaattatgatattttaataaatatatattaaaatattttaatatatatgtatggttgtatgtccttctcaaaacatactcaaattgtgtctatcattcaccctcttcactcaagagagtagtgacttttaacttttccaattaggtaagtttatagtgtacctctaaaatagttattttagtagattttttttctcttttgatatttatgataatttttaatttttttttttt

SEQ ID NO: 307689 - DNA, 1852 bp, Cannabis indica
atatatgagtgaatatttaatagttaatataattatgatagttgtaatttttttttgtaatataagtcattaatgggtaaaaattttatttttagacttaatattaatcattatatacttaaataaattaatttttaattaaaatatttaataaaacttttttaaaaattaatatttataattttttattttaaggaaataaatgaaataaagttaatatcaacaactaatttattaattatttttaataaatttttgaattaatcataaccgtctctaacataaatgtacccatatacatatgtgatgtaatcattaaaactttctaaatatatattttaatacattttaattaaacttttcatagttatatcttcggtgacaaggcaccatcatgatatataaatatatatttatatttatttagatttatccatctcaattgattggtgactaaaggatagaaaacctatttgggtcaacggctaccaaacatactaacgaccatgagtacaacactaaaacgtttctctatattttatatattttatatatatgtatatggtattttccttttagaattttcttaatattgaagttttatgtaagaaattttaaacacgtatttagacaggctctttctttttagtttctctttctcattttcaatgactatttaatttaatctcttttatattattttcatttttcatatatgtcatggtattaggaatattttctcaatatctcttttgtgcataatcaacgttaataattccttaaaaaacattaataattaattccttacaaaaaatttaataattatcaagtgatttatgttaattatagccaatgtatataattgataagtttaatatcgttaaaataaataaataaatgaagagagagagtagtcaaaataagaggagacgtaccatacatgctttaccgcccaaaaccaaatcgattttctttcatttctttttcttctttctttttatttatttattatttattttgaaagggagtatcgatctttctttctttttggataaataattgatctttctttttttttttggaactattcattcaaataatggatctttcttttaatgatgctaataaattgcacgtaaaactaaataacattttgaagaacttgtttcttagagaatgaccaactcaatttttaatcaaggtcaaaatcaatagttatttttttatcactaaaaaaattacttttaacaacataaatattttgtagctaaatgtgatttttaatcacaacaaatagttatttattactaaaacatagtatttaaatacaagttgtcactaattaattagttttagtcaaaacaaatattacgaataaaaacacatttaatcacaacaaattatgatttttgaaattaatacttttagccacaaatttttttttcggttctataaatagtcacaacttaatttttaatttacttttaattacaaattctattatgactaaaagtaaaattaaattattaatactttactgaagaaaaacaaatataaaataaatcttaaatatatatatatatatatatatatatttatggccaattaggatttttttttacttaaacttaaacatgtaccaaatcatgtccctgaacttttttggtcgttaaaaattccccctgaactattgagattgttaaatttaaagagttttgtctaatttcattcgattttattatttcagtgattgttgatgtactaaatcatgctccctagagtttgatatctaccaaatcatgccctcgaatgacatgtactaaatcataccccttgaactttcatccatgtt

SEQ ID NO: 307690 - DNA, 2001 bp, Cannabis indica
cgacatggtcgaaaaagcattggccgatctcaactgcctctggcctaaaaatgtcaagttaaatcttagagttttggtcagggaggtgtagatatagtcacagacagcctggcgtgtgccttctccgcgttctctttttcagccgcaagatcacggataagaccagcattgtctccctccagcttcttgactcgcacatctagggcttgaattgtcttcagacttgttcgccctctctttcgcctgacctttgaccttgccgagatcctcgatttccttgtcgttggcagtcgcatcaaatttttctttcttcagaccttcttgaagagccgagttctgtttttttcagaagatcgagatctttgaaacccgcaacaaaagcctgcaaaaacattgtcatgaattgcgaggcaagttcagctgaacgaggaatgcgatcttcagtatgagtcccctcaactttggagacgaacttgtcactcacgaacttgtccttaagaccatgatgtcgcgagccttcatggcagggtcgatcacaactttctttcccttgtctttagcaactttctgttgcttcttcagcgagtcaaccaccggggtagggacaacatcatttttcctcttttgaggtgttgtagttgacgacatcgtagtactagcctttgacttgcgattgaagacttgagcctatttatagaaagtcatatctgcgaggggaaagacgagagtaagaaattaaaaaattaagataatattatcagcaatctatcaaattatattacctgatgttggtctcgacgtttgcttggaaagacgcttgtctattctttttttctgcttctctgaaggctctttgtacattggttctcccgggagtttagcgtcttctggattagcttatgctcacgcaattttgcagaagtacacaataaacgacaattgtgatcttgaactagaaggctgcttaagacttcagcaatttccagacgacttcggtccagtacagatcgagtcggtctatctgcgaatatggaaaatggtattagcgcctatgaggtaatcaaaataaatattaagtgtaaaagtatgcaacatacgaggtcggtagttgaagtcaattctgacccctgacatcttaaatgcatagaaccattttgatttctaatcctccatattggaaactgtaccttccactccattcatttcagagttggcccacttacttaagcagtagaagctattatcatggccaacactctttatgtcgtaaaagaagctaaaatcctcgactgttggttctcctcgcgtgtattccatatacatcgcatagaacccgagaactatacggtaactatttggagtaagttggaaaggggaaacgtcatagcgagatagaatatcctttacgaaagaatgaaaaggaagcatcaccccgcatcgaagaatgggaatcgaaaccatgacgttctgcgtagggatgatttcaggattggtgaagggaaggtgaggtcgctgcattggcaaaggcttagaagtagttgtatgaatcaaatttaattttacgaatgcaaacaagttagactttttgactcgtgagactaggtcctcgcaggaaaaaggttcgtctagttgggcattgtaactgaatccgtctcgctacccttgccttccacctcatcctccatctcacagtctggtatttcgacgtcctcacccatttctttgacctttgtgtctgggacgatttgcgaatgaacgagatagccttgagcaaaaactatggactcgctctcgcgcacctctaatgtaacgccctaacaattaggcacgttacgacaactagtaatataacctaatcctgctaaaccgggattactaaacaataagagcggaaaaaatttaaactttaattacaatgggataaaaacataacttgtaataatttaaactttacaatcaatccaaaaagtcaacatatttttgggatcccataaaactttt

SEQ ID NO: 307691 - DNA, 2825 bp, Cannabis indica
gtattatagcttacacgtgaaaaataggagaaaattaaggaatatgattccatcctatcaagagttaaaagttctagggaggaactcgttgtaagacagcgaaagagagatcttatatattattatatctgtcgctcaccaaaaaaagcttttgtgtttttaattagtatttaaaatgttgttataattttttttttgagtcaaaatgttgttataattttaattttattatatgtataatttataatttttgttataatttataatttttgttagaatttagaaatgtatagttaaggtgtatcttctatctcaaaatcatttgacaataagatgagtgatttataaattttacacccattagtaatataggactatgtctaataatataatgctgataatattgttcaaatatcgtatatatttcacacttgtataaacaagatatgtatacttacacacttataattagtaggtggcaataatattgttgtttaaattagtgggatctttctcaaatcaattcgattggttgaaaacttttaccacttaattttattgtaatttgattagttcaaaatattttccattgatgttcaacaccatattaatatggcattttggagttgattaacgatttttatattatttatattaaataaaacttgatattaaaacacactaatatatgatcatgccgcctaccattaattatgtctgctgtaccgtattgtttctttgttgatggtgcatatgactcttccacgggcctcttatttcccgttaattttaatatatacgttttctcgaagtttgcgccatgtttaactaaatccatatcatatatatatatatggtgtaattccagatatattcgatctctcccctgattttatattcaattattgcatttttccatgtgatagaacaatagcaatatttctgcatatttattataatagtagtgaatagtgataattaaataagttgccagctctatatatagaatgtcaaattaattataaaaatccacttaccggcaacatacttagttatgacctaatagtaataattcgggtctctaatcatgattaatattagcattattatgtatattttgtgactgtgacttagatgtatcgatcacaattaatagttttaaatggagacatagttatattttgtcaaagctagctgctatatatacaagatgaaaattccaattatttcattgacaatccttctctaaaagaaaaaggggaaccttgccacacccacacaaaaataactctctagctataatcaatctaagacatgggatctccaattttttcctcatttttcattgccacccttctcctcatattggccaacagagccatcacagctcaggattatcatacttcatcatctacttgtgctaaaacctatgtcaaaaatgcatgtaattcaacattgtacgttaaagaatgccaaaaggcacttatgccctacgccgccaaaatcaaatccaatcctaaaaagctatgctcctactctctcaaatttgccctagccgccgccagcgacgcttataaaaccgtcgtaaagattggaaaatctaaaggattgacgacaacggacaaggccgtcctcgcggattgcaaggacagcctcaaggactctgtggaagaactccagcagtgcaaggaagcccttgatagcattaatagaaataattctacatcgtccgatgaggccaagttccaaacggagaatataaagacttgggccagtgctgccttaacggatgaatacacgtgccacgatgagatcgaagaagagaaggttggcccaaccatgaagaagaaactcgatgcttctgttgttaaagtctccagatcggcaagcattcttctggctatcgttaatggttactgcagtaattattgatttattaaaccctagctctcatttagtttttctcgtgatcgatcgatccacatgcattatcttttattttttattttttataaaacaagaaaaaagaagtattatgtgtgcagttttaattaatacaattaatttaagttttgttctctgctttatgttttgtttatgccactaaagtggtaattgaaaggttatgccctgtaacattattatttttaagggtaatcaattaatttacgtattgtttttgttcgggatatggattccctttataaatatattttgataaatttcaatcacattcccttagcatttttatccaattaataaagaattgagatgcaaaatgaccctaaatttaaaaactaagtacactttttaaaaaattaagaaaatagccaaatctaataaattagctaataaaaaatagaaaaatacatttatcacatttttttttaaaaaaaaatatatataataataaaattaagttacataatttttttagtattgcatattattatattgtaacaaaaataaataaatatattagatcatttaaatatattgtaacaaaaatgtcacaatcaatttgtactactaagaaatgaatatgaagaatggttttgggttaaaatttgttgaaatggccccctaattgaaaatattcttcttttcaggggaaattttaacaagttttttccttactcttacactcgttagttatctgttaaaatctcaacctacacatctccaaagatcatgaaatttcacgggggcctagccaagaccgttgtgcatcacttttctcttggacacgttgagagaaaaattagttttcttgcactaacgatcgttttaatcgaaatagtgaaaatctcacatttctgatagtg

SEQ ID NO: 307692 - DNA, 1219 bp, Cannabis indica
tatataataatagtaaaatatattttgaagtttttttttttttaaaaaaaaaagaaaacgactggcttggcttgatggatctagataacacagggcatgcatgaagtgaattcccttttgatgagtattgagttctcaactactaatagtttgccaggggaacaaggacagcaaggatatggctcactcagtcttcccaataattaataaccacatttatataattatacacttctatttcttttctgtatattaaataatttggacaacatatatttcattttaccattctattatgcctaattatatattattactcaaataaataaattaagttgacatctctttctttgaaaagaaactgagtctcctttagatactgaggctgtcatgatttatggtgcaattaattatatataatttcaagttattaatcttggtgttggggctagacttaataaactccatattgaccaactgacactgaaactcaaatcccaatttctataagtatgtacaattaatataaataatttgtatagcaagatatgccaaaacagtttatatataaatttatgtcttttacttaagctattggacccgtgaattaagatcctttttgtcataaccaatacattttcaaggctcaatgagtacttgagtagttcattgggatctcccattttagtcctttataatgtcttaactaattacattataatcccatgattagtgctacaaattataaagagaaaacacccatatgttaaaactatgattaaaagtttctatgaaaatggaaatgtaggatctaaatatggcaagaaccgatggagggggttatggtacaaatatatattaattataagtagacatattatatatttctatatttatatctatatatgtatgaaattgtaaaattaatatataagatgaatttgtgtgtggtgagggtaagtgggagaaggaggaaaagaggggaatccaaggtagaggaaacccgagttatatatacgaaatacgtttaagaagatttgccaggttcgtttgcataatacgatgtaccttcaattattccaaaaaaaaaaaattacaatgtagcgtgaagatgtcgtttttttttttgtgtgggaagaaattttggatttatagtgctgataatttatactattttattatatatatatatatataattatttactaaataaaataaa

SEQ ID NO: 307693 - DNA, 2589 bp, Cannabis indica
tattattaaaataattaaataaaatggagagcacaatttgagcaacaataataaaagtgagtttctatgtcaactttttaactattatagctaaagaaaaataaagagcaccattagagttgcttttacaacttaaggttgagtaattctaagaaatacttgaatttattaaaagacaacaccttaatgccaatattaggagggttattttctcttattcaattttgagtttcccaccaatctcctgtatctatttaacccaaaaatcaaaacaaaaaagtttgagcatttgtattactcaatatgtctaaaagtgaccgttaacattgctcaaatgatattttagtctcaaaatactcttttcaactataatttcatcaaataattaaaaaaaaatggaaaactgagtttcctcaattgatgagcttaaataaaattgtatattgtatggcccaatacagttaaaccccataacaattaacaattttgattttttacgcaatcaaaatactattttaaaattagaatttaaaagtaaaaaagaatgggtttatgattaacaagccctaaaatcaaatgacctatgataccaaattttaattttaaacacgctaagaattataaaatcataaaatagatttaaacaataataattataatactcttgaaataacccaaagttatattattttatttagggtacttagacatacctccaagcttgatattaattctccaattaccaagttcatcacattacatccactatacgtcaaagaaagataagggtgtaatgtttgatgattactactctatttcactctctacactcacatacccacactcatctcatccataacaagagtatcactaataaaagggctcgcttaatacaataatatagtctatactgatgaaataaaaaaaaaatatataattttacaaatattatataaacaacatttaattattaattattattaatctatcatgattgtaagtttaaaaaaaagataaacattaaggggtacttcaaaggatcacaagaggtaacatattgttatcattacaaattaatatcgggtctcacacacattgatttattaaataagatagaaaattactaaccacttacaacacactacattagtatggtgttgggcactttaaaatacctaataaatgctatttaaaaaattgacaaacattaacttggaattcgtttaaatattttagcgtttttggtggctaagcccaactatcgttttacttacaattaacatttcagtataagtaaagtgatagtggagatagtttagccgtaaaaaaattaataatgtaaaaaatagattacatcttaaatttataaacacttaagtagtttagtagattttaccactaaattgaacaaattatgacaaataaataatataattttggttttttgctagaaaaaaaaaagtaataataatgtaattttaattttgagttgaataccaaatccaaatattttcccaaaaacatgaaagaccacccgccaaaataccaaatcttactcaaaatttcaaaatccaaacaacccttctcacaatccgatctccaccgtccattccctctatccacagatcgagtcatccacgtcatcaatccgcatctcaaactttcaaccaatcaaaatccctttcgttcccatataaatataaaacaaaccaataacgcaattcactcaactcattctctttcattcgctttctctctcaaatttctctctttcgaaaaacttcagagttcataacaatggcgccaaaggccgagaagaagccagctgagaagaaaccggtggagaaggccgagaaggctccggcagagaagaagccacgtgccgagaagaaattgcccaaggacgcttctggaactgacaagaagaagaagagaacgaagaagagcgtggagacttacaagatctacatcttcaaagttctgaaacaagttcatccagatattggaatctccagcaaagctatgggaatcatgaacagtttcatcaacgatatctttgagaaactcgctcaggaagcctcaaagctcgctcgctacaacaagaagcctaccattacctctcgggaaattcagaccgccgttcgccttgttcttcccggtgagctcgctaagcacgccgtgtctgagggtaccaaggccgttactaagttcacaagttcttagattattgaagaaatgatttcgttcctggttgtaatttctatatttatgtctgattagggaaattagggtttctagttgtaaagttaattcctttttgccagactagtatgggtatatgatcatacttctcctgatttctgatagtccctttttgtaattcttggatttagatttagatccatttgaaatgacaagattcaggttgtatccaattctgttactttatgaaaattgaatctttctttgattacgttaggataaaaattgtctgaattgattaagtaaatgttgtaatttcctgttttgaagaatcttaggttcaaactaaggcaaaaaaaaataatatatatattataatgaaaggtt

SEQ ID NO: 307694 - DNA, 631 bp, Cannabis indica
aattgtgaataaaattaagaataggctataaatatatacacatatattgtcacaaataataataaaagtttttaaaaaaactacagaaataaaaataatttactaccactcgcacactatttttcatgtatgaaccaaatgaatacatgataacgtaacgtataaatataattttgcatcaaattctaattggttttggtaatttatacagtgaggataaacatcgatcaataagtatatttcgttcgatagtaacgtaaatgattaatttaacttattatcctttaataaaaataaaataaaattaggcataatttcaaaataaatgcaattaaatattaataaaccattaaaattatttaaaacatttatattttttacttcaattaaatacatttttctgttaatttaaaagtttgttttggtagctctaaaaatattattatttgttgttggttaggaagtaagtaagtttcaacttttattcctaaaaaactcttttgatataaatcaattttagtagttttcttataagttaaaaataaaatgcacaagcttaacgatgacctatatcatatcaaaataaaaactgatcaatattaataatattctcagtaataaatagataata

SEQ ID NO: 307695 - DNA, 1166 bp, Cannabis indica
attcttgactctttgagtcacgaagaacactgctcaagtttttgaaaaataggaatttaattctcgtgaacctctagccggcacataaggtccgtttgtgaccctggccggttcatgtctatcgtaagaatctggacggttcgtgacttcaaatctaagaacctggccggttcatagtttcgtcccctgggaccctggctggttcgtggcttcggacccaataacttggtcggttctgcttgatcttagtaaagactcttcatggctttttgagcctattccttccttacctaatacttaatttccatagaaactatgtatggaatgccttaggtagagcatatcccaaccaattaatagcttaaaactcaatgtctgtttaatttttgcacttggatcttgtactttgctgattaacggctttgtacattagagctacatggctaatattcttaggtttaggccagttgacctgtgtttcgcctaagtctttttcttttgttcgactgctcaccttcttttatcttttttacacagatgaacccgcgcgacttttgcggaggtgacaccggattgatgaagaattagtgcggatcagatgcactatgagcaaaaatagtgtgattggattagatgataatacccctattattaccttttattctggttagaataattgagtttttattttccaatttttattagaagatctctggttgatattcactgataggtttgatttgtcatggaatcacacggattggaaatctagcagtattaacgtttttttggtacttcattgttagtggtttaataaacctttagttgaaggtgctattagagtttttttttttctttttattgataaacgatttggttaatctatttttgttcaatttattcgatgagtataatttttatgttggactatgtttaattttattaataaattaaaattttcatttacctttccaaaaaaaaaaaaatcctactcttgtaattattttatttcattagtataattcattaaacgattacacaattagtttttctcttggttcaatactaaagctcgagcattttcaatgaggtctaacattactagtggtacaatttaggagaattatctcatatattattttttttaaaactttttttttttctaa

SEQ ID NO: 307696 - DNA, 1550 bp, Cannabis indica
tgtaagagaattgtaacattaggtatttttgcctccaaaaataaacattaaatatttaagtgtataaaatttgaaacattacatatttatgtcccaatttactcattcaaatattacacaatttcacctatccagttgcggatgttctaataactattacttttgaaaaaaaaaaacaaaaaagggattgaattgaatttaaaaatttaattcatcgtaattattggtcacgtgtattagttggtgaagttagaaataatggcatgagactctgccgccttggcagccggagatggctccacttctggcgacggcttcacggggcactttccgaggagttccgtgggcaaatcaggtatgcccttttaggaaaacgtgtaaaaaagtttaaagggatacacaacctgctggagcttgacctgtccgtacgccccctcgaagacgccggagccgccagtgatggccaagtaagagtcctcgtaggacaagtaggagccctgtacggacaaatggccgtaatcgccgaagtaaaagctgtagatggcctcgtacctgtccccgcgtttctcgggcacgtgttggacgaggacgcagagtccggaggttatgccgagacgtttctccaagtcgccggagtagatcttgtttgagaaaggtaccagatcgccgagagagttgaccggtttttgactcagtttaagaaggattggacttcccctgtctcgctcgttgatctcgtacacgtggaactcttgaacttttgctgtgattaacaatcaaagttagaaaaaggaaaataagagaatgagatctaattatttatataataaatcccagtatagttatgtaaacaaataaaatgtaaaggtatgaaaatcttctttaacttactgggtctagaagagttgggtgatggtgaaggtgtgtttttttcttttgaaagaaaaaggctttggtagtgaagttggttgatgagttatattttgttaagtttgatgatggtgagagtttaagaatgggaaaggagtaagaccagttgaaacccaattgtgtttgagtttgggatggtgaacgacggctaatttggcttgaaattctgagtggtgatgtcgttttgaaagtgcttgtggacgccatagatcttaattacgtcgaaggcaaggtagtagctagtattagtaatggagattagagatgaaaaacaacagaaagcaaatggggacttatacaagagaatggccggggtgatataacaacttatatagaatataggtggtggggttttgggcacatgcgggttttgttttctttgtctaagtgcccagttatttattaaaggttgattagtaattttttctccttaattttgacatgtactaaatcgtgctctttgaatttttttgaccgttaaaaattcccccaaactattgagattgttagatttaaggacttttgtctaatttcattcaatttgactgtttcggtgattatttatgtactaaattatgctcctcagactttgatgtctaccaaatcatgcccctcaaact

SEQ ID NO: 307697 - DNA, 1377 bp, Cannabis indica
accaagaattgccgttagataggcacttttaatatataaagatataattcaaactctaactaaattttattgtatatcacaacagaataataataaattcttattaaaaaattgcaaattaaaatatttgtaatgaaaatatttaaattattacatttgtaatatttaagtattcgagttatttattatttattttatttttttaagcaaaaaaaatctagtttgatttatgttttggagcaatcatatgttccaccatacatttgcctacatgatgcaaaatctacttataacttagtaattttactgcaattttttttattggatactaagaaataatattacgataacaactaaaagttatatatattcaaataattttatatttttacagtaaattttagacataaatttcctaattgttgattttgattcaaataaattctcgagctcaaaattgcatcataaatcctcaaggtctcaattctactaatttctgttagtgcttattttaactaatttgttagttactgcaaaaaaaaaacgtcaggtgttgatgctaatttatagtgtaaagtcccaaattgttgagtttaatgtaaataattcccaaattcaaaaaattgttgcataagcttaagctcccaatttctctaatgggaatttatttgcatcaaactcgataatttgagaatttacgctgcaaattaacatcagtacgtggtattttttggagcaactacaaaatggtcaaaatgagtactgataggattacaaaaattgagagcttgtggatttttgccgaaactttttgaggttgaagatttatccgcatcaaacccaacaatatgagaatttatcttgcaaattctttaaattttatttactttacggtttgaattcatagttaatataacatgtatgatgtacaacttaaattattataaaactaaatatattgatattttttctcttaaattattaccaatgctaccttaaacaattctcattatgagttgtgactttttttcttactatctgttctacaaaaacaatattaagttgatttggaacgttaaattgtagcgtgtttttgtaggatcgatcaatgtaaaataagtaaatattttgccttttaataggatgtttgaaagctgtccgaaccgacttcactgtctgagtgatgtattactggcactcatttgaaatcatccggcgtcaccaccctccgattggatttcagagggcgttaacgttggctgattgaggatgtttgaaagccatcttgaccgacttcattgtcagaaggatgggggacattcgtctaaaatcatgaggcgtcacaaccatcaactttgtggttacgttggttgattg

SEQ ID NO: 307698 - DNA, 869 bp, Cannabis indica
attaattatttattctcttcctcgatttcaatatgaagggtttaatttcactgtttaatactcaacaacaagaaactttcaaaacagctctgaagtctgagctgatttgcctaattattcggacattttaattattaagaataattttaatttacaacgaattgcagcgttaacttggttagaaacctatggccatttttcatcagttttctgtttttcttttttacgtaatatttatatataataattgaaaattgggtacgtcaaacgatccatgtttctctgaattagcggttatgatctagtgagactttcaataggaaaatgctaaatatcacgatagaatggatcgttttcttattaatttctcaactttttaatagtaaaactaaaactagctaaaaacagatgtcaatgtatttacttttgactgttcaattattttttacaattacacacgttttaggagacaaaaacaacaaaacactactaatatatgtttactatggaagatcagtcgtgatattttctcaattttatatatatagtttgtttgttaaatttcttctctggttgcaatttttatgtgttgttgcttgttatgtatatggaacattgagtgttgcaaataaaggagacttgaatgaaatctcaaaaaatccaaagaaaaatggtgaatttttcaaatctatttgttttgaccatctctttcaaatatgagaaatgataagatatacgactcaaaaattacttagcttaaaatttttataccccataatcttttcactgattaccaaaatgcaaatgctaattacaatctcttattataatattttaattaatctctacgtccgaaatcacatgccgaa

SEQ ID NO: 307699 - DNA, 1830 bp, Cannabis indica
tttacagcaaaggaattttaggaatacaatgctaacagaatttatcctgacagctggagcaaatcatttacgagattcttttccaacaaccttggaatgcagagtgactattatgcctctgcatattgtttcgtgacattttttttcctttcgtcaagagaactttgttctttggttgtattgcacttcttttgtaatggtttgtagtttgttttcgtcctctaattttgtaagcgacaacttggtgtgcttaaaaggtcataccattaaatttaataactcataaattgtaatgcttgtttcaacaaggtgtaattttataaattaatttataataataaattaatattttaactatatatttaataaaatataataaacttggctttgaattttttaaactttgaggatctcttttttaaactttacaaaagttgtcatacgatatttacatcaaaatacattcaagagctctataaaatcaaattttgacaactcaacaccgttagtcaatagataagctgatatgtaggaaaggtctcaaactcatggcatgacttatcatgcacttgcttttatctgtaccacaaagtacctgtgagttacaaaaattcaacaaaaaaagcaataacacaaacattgtatattaataaacaagtataaccaaataaacacattttttaacctataaggaggaatttacattacacaaggcaaacatgtattactacacatttaataagacagtcacttacagttacctaataaagtaataattttattgttgcctaataagatgatcaattcaatttttgttgcctaaaaagacaatcaattctataatgacgtagaagtgaaatgatgatttcctttaagtttgacttaatatatagagataaatggaagagctcttattacaataattatattagtttactgaaatatcatttataaaaaactaagtgttttaaggataaaatacattgagaggtagaacggtaaatttgtccctactcgatgtaaatcatatatagaggatcattaattatttggattataacaatgcatggataattaatagcgtatttatatttagagcatatagagcgttcagaagtgcaattctgaatctatagtggacttacgaggaattaataagttagtgaattcacttagtaaattctagaactacttattggaagcttgattatataggtccatggtccccgcactagttgagataatattgacttatagactcagttaatttgttttaattaatcaattagagttctaagttagactgtcttatttataaattttcactattcaatagcttaattgagaagaaaagatatttgagggtttctttaataattaagagactttgtaaagtctaattaataaataagataaatggtaattttatttgataattaattataattattagataaatagattttacatttaaaatatggcatttgtgaaagaaaaaatataagctgttaaattaaaaggcaaaattgaaactagtggggtccaatacttgaccgaccacttaaaagaatttttagtccattttttttttttaattccatataatttaaatcctaaccctagatgtaatcttataaatagatagttataagcgcttaacctaagaaccttcattagtccattttgtcagataactgaaaataaagagaaccactcttaaatttcaaaattctctcatttcttcttcttagaattcgaaacctatagtgaagagtaccttgcccactcatatcaagtcactactcaatcatagtgtggaagattgtgaag

SEQ ID NO: 307700 - DNA, 805 bp, Cannabis indica
ggaaggaaggttgaagacgtatcgaacccccactgatctttcacgcacgcaaaaactatattcttggccaatcttgaagcctcagggaatgtatacaatttagcacagttccaccttaggccacctcaataaagcaaatttgagtgtaccaaaaatgcgctccaagaacctaagggcaacttatttgtcgaggggatcttggggcaccccatagccagggaactggcatacttctaagagcagcccccagtttaatatacaagaaaaggactcgggcttctggcatcgtaaccattacttccgtaggtttccaaacttgcttataatatctcaagttactttcttcgatgtacctttaggagttatagttacatcataatgatagaaattcctgttagcaaccttgaccagaagttatttgccttaactacacactttctaccaaccataccataaccaggcctgactaggaacctagcagactttgacgacactggaggaaaactcacagttgacgcagctgcagggtcctgcaatgttaatttttgatcagcttcttggcttaatgaaaaggcaatagaagtagtccatggtgattgatctggcaccgatgctaacactggcgctaggattgaaggttgagggatcgaagtagtgacaaaatgtttatcttgaccagtccgttatatctggtagtcctccataaataacttgatgttggtgtaactggtcttaacttcactgccaggcccaaatatttctcatatcttgtcgtttttgcatggtgtgttggaaattattttac

SEQ ID NO: 307701 - DNA, 1548 bp, Cannabis indica
ccaagcgctactatatcttttatcactattttgatatagcctttgtcataataaagatatgtaaattaaaaaatggtatttatgaacttgggcttaaataaataaagtgaaatactctcatatttcaatgactttgtgtgctttgattcttgatttgcatatagagctagatatggtgtgtccctagagaagggaacttttgacaagagaacagcagactttgtatggatgtttatttttggagcattgtcacttttggtaaggaaaaaaaatgacaatattttacagtctcattattttgtggcaatgaataaagtgatttaatatgagaaattacgataaccaattaataatcaggtgatggctattattccaatattatcatccccatttatgggaggctcactagtttttatgatcgtctatgtatggagccgtgaatacccaaatgctcgtatcaacatatacggtcttgtatcattgaaggtatcatattcatatgtacaaacaatacaacactttctttttattttctaagaaacatgccttttttttttctttgctatataatatatatataataaaattcgttgtgtgtgatagggtttctatcttccatgggcaatgctaacactagatttactatttggagtgccattaatggaagacattttaggaatggtggtagggcatctctattactttcttacggtgctttatcctctttctggtgggaagtacatttttcaagactcctatttgggtgtatccttttaattttatttttcttagtaatataatttatataatgcatttatgtcatgatgaagtaaaagagttttcttaaattaaggagtgaattttaattcagtcacaaaatagtggcatattggggtaagggaagtcaaatgaactccccagtggagagagatccatttgctggagttgccttccgaggaagaagctatcgtctcaatgggactccaacaaggcccgcccaccatggccatcaggatcaggatcagaatcaacgccctaaccatcaagctaatgacaatgggggagtttttcgtggaaggagttaccgccttagtggaaattagggaaaattttatttttatggtttttaagtataaatttataagatactaaagagcaatgtttgcctttcaaagttgctctgtggcaatttttcttgttttttttttttcttttcagctgtttactttcaattttttgcatttttcttcctgtaaccacctccgatgtcttccagtaaccacactaatcctcccctgttgtcatcccttcccctataactatttttctcttcttaactgatcttcaacctatcaccctgctctatttctatctcttctatttttttgtttattacctattcctactggatgtgtagtaattttcttaccacttaatggactcttttctgttagaatactgtaaactctgaatatagctctaattaattcaagagaatcaaacaataagattaaggaatagcggaagcgtaccggagtccatagaatc

SEQ ID NO: 307702 - DNA, 1897 bp, Cannabis indica
ttagtatttttgcttgtaaaatttttagacaatcaagttgtattctttatagtatacaattcgttaataatacccatcgaattaaaaactttatgacatgtttactaataagcaatgagaattaatggtaagggagtcattcccttacatttgtttatttaatttattaaatttaagaaatggagaacttgattaaaaaagggagaaaagaaagggagaatttttcccaccaattttctaagaaatgtcattaaggataatagattttagattttatttatttttatttattttttaatattaaatttataatgacaattttatcctttaaaatatgtcttacaaaataactgtcatatactatagttcaactcaaaagagtaatttagtcaatttaagcattccgattatgtttttttgataaaataaacaagataaatcactatcatttcatttccaagcagttttaacatattacaaatattgattctgattattttttttattccgttacatttctctattattttgttctgattctaaataccgtgtagtaaatgtgctattaaaattatgtggtgatttcatcatattctattcaattttatcttgaaacgagtgatacaataagtaattgttgataaatgaatgcaactctaaatatacatttttacttttttttactttaatgattaaaaaatatataaatataaattattataaaaatgtattttattttattattcactaaagtaaaaatggtaaagtatatttaatttgtatttatttattaactattttactattttatttattttacaataaaattgaataaaatattataaaagtataatattactaaaaaaaattatatttgaagaaatattattaatgtggaggcatactattagaactacaagcataatttagtattttaaaagaaataaaaattctaattattattgaagattttataaagtatagagatgtgaaatttgaatggggagtgaaatgcaggtcaggtggggccataagttagaatatagtttccaaaatagtaagttccaaataaaaaacgaatggaggctaaagaaatgataagcacaataattgggtattttgttcattatccgacaatcatattcatgatcttattgtgggtccccacttttctttcatatcattatacccacctgcacctgctcgtacaaggttatatccccacccccatcgtgaatcgcaacgtgaacacacgacccacaaccccaaacccctaaaactgaccatattacccctatctgacttatttgatctgcccaaacaaacaccagaggattttgcaatgatttatttggttggaaacttggaatttggaatggaaatggaaatgggatgggatggagtcttcttgggaggtttcttaggctctattattaatactattattattattattattattattattattaacaaataacaatgggccccacttgttttcacaactctactgattagacttctcgccttagcttagtcaagtcatcatcttcaaaataatttattttcaaccctatctaccccaccttcttatcaaacaaatgcatttcccaattttttttttccttttaggttaaattttgtttgtgatttgattttggttcacaactttattaatacaagagcattgatatttaagtatctgtgggagctctagttaaatttttttgtataatctaaaattatatgtaatattatatttttagggatacgtttttgtctttactttcacggaatatattctgtgctacattagatgggtctcatggcacattaaatgagtgtcaaggtacgtttctactttttaaccctaattatccctaaatcaatctcagcc

SEQ ID NO: 307703 - DNA, 922 bp, Cannabis indica
aaatgtatcttgtatttaaaaaattacaaaaattattttctgagcccatttccaaaaatagtaagaaaaaaaaaatattcccaaaattttagagtactttttgtaaatttttaaaatttgtccatttcttcttccttcaaaaaaaattccaagtaaagacttcactttaacaagttttagtttgaaaagggtcaaaaatagtgtcatttaattattaaaagaacatacatagatttaactctagcaatttttttctttctttctttgaaaaccacttcaatttaatctttttacccgtaagaaatatagaaagaaaacatatttttgttattttgttaatttaatgatattttgttgttgtgttttaatttggcaggagccagaggacattgggccaaccagagcagttggatatttcatattgggttgggtaatattgtccactgtcttgtctattgctcttaatcgataattaaatcacatcatcattcatttctgtataaatccatctttatttatcattatttatattgtaaaataattaataataatctgtataattttttttgacactataagatcatcacatgcaaaatttaatattttaattaaaagtaaaaaaaattaataataactttatgattaatttaattattattttatgatgtatgataataaaaaataatataaataattaataactaatattataactaaattattctaataaaataataaaagtaaataataaaattattttacttcataacaaatattgtaataaatttacactatttttttttgtcaaatttatgtccccttcaaaacatattttttaactaaataaattgtattatagccttgcatcacttatttaaggtgccgtttggtaatacttttgttttttaattttttaatcaca

SEQ ID NO: 307704 - DNA, 1835 bp, Cannabis indica
tatttttagtcacaatacttgttgtgttaaaattaaattaatgacaatttgtatctaaatgttatgttttagtcacaagtaacttttttattatgactaaaaattatatttaatcacaaaaaaattatattgtgactaaaaaaattcactaaaaataattattttttaaaagtaaccatgctaatatgtacactaatacacaatactagtctcttccaaacacaccttacaaaaaataaaagtattatctacatataagagatgggagatcgggagctattcctacaaactttgaaaccataaacttgcatgctcaattcttttctcatgatcaattaacaaaacttcaccacacaaataaaaaacagaataggagatctaccaaatttgtcatttgatattcaatttgacttatgattaagaataatgaactatgatggtataaattcttaatattttatttttcaataattttatattaaagtgaaaaaaaaagacaagagttcaatgtttataagtgtaaaaatttaattcattttaatagaaccatatatacttaccatatacatttcactctactatatatactttctacgctagaatgcattctaaaagcatctcaaatggtgtataattccaccaaattggcgtataattttcatactactttacttgaagaatatactaattttacactgaattagtgtacaccaaattttacaccattaatagtgttagatgttgaatctacactaaattgattcataactttttcatcacattttaaccatttttaatttattataaaatataatcaataattctttgttgacaatatatataataccataaatttgttattattaatactaatataaataatataagatgtaagattttctgagccaaataattttattattaggtatcattttttatggtatgcggtgtttataaatcattagagttataaaattagtgaaaaatgttcactaaaacgatgcaaaccattggagattgtctaaaaaaaaaagaaaaagaaaaacagtatatccaaacgattaatgttgaattgtgaataaaaatgttcactggattgggaattggatgagttttatttatttctacatattatacttcagctatagccagaaatacggtccttttttttaaaaaaaaaaattataattaattgatttttcattatcaatatgtttgatcaatgatgaattaatatccgtgcaggaaaacgtttaaaatgtaaaatctttgagaaaagtggtcgtaatcatcaactaccattactatatagtactccatgttacacggaggcatttgatcttataaccttctactccacacatatatacgtaccatcatcttcagtactctcatgcattatatatacagcatatgtattaattatgttaattaggtgttatgggtcactatatatatgtacgtaggtacccaatgatctcgaggcatgtgtgtattttttcaaaattaaatgcatacaatgtaatgtatgcactacaaactcacacaacacaactttttatatatatcaccatcaccatctccatctgcaacctaactagctactagctatgtatatgtatatgcttgttattccactttattataattagtttttatttatttattctttaatttttggcagggtttccatagctgctgtttgaaaagttacataaaacataggttttgttagggaatcttagaattatgtacatatatctattctatataaagtgtgcttatataactaaattcttggtttatgagaaatttatgggtgtgactttttattt

SEQ ID NO: 307705 - DNA, 2141 bp, Cannabis indica
atgaagccattgtagaagaggttaagcgtcgtcgactcgggttattagcgaagggaacagaaaaggagtggagttaatggaacatcaagatattgtccctcggacgggggtggtgagcttagttgtcttggtgggggaccacactttttctctggggcccaatactaagacttgtgttgggtcgattccctactcttggacctgaccagttttttaatgtggatggctttaatgggtttggttctaaacctccttctagtgggcctaagaagagaggaaggcccaagagtaaatcccaaaaagaagttaggccgaagggggtctctactattcctatttttgggcattagaagtcaggcccttctccgttggtgggtaataaacgaaaaatgtatactacccaaaaggaaacatgacaactatattacatgcagttactgttcccattatactatccaaaaaaattaatttactgattttcattcgtgattttcaaaaaattccataaaacactaaaaatacatgaacaaaaaccaacagtatatgtgaagcaatcaaataacaacaactcttaagaacataattaaatcaaacacactaaacaacatcacattttatacatataccaaattttttaggcaagtaagagttgaaggttagatctctccttaatagttaatcttcttttgtcggctttcatagagatttatcttcgtgggccgttgttgccatggctgaatattaaagtaaagcttctcactagcgttcatggagattgaaaaagattcttgttggcattcatggtgatcaacaactatggtgatcgatgttcatggagattgaaaaagattctacatcgctaatggtgttgttgatttcagatctaagattatttggagaagtttcaccgattatagagcaactgacttgttttgtggaggagaataagccattttgggaatgtctgtaaagatcgtatttttttggaaaagaaaagtttttgttttctaattttgtttatttttccacatgacaataaaaaagattacttttagacctaataaagtgataatagaaaaaaaaaaaagaaaaagcattgatattaggcaccagtggtgcttatcatcttctaaatgtgtcgtcttacgattgactagcgatactccctaaaagatattacattaaactatatgagacttgatacttagttgaaccaatagcgatattaacacgtaagaaggtactaggcaccgctggtgccttctaacatttctctagaagaaagtccaattatctttatgtaacctcaataaacatagagtttagttgtttaagtacatagtcacataaaatatatttttaagtaataaatatattataatacataaaaaatcatacttatcattaaaagagacatatccctataattcatgtgtttgttacttgataattgttgggtttaagtgattcattaaatgctcaccaagagatgattatacattgcgttacctctgtcagttttcaggtacttcttaatggagggataaccaaaaaattcttcccgaagagaggcttgagacaaggcgatcccctctcccctcttttgttcattcttggtgcggaagtcctctccaaactcttgttattaaaggaagaagaatggctcttaactgggtattctgtaggcagggagggccttcccataacccatttgatgtatgcggacgatttattggtctttgctaaggcggatggtgcaaatatcagcgcggttttggatgctttgaagcaatattgctgctggtctggacagcaacttaatcacagaaaatctaaagtgtttttctctaagaattgcttgggagatcgccgtcaatcgattcgaagccagctgggttttgaagagatggatggggctgaaaagttcttagggaatccgattctgtttaaagggagtagaagcaaagactttgattttatcattgataaagttagtgccagatttgagggttggagagctaggcttctttcccaagccggccatttaactctgatcaagagtgtcttggctgcgattcctatctatacgatgtcagtgtataaactcccgaaaaaaactaccaaccgaattgatggcatta

SEQ ID NO: 307706 - DNA, 1610 bp, Cannabis indica
agatgagtgtcgggacccacatttcatcacatcctcctcttcctctactctcaattccaaccattaccacaccaccgtgatgttaatttcttctaattttattttcttttctgaatttaaaaaacataaaatagtagtagtactactactatatttaaattacattgaaaagagtaatttaatttaaaaaaataattaggattaggaagggaaggaagtccacgagtgcaactaaatttgtgataaattaacaataggatttaggaccccacacgcttttctatttttgtcatctacctattactattattctattactaatactaattaattattactttatcaactctcctttcaatatctactctatacatacatactaacatattttaagcataaataattttttagatgtaataaattatgctgctaaatttttaaaatttttaaaaattcttcaaacaattaaaattattaaaattaaaaaaaaattatttaattatacttatgcaatagttattcatgtgctaaatcatgtccttaaattttaatatttactaaatcatgcaccaaaattttaacatttacaaaattataaattttaatagcttgaaaaaatttaaagagtatgtacgtactaaagttcgaaaagcaaaaaccataattaaccttcaattaataagagactatatggccaaattaggggatttcttttaattaatctaaattatgagatataattttgttaaacaaaaagaaaaggttgttaatttaatgaaggtgcgtgggaagaagagagaggcttcttctttctttctttccatagtaaaataataacactttgaaatcaaatgtagcaaaaaagaaaacaagcgggaattgtggcataaaacatgcatattcttctctctttttctatataataatatatatatatattataatgttcatagtcatcatcatatgattttttatacatgtgaaaatgacctctatttcatccaatctcttcaacatttatttatatattctttaattatcaaatattattattattattataattagtcttcatattttctgaaatccgcatataaatcaggacactgtttcttctattctattctaatctctttggataataccactttaaagaacattactattaagtttatgacaactatatttatttagttatatcacaatcacattaaaacaattgattaatactacacatgtcccttacccttatttatttacacccaaattgtactatattcgtttgttcttttattttaaagaataaattatatatataaatataacacactcaaaactatcatttattacctaatcaattcattcacaaaacaattaattagttgcaagtagtaactaaaccaatcaagctcttgcaatgttacctactattgttctttatgacaaatttctttctacatcatcaaagaccaaggttgatcgcatagattacaaaaatacccaattgtattttatttatttaaaaaaagatttctcattatagaaaagggaaattaccataaaaagtacctatttttttaaactttttttttttgttaaaattttacttc

SEQ ID NO: 307707 - DNA, 885 bp, Cannabis indica
aaaagattttttttaatgatatccaagcactttgaaaaacacttttcattaaaaaaagatccatacaatagttattcaaacggtaaaaataagtccaagcttatacttatcttatacttttagcgataagcaaaagtaaaaacttagccaaacaggaccatactctgctccatatagggggagttacagtcaaccaacactaacctcaccaaatccaaccgatccatcttcaagagacaaagatatgataaacccttctctatagaagcttgtgctgctgtgatcaacagtactcatagtaggtggtgcacataatggtattctgtcacaaagagaacagaaacaattaaatctgttttgcctttgtaagttattttataaaataaaacgaagttgaaacaaggaatcaaaatcacctatatattgagtacttgatagattgaactttgcaacaaaaaaagtcagaaaaagaatcttcaacaggaagccttagaaggaatcttaaagcacgatctgccgcttgacgagcaaactttctcaaaatacttacatgagaagcagaaatgacaaaaataagttaataagctcacaactgacttgtattgaagagcaacataaggtaacaacctgtgaaaggtagcattggaatcaatagagctcacaacctcaataacacaatccagctcttggtgtttagatcggactaatgcatcatgaaggtcggcctttgtctgtacttccacatgcttcacactatgcagtcaacatatttttaagttaaaaagtaaatacttttcaactcacaaatatacacaagtgggaaccaagattaggttgttaataaaaacatgcagcatagtttttttttttttttgtattttgtaa

SEQ ID NO: 307708 - DNA, 618 bp, Cannabis indica
tatgtcacttacaaacttaaaactttgggtacttttgccactatttacccattaccttacagaaacaatgtataatataacacctacgtatttgctttcgtcacctaaaataatcttgaatcaatatactataatcttaattaattagtaaagcttaaaccttaattgattagccatcgcctgcgtaatgaagaataaaaacaccaatatggttttttgattttgtaactactacaacacaacaaaacataacactacatacaaaaatacacacttagacacaacgtattggcttccgtcacatcctattgattttaccaaaaatataacccacatgatcctcctacaattaaaacatgttcctctcaatcattttatataaggttgtttctttaatttaatcacccatttagaatgtatttgatttgcattaatcaaatctctccaatctagaaaagtacaaattgaattagttatttaaattagttattttttaatattacattatttggaggaggttctaatggttacatttttattgtaaccacgtggttacattttttttagccattggatcattattaaatggttgtgattaatttggaaattaaataaaaa

SEQ ID NO: 307709 - DNA, 2354 bp, Cannabis indica
attatggtgattaattattaatatcaataattatatattgacctatagctatattataactaaatttttccatgacaacaatattaatgtatcaattaatttcataaacttgttctatacgttatccaaacaaagatgattaaagttatctaatgactagaatggttactaaagaaaattataagttaagaattttttttattattattgagaagaattattagttaagaacttgaatgatatctatctaattgtcaaattaatcatattttagaaaacataattaataacaagtatatggtacaattatatgcccataagaagctttgattttaagttaaatatgtcactacaaaaaataactacttttagtgaaatttttagtcacagcataaattttttgtgattaaatatgatttttagtcacaacaaaatattatttgtgactaaaacataacatttagttacaagttgtcactaatttaattttagtcacaacaaatattgtgactaaaaacacatttattagtcacaacaaattgtaaattttgtgactaatacctttagctacgaacctttttagtcacgatataagaatattattttataattagtcactaatattttacttttagtcacaaatttgattgtaactaaaaataatttttttttgtaatgtatgtttcctcacaaaataaaaacaaaaaaaaaaagactgatgatatataagtcttcaatcaatttatttcaatatataatgattgaaaataattacccataacgtactatatatattctcatgttgaaattattgaaatcatttcaattatcatgatcattacaattattttggatatgattaattaatttaaattcaaaacacacgtacatataataattcacatataattattagtacttttataaatattacgtagaagttggaaaataacgtaagagagagaaaataagaaaataaacatatatttcattttttttattctaattaatataattacaagcaaaaaaaattatataattacaagcaaaaaaaaacataattaaatgcaataaattaaattttaggatacgtgtgtgagtgtatatatacacatatacagcatattgtgtaccgtacgtaagaaaatgacgaaataattaaataatcttttttttaaaaaaaaaaaactttatagataattagctttgaattaatctaattaaatgtccttaacaaaaccaaattaatcaccaaaaattttgtcctaaaaatataggtcaaaattggcaccgttatagttttttgagtaaaaaaagtttcctttaattaggggaaatatcaaattgagctcttcatatatataaatatatatatatatatatattgatcatgtttaatttggttgatttgtaccttaactaaaatgaacaatgtaattagctcacctaattaacttatctttactccaattgtctatctctaatattacttatatatatatatattaaaaatatataataattacttatatatatatatatatatatatatgttaactaactaagtcgttcaataattattctagcattaaatgtgtagaaaaaaatgtttactattaagacacagagatataaaaaaagaaaaatatgttatctttttcctattctataattattacaaacacatatatgtgatagaattttaaatttaaacatatatatagttatgctgtgtacctaaggaaaactttgacacattaactataattgttttacttttttccctaaatagacaaaagaaaaagaaaaagaaacgaataaattaaatcacatgcattattattggtaagaaagaaaatattaattcatttataatatatatataataatataattatgatcaactatgataaataactttcacaaatttgtttcttaaaagagatgcataaatgggacatagcattacatatatataattgtctcattaaaaaactattactattttaattaatttaattactcattacacttaattaattcattacaactacttaatctcttaactttgaaacttctataaattctcaaaagaagtagcaaaactatatggtgcttatatttatggactaatattatagatatatatatttattctaagctcaaaaaatgatgtttggccagagattaacatgcttattctttctaatgtttatgttcatgaattgtactcaagcttcaactcactacaattttgtggtaagtatattttattatatatatttttatttattttttcttcaatatttttgatctcacagtagaattcgaatccagatgatcattatatttaa

SEQ ID NO: 307710 - DNA, 1330 bp, Cannabis indica
aagtcttattagtttggcctaaacacattaagaattgtttctagttttttaggtaattatatttttgaatatgaacatttcttgtacttcttatcacaggtatgtagttcataagtaaaggggatttaatcttaagctttttattttttttaatatattgaaaacagatgaggtcaaattcgatccgtaaaaaaattaggtggggtaaagcgaatctgatctgagatccgataagtattcgaatgttttgaatcagtaataatccgttgattcagatgtccgatctgatacgaataaacgaatctttttgccatgcctactgattatgttatctgcttggatttcttttcctaaattcttagcctcctaaggttgtttttctctctagccaggcctgtcagtcctccttaaatttagacgtggcttggtcagagtttcgctattacgattcgtcttatcggtgtgtcatgaatttttttaagttgatgtgatattaaaattatatgatttctttaaaaaaaattaagaacaaaatataaatatgaataattaaaaatatatatcactagaataaaaattattaaaataaatcaatatatttatttttcattcttctttatatggaaaagggggattctaacttaggacctttttattagaaaaagtgtagaaccatttacagtatgtgtataactactttattttttattcttcttagaaaatgaaaatgtactttttaattaaaataagaataacaaaaaagaaatatttaatatattatactctagatgagtacaagaaaatatatatttttatgttttaatatatatatatatatatatatattaattaattaattgaaagaggtgatgagcaaaaacacaaagaaatttttaagagtcactcataattaaaaaagtgagcgttgctattagataccagtagtgcctatcatcttttcacatatcactttgtgattgattagcgatactctttaaaagttattatattaagggtaaatactattttagaccctgtggtttgcaaaacttactgattggactatctgatttgttaaataataaaatagaccatgtattttctaaaatgataaaaataagaccttattcttaatttttgacaattttttttttaatataaccaacttaaagataattcctaatacgaatatatacaaaaaatgtaaacaattttatcataccactttagatcggattataattaaattttattttgataaaaaattaattcaagaacctatttgtaccattttaaaaaataacatggtctattttgtcatttaacaaaa

SEQ ID NO: 307711 - DNA, 1321 bp, Cannabis indica
ctgttacatatataactataaggcatcgattgtcatacagaagtaattaaatgttattttttttaaatgtaagaaataataatcctccattatgagtaagaaaaaaaatgatgacctacgtacttaacaatctctttatatataaatatatataatgttcaaatattgataatattaagtaaatattgagaatgatatggtgttataattagctttttgttcccccaaatgtagggagttttcaataatagtaggcataatataatgcaagttagaaatgttaggaaggagaaatcaaagaaaggtagatgaatttcctgaaatatataatattaattaatagacataaaacagtactatatatattaattagcaagtggccacccttaaaccagtggattatgttcatttcttataatatatattactaatgaccacgtacgatagtgatacttagataatagtataattaaaattaaattttattcttaattaggtgattataactaataaatacataaataatgtacacgaaggctaccagtatattaaaaatttcttctatacttctaatacacgtgaatatatataatacttttttatacgtatagtatatgtattaattgtatattaattctatatatatgcatgtatatatacatgtagtctctctctatagatagtagacatatattacttaaataaataaaatatactaatacgtcgacaacaacttcaatacttcactcgttccaaattaactattcacaacccaacaaccattaaacaaagcattaattaactaaatttttaggagtgggatcagcaagatctgtgctaatttcatcatatctttaccgtttttcaacaataattacgtgtattaagttcgttcaatctcttcttctaataaattaatacatattaatttatcaccagaggactattacacagttatataaaaatatatattacttatatattaatacttactttttaataaatattagagcattgctattttgcagtgtctagcacctttgatagattgcggcgttacacttcacgattagttagtgatattttttaaaaactattttcttaagttatatgagactcgaaccgagaagggtgctaggcaccaataatactttctagcaattctcgataaattattacaaatatatatatgtataggatcatcaagatgactaagttaatcaaattattgtttatgaattctttaaagactacgacttcaagtcgttggaagtttcaaagttaaagcatcatcatcgtgctttttcttatttatatatat

SEQ ID NO: 307712 - DNA, 1441 bp, Cannabis indica
aaaagtgcggattggatcggatgaacactcctattccaaacgcatcctatttttttttacattccaatcacaacactaaaatgtatattctttattattattttattttataaatataatataagttttgattataaataaattatttaattatttattttttatataaagtgattaataaattattaaataataataataataataattgtcgtgatttctactgtctcactattattagtgtgaaattataaagtctcacatatagattaatatttagtactcagttagtataatattgtgttaaaactccactatttttataattttatagtttcattggataaacccttaggccaattaattcaagttaaaaaaataacattaactgaattatttattataataaaaaatatcatatcaatatgcatgcatattagttattttggccattttgctagaatataaaaaacataaacattttttttatttttaaataaaaggtgtatatatttaatttccaaaactctttattttatagtaaatataaaataaatttctcccataaataaaataaaataaatgcttaggggtgattcattaatccataaaatataccaataatttagcatttaatatttaattaattctattcaattcacatgggctatgacagcaaatacataatattaaattattccatgtgaaatttcattttcttttcttcttagaataataataaaaaaaaatctatcaatagcgtagggcagagaactgttttaaaataataaagtgttgctattaattaaatatgtatattataaagaataggcaccatattaaataaataaagaaataaaaagttgatgttaataataataataataataataataataatagacaaataaaagaggcgtgtgagtcttagacatgtttggtttggcggtcatgtattttttaatgaaaaatactaaagtgtatctatatttatatattattattagtgtacataaatattaaattctatttgttaaaaaaaaatatattaaattctatatatcttaatttgaatgttcaattaaaatataagataatttgtggccaaaattcatgaattttgaagtttgacaaaatcaacctctagactaaaaattattagactaaattcattaatctctataatcgttttgctctgtacttattctattagtttttaactgttaaataccaaataaacttgacaatatgtgcacgtggcatgattttattagtctacatcattttatttatttaaatattttaaaaatattatttcttaattttcttttatgtttttttttctttttctttttctttctctttctctttttcttttctttcttcttcttcttcttcccttaacccgatggcaacccaaaaacccccacccatgacactc

SEQ ID NO: 307713 - DNA, 771 bp, Cannabis indica
gtcctccatcatgttgaatgaagaagagcctattttaggtacaacctgttcaagattgtaccactatgtccctcttatccttttcaggcatatctcaggcagatatttttctccaaacaaaacctcatacaatccctgatgaactagcgaggcctccatcttcatcgtccataactcaaagtcattcgaaccagtgaacttttcaatatcatacttaatagtcgccatgattttaagaaccttactctgataccttttattgtgattcaaccaatatgtcatcactagaaattcactcaaacacacaaacactatcaagaactatagctaaacaattgaatataattgagaagaaaagaaatgtaaaaaaactaaaaaataacaccaaaaatttacaaggttaaactatgtataatgctctacatctcgtaaacacaacagacataaacatctttattaatcagataaagttacagagtttataaaaaattcttgtcaagaatataggtgagttacaagggttgcttatctcacttgtgtggaactctctctcgatctctctctattttataagtacggattagattagaataaaagtgatgtgaaatggtatttatagccttggaaatatctcaagacttaactgatttaactaacacaaaaccgaactaacttaacttgtccaaaattattactaactagcttcaatatattcataactggtaactgtaaccatattcccatacaaatatcccaactacgttttaaaat

SEQ ID NO: 307714 - DNA, 1103 bp, Cannabis indica
taatttcataattaaacgtgattaactgctaatttctaaattaaactaagcggtctttacataatgcttgtagcattctcattacaattgaactcccttttttttatagaattctattcatatttataggcgagagttgggaagtatctcaatgctcttggtaaatcctcatttactctctaggccctatgtggcttttttctaggccgaggaaataatttctggtaacggacgtatggggtaggacctaaagtaagagtttggtgagacaacattggaggtgttcacggctgatgggacagtgcaaaaggaagtcgtcaataagcgataataggaaaacataatgtcaaaaaaaatatgggttaaatccaaaaaaaaatcatatttctaagtacaaattcattttgtcgtcggtaaggaaagagtcacctacaatgctcggaggccgagactatgacttaactttgggaactctcctaggatctttgtttgttctcggataccaatgtatctaccagaagttctcatgatcggagtattaatatcaattggtcatctcgttcatgtggcatgtggctgattctcaaatggccacatatttttggtaaaaaaatatggacaacaataacactaagctattttataatggagtgcttccaatgctctaagcagtttaagatggggaaatttacacccactactgatttttcccattttattacatttatactgtgccacgctggaaacaacatttatactgttttttttttttggcagtttactgccttttaaactttagccgtgtaagggattttcattgccacttgtcacgatagggttttgccacgttttttttttaaaaaaaaaaaatttaattgtttgatttgacggttatgtgttctgatcaaaaagtattgtatttatgtatttttctttttttttttttttattattttcgaatctaaattttgtaattggtaatctctctcacctcaactgttcatcttcttccccattttcagtttgcttagacggttgtaatagtgggtggttttttcattttaaaaaatttcaaatcccatcccactatcttaaacttccct

SEQ ID NO: 307715 - DNA, 2417 bp, Cannabis indica
ttttgtatgaactgatgaattccaatgaactggggaattttaattatttttttagtctgaaagtttggttttgtttattatttggggatgatagatatttctaggttagttttagagtatacagaatgtgatggttggtagatatttttttaattctacaattccagattgttaaaatggtaaatgagaatggtgagggaagtgttcatagatatgggtttggtttgtttgtattctttgagtatgttattcatgtaacaataagtattgctaatgggtattcgtgaacacctcataaagataatatggctccaattcaatatcagttttatgaatcccatccaattaatcattttccaaaagaaagtctggtttttttaagaatatacagagcaaattttgtccattaaactattaaaacatattgatcaaaataaattaaaacaaaacttgcattatttaagtgggaatgataaatccatacatacataaacattgagaaaagcaattaataaagattgtatatctcatgctttattaaacaaaaatatagataaaatttccaaataaatagctagttcatattagacaatgtgacttaagacctgcatactccttgttagttcatacacacactcccaacataaccaaagaaaataaaaatcaacatcaacattcaagtttctttccataaaataaatgattgatcactactcatgatgataattcatagatatcacctaatatttaaagacacgattcacttttggtgctaagaaaagggtagtcagtgtagccaacaacaggatcacttgtgtaaaaggtacttctatcgtacttattcaaaggtgcattcagcttaaatctcaatactaaatcaggatttgcgataaaaagacgaccaaaagatactaaatcagcctcatcctctgctatggcttgcattcccagttcccgagtgtagccaccactacacatgaaggttccctggtaagattttcttaatgccctgattaagtgggcatcttcatcttcactgccgggtctacctgattctgttttaccagttgcagtgaatcgtggctgagtcacgtggagataagagagctttgatccctgttccagttgaagcttgttaagtctctccaccactgctaatccaaggcctagagggtctgagtcaagggcatcaagatgatcgattgctggtgaaattctgacaccaactctgctgacaccaatggctgatgccactgcctcaaccacttggattaagaatttgcaacggttttcaatcgatccaccgtactcgtcggttcggtcattgatcccattttttaagaattggtcaaggaggtagccatgtgcactatgaatttcaattccatcaaaacctgtacaaacagggtgtcattgtaaaaaatcaatttcaagcaaccttgttacagacaagagaatcaataattcaagatagaggagataaaacgaaccagcttgaatggcatttatggctgcacgacgataatcctccaccacctcaagaatttcataggtttccaaggcacgagactcaggatacgactcaaatgacccttctggtaagagaactctccacttgtttgaaatggctttgttggttgaagatattggtgaccccccattgggttgataaactacagtatcattgtatcattcatcaagttttgttaattgattaaattaattagtatgtatgtatgtatgtatggaataaaatgaatcatgtgttccaaaataaacaaatgagtcctgtatgattattattttttattttaccttgatgagaagcacgaccaacatgccaaagttgacagaaaatgatgccaccttgatcatgaactgcatccactatcttcttccatgcctcaacctgttcttctttgtaaatcccagggacatgtgggaaactaaacaaaaaaaaagacacaaatcactcttaatacttccaaaatagaaacatatataatagacaaatactgtatatgtgtatttgtgtcacttaaattaaattttataattacttcatatgtttgataaagggccaactaaagaacaatggaaatagaattggtagaagcaccatcgaacattctactagactcataaagtgtaacttcatgctttcttggtcaccttaagatactaaatagcaacaatagtaaaacatacccagcggaagtgttggagatggaagtcccttcagtgatgagaaatccaccttgggtggacctctgtttgtagtactcggccagggccggtccagggatttcatctatagctctgcaccttgtcatgggcgcaagcaccaccctgcccgagtgccaaccacaccaaaagtaaaaagcaaaaacaaaatcagttcaaacccatatctaagt

SEQ ID NO: 307716 - DNA, 1997 bp, Cannabis indica
atcatggccagcactctttatgtcatggaaaaagctaaaatcctcaattgtgagttccccttgcgtgtattccatacacatcacataaaaacccaaggattatgcaataactatctggggtaagttagaaggacgaaatgtcgtaatgggttaagatggcctttacaaaagggtgaaaaggaagcatcacaccgcagcgaagaatggggattgaaaccacaacattttgacttggaatgatcgctaggttggtaaaaggaagaagaggttcctacattggtaggggcttcgaggtagcagtttgaatgaaattcaactttggaaatgtggtcaagtcagactttttgacccacgagactaagtcgttgaaggaaaaaggctcttctaactaagcattgtccactgaatctatctcactaccctcgccatctgtctcatcttgcacctcgcgatctgggacttcgaagtcctcacccattttttcgacctccacgtttggggaaatccgtggatgcacaatgtagccttgggcaaacaccgtggactcgttttctcgaacctcgaaggtaacttgttctgctaattcttgaatcatccagtctatctcatctgtggacagtgaaccccctcaagccctggctatggggatctcatcctcaaacaacgagtttggtataaagttgtcgctcttttttgactcgtctgcgaagccccctctccaaagtcatacctctggcggtctgacaagtcgctcatctaaaagatagaagatcttttcagtgtggtgggagtgcaaatttatcacccaagttataatattcaaagtaaaatttcaaagaactagccgtatatctcacgaagtggctagggggtttcctagtatcctaagggtcatgtggctacatgaacattaagtcacagagagacacccatcacttcgagaattcggtaagttctgaaaacgaataaaaatgcaagaaaaaatgaaaactaatcgcatatctcaagaatggttgggcgtgtgacagtatcccaaggggcatgcaatgattgcatgaacattatgttaatgtgacactcccaccatttcgagacccagatagttttcacattaaaataaatataacctaaggctaaacatggcctaacagatacggctctaaaatacaaggtcaaaaaggatggctctaggttaagtaaaggcgtgagtatacaggaagatattaatatgaatactcgaatactaaataagttcttccaaaaactcacaaatattcattgagttcttcctaaaactcgcgaatattcaagaagttcttcctgaaactcacgagtgttcaagtttcaagaacgtatttgctagaaaaaatacaacattttgcctaaagtgcaaaaaataatttataagtcctatcataatttcatacattttgtactcctatatacacagaatgcatacaaatactcaagggaaaggaagcgatgatagaaaaagaaaatcaataaccttaaaatgcagttcttcctgggagatcttgcaagtgatggaacctttagaattattcttcgtaggaaagaattcaaaaaatttagaagaattttgagggtttgaaattctgagtagaaagaggagaaagatgaaaatgggagggaaatgagtaaggatcatttcctattcgggggtttaaatactaatattcctcatttattgggatggagacatgtggcaaaggaatgcctaaggtccgctaatctaacggtctccaaagaacacacatgcacgtaccccgaagggttttgatgacatggcatctcgaaaaaataaaataataattacaaccgtcttttcaaaacactcaacaagacaaccaagagtcaccacctcgtgataaccactcatctatctatcttatagtttccctaatgatatagctgtcaatcgccaaactaggggcatgtgttatagtgcaaattttttgcctagaaactcgagacca

SEQ ID NO: 307717 - DNA, 1498 bp, Cannabis indica
aaatataaatataaattactataaaaaaagtattttatatattattcattaacgtaaaaaatgtgaaaatatttaatttgtatttacttatcaactactatccagtacttcatttatttcacgataaaattaataaattgtgattgaactatattattgtaaaaattatattttaatagatattattaacaagtcgtatattataaaagcacaattagtaatgtaaacaatttatggaacaaaaatattaattattctataatatagtgattttaattctctataatcgagcggtttgatcgggtttcaggttcatgggttgggtctgggtaggttggtcaggtccgagtcaaatccaatcaaaatgttcagtcttacctctaagtaatatattaagcaacatgtaccttatagtaatgctctacaaaacataatcaaagtaaacaatatatgagcatgtccaatttaatgtaacaatacttcttattaattatttctgtctagtatgatagatgcaatgagtattacaaaatgttgaaagcttaataaatgaatatgatctgttcgaaacattcattgaataagccaatattcttttccactgaaagacccatttgagtttgaagggaaagagactagaatacaagtggaccatcacatgcatgtctttgacttagttttgagttttgatcaaatgttttgggctctagttaataattcaattcaattggatttgtagatgtagatggattatgtggaccaattaacacagatatttgagattttgaatgcccacaattgaattgaattttaaaattgcaaaaatcacacctaaaacgaaccctaaaactaatacaaaaacaagaccagaataggtcacaaataggtgtgatcagttaacttttggattctttgaatataatgtgggttagagctagaattctaactttatactcttaagaaaattataaatacaaaatttcaaaattcaaaggtaaaaaaattactaaaattcaatggtatttaattgcaatattttaaataattggttttttgtcttcaaaatataataatcattatgtatcttagtagctcactaaaataattgagaatttaaagtaattaagctttagttttatataggtaataaaaaaggtaattgaatttgaaatcatcaacaacaactcgtagtaatcaaattagtataataatgggtgatcaattcagtaaatcattagtaactcatttaaattaaccaaattagtaaatcatttaaacttgattaataagtaagtttttaaaattcttcatctctcataaaatatgtaataataacattcaattctataaataaatatattacaaaatattataagtgaataaccataaatttaaaaacatatctttattgattcaaaaaaaagaacttaaatagctaaagggtaatgattttttaaaatataagtgttgtgaaattatattgatttataattgcgca

SEQ ID NO: 307718 - DNA, 1927 bp, Cannabis indica
aagcaagtaaagcagtaatacacaatcgacataataacatacagttagccaaaaatacccatgtaaatcaaaaatcacataatctcatacataatacaatacaagaagtcatataacgcaacataaacatctattaacttaaagtatgtatctaataagacaaaccattctcgttactttataaagtaaccactaaccatcattgcctaatgagacaaccaatgccactatggctgcctaatgagacaaccaataagtaagaaacctaacatcgatttcaaattagagtgataactcctctgtacaaatggtaattaccgtatcatatattaacatgctatgtggtataattatacttttcttatctcaagtcctgattcaggtatgcgctgacttgagtgaaaaatgctcgacgatcccagaccctatttcacaataatagtaaaccgaataaataattcttttaatcccgttctaaaacttaaactcaaaacctgaagtttccctatcgataaatagtgtgacaacaccctcaatatcaataaaacacaaaaatctaggcacctaaaaatacccaaaacgggtcaccgttttattgggtttttgcctgaacaatttccttaggaaacgattaaccatttcactgcaaaaacagccaactgtaacattgacttctcaaatcctctcaaaactcaaccaaaacatatcgaactcttctgaacagtctcaatgctcaaaatcaacctatccaacatcaccgaacacaaaattacactaaaattacaaatccaccattgttaagtgaattttgagttcaagaactcaaactcattcaacaccaactcaaaactcactcaacaccaataataactgtaataaccattcaaaataacttatatccagcataaaatacaactttaactttaaaacataatctaacaccaatcatactatacagaaaagaattcactaaatcaagcttaaaataaagattttttttcaaaatttcaaagtgaaaaattggtaagctaggttaccttgaattccttcaactcccacttgaatcatatagctaaaattcttgctgaattggggaaaaaaagctctaaaatttgttggtttcttggtggccgatatgaagtggaaaaggaggagaaagaaaggatttcctaactttgattttttattttttatttttataaaatggtaatctcttttttgttgttttttttttttttatattctatcttattcagcctaggtttctctaaaaattcaacaaaaaaacaaatctaataaaatttaggtgaaaagaccaaaataccgttccttacttcctaagaagctcctaagtttaggagtaaaatagtcataatcaatcaccccgaaacaccctaataaaatcaataccaactaaaacttctcagcataacaaaatcacaaattaatacggctgtaacatttctagccaaccagtcaggtttttacagttgtcagacctgaaaatattttatttcataaatagcatgtatattacccatatattccaataaaatctctgtaattaataaattacgcttatttattcatttagattaaaattctttattcttacataattattccagtaaaattataatcttacccatattttctctttcatacacaatactccatatttattaaactatgctttaattaaccttaattaagttttttgagatattacatattataataataataatctttattgattaaaggatataataagtatagatttagatctaatttgatctaaagtaggttttgaatgagatttaatctcagtcactcattattatttatcttattattttcagttaataaatgatttacctaactatgtgggcctatgtaaagagtgaaaagaaagatagaaaaatcc

SEQ ID NO: 307719 - DNA, 1720 bp, Cannabis indica
ataaattatatatatacatgaatatatctccatttatatagcagaagatagctccaaaaatctcagagctagccaagcatgagtaacaatgctaatctaccttctcataggccaatacaaagaactttgtcttgtaagcttttatttttgctttcataatttatttttatatataattataaatatatatataataaaattatacatatatatatatacatatttatatatatatttcaggtaaatcggctgattcacctaagatcttaaaagatgtacgtaagaataattccaagacttcaattgaagccattgccgaacttttgtgtaagcttaattcataataataataataattataagcttcttttttttatataatatttcaatattatatatgaaacacttttcctgttttgttttgaaaatataactacaaatatttgtaatccttaatatttcaaaaatggatgtatatacattctcatcaaccttttccaggaaggaattaactcctatattgaaaattatttagagtataatttatttatttatttatttatttttgtttgagtacagattcagaaaagtcaaagtcaacaaattggaatgatatgttaataaattgcttcttgacttacttaagtggatctgggaaggaacggtttcttcaatatgctcattctgtttctcaaatcattgacgataaaagtaagtataatttatataaattgtttttatcattcttcttattcatttttcaaaattaaatgtaaataatttcgagtagtgtcaaacattttttagatcttattttaagcatcttaaattattcagatttttctaaaaatttaccttgatgtacagtgccaaatgataagaatccacagagtttgatgcaaatattgatgatgggaatctatacttgtttgaagagtttgattatgaaaaatcctattacatcaactctatggaatgtctttgaacgagtcatatcttctcttttgaatgccctaatcaagggctccaacattgatattgatgaacccaatatcaatgttgatgatgatgatcacaaggaacaacccaataatatcaatattaatgatgatccttatgaggattataaggtaaaaagcaatgatccaaaagattacaacgacattattgtgaagccacctgtctctatggtcaatgacccatgtcagcctcttcatcataaaattgaaatttctattatcaataataataataataataataacaataacccaaacactccaaaggatcataacacacctgaatcgtcatcaaagacagagaagagaaatatttctaatggtaaagaggtaagaagaaaacgaaagtgttctaaatgtggatgttatggacacaacaaaactacatgcaaaaaataattattctttactaggtttgatatgtaatgttcttattattttgtgcaatttcaaaacatgatttacaacttgttgaattttatgttctaagtatgattttgtacgtagtgaaaaatttcaaacttgtagaaacctcaaattagttgttgatattcgtagagattgttgggattaaactcacttaacatctcaagttagtatgtccatctgttagctcattagatgaatttgaagaaagctgctgcaatttataacagttggctttaataccaacttaaaggggacccaccagcaactatata

SEQ ID NO: 307720 - DNA, 749 bp, Cannabis indica
acaactcaaaaaaatatataaatttctgaatagtaatatcataaaattactacaataataaatttttatcaaaactttaatattgtaaactactaaacttatcatttcttttataagtacagttaggaaatacataactacaaaaatacttgattgttgcaaaaatgttacaatattaacatgctaatttgtaactaatagacgcattatctgtaacaaagatttatggaattaatttgtgaacttacctaacatttttgtatctaaagtttatataaatactatattaatgagttaaacaagtagctagatcacattgaaagtgtacaagagataacaaggtttttcatcttctccgtctacaacatctaacgtcaaagagtattgctatactactagtagtgtccatcattgtttataggtgacgtttcatgattggttagcgatattttctaaaaattattttattttacgtaagttatatgagactcgatatttaattacactcagtataacattaatgaaagtgctacacacgagtggtactttttttagcaattcttaacgtcaaatggtgcacaacaactatggtagcgatggaagaagaacaagaagaaaaagtggtcggcagtggaaggaagcaagcctgactcttgatcttgaggatatgcaaaagatcatatttattttataaaaatttacatataaaaatgttttttaaatgggtttttacataaaataagtatatt

SEQ ID NO: 307721 - DNA, 1270 bp, Cannabis indica
agatttattttttttatttttacacgtacttgaaaaaaagtttctttttttttttgttgattttatggaaatccacataaaaaattcatatagcaactaacgaaacaacttaaaattgcaaccaaaactcacatagaaactcatataaaaactacagaagtaactaccggaacaaagccaaaactataaaatttaaaaaaaaaaattaaaaaaataaatatattggataattttctttaagtttatgttttttttaatatcaaaatgtatttataatttgtggaatataaattaaggtactaccccttaattttactttatttactgacattaaaaacatcaagtggacatttttttttgaaacgcaagtggaacttatttaattataaccaaatatgttttctttattttctgtttcagcatggaattaaatatgtttctagtagtagtcacaacaaattttattatcattttatctatttatttctttttgatgtattttatctatctatttatttatttattgcttgttatatattaaaaggttttttatttttatattttaaaaaatatttttatacatattttttttgaaattcgcataacaacttacatattaactagagtaataactaaacttcacataacaatttatatataaaccaagagaacaacagtaaattttttttaaaaaaaaattgttaaaaagtaatataatttcctatattaaatgtgatctccttcctaaagaaaaattgtaactcaattataattttttttattgtcgattaactttatcatgcaatatcttattttgttgctcaattattaatttcctgtaatttatatgtatatttatactagctaacatgtgtgttttattatacccttttattacacaaatattttcatataaaagattaattttagtgtatatatgttacgtgccaaatcacgtatgttaattttattttaatttttaaatttttgtaatatcataattttaaaattaataatattcaatgtagtgataatcattgaaatttgaaagcataatagtgatttaaataaaaacaaaattactattatactttgtaatagtaattaaaaaaaatatattattaattcgtcctaaatttatcttcgcaattaatgaaaatgcttatctgtttaaactatcaaaacattcaaatttaatttaaaataatatttaaaatttaactaattctaaatatcaaaatttaaaataatttttattaaaaaaataaac

SEQ ID NO: 307722 - DNA, 1370 bp, Cannabis indica
atgtcgacattttttattgtttattgcaatatatgcttaagattttagcgactatatgcaatatatattttttttgtctaatttacattattttgagcgacatcatgcgatatgtgtgcaatttatcctaaaatctatgtgcattttttattttgtcaatttaaataatattttgagccacattgtgcaatttgtgtgtgatttactcacacatttgtattttgcaatttacattatattttgagtgacattgtgcgatatatgtgcgattaccctaacatttgcatgttagtttttttttttttttttttttgttttgtatttccattatattttgtgcaatttatcataacatttgtatgcaatttttatgcaatattaggcgacattaattcgattttttttttttgcagatgattgttcttcaaattttgtacccttagaattgggatggtgaatattggaagttcaaatgtaagggtgatgtccccgcgatagatatgggcttggatgaggtagaagaaacacaagttggtacataagatttcactgtattcgagacccaaggaaaataggtggctgaatatgttcaaagtgccaaaaccattccaccatcaccattgaaagaacctacagagccctccacatcagccactttgcccccaacctcaagtcttgtagctaatgacgtcgactacctaggattggcaaagagattagagaaggttgaattgaagcccaacaatttgcaattctggctgcacagattgagatgaaggttacctttcaaagtattctgaaagagatgaaaaatcttatcatggattaaattgcgaccatgataagtttgttacagaagcaactatcagagccattagaacacatacaaccatcacaaccggcagtcgattgtgataaggatgatgtgtatccaaaagattagaaatccaacatagatgaggctccttctactccaagaaatgccattatgattgctgcaacagttagatgggccacctcgtggagtggaatttttgagggctaagagaaaacgaaagttatttttcttgaaggactacacagagaggaagaagaaacaacaaattgggccatctaaagtagatactttgaggccagtagactcatagatgtacaaattttaccaaaagtagattacttactcaagggacaatgaccgtgctagggatgttcacactagcagtacaatttggacctagttcgtacagtgatggaaggagaatgactcaacgatactgtaagtagtttcttaattgttcaaatttggtgttttaaattgccgagcaacatatatttatatttatgcgacgtgtttacgagtttttgcgaca

SEQ ID NO: 307723 - DNA, 1285 bp, Cannabis indica
aaacctagggatgtgctgatcatgtccttaaaaaaatctaaaacactaactgtggtttatatgtctgttagctatctaaagtgattagggtggactacactatggtcatcaagactagtaagtgtttgttttcacaaatactatttttctagaagttaactatataaagggtaatctcaaaagccataaagaattttttatttttacactttaaattagctttttttgtatttttatggaactctatataaaaacccttatagcaattaacgtagtaacctaaatcgcgctcaaaatttacataacaactcatataaaaaccaccgaaaaaactactggaacaatctgaaccgtaaattcgaaaaaaaaaattaaaaaataatgtaaaaaataatttctagaaattaaaatatgtaaattgagtgtgtcccaatagtgaaaaatataacatttaataatgctagctgtgaatgtgatgagtcatccctgaaatgtggcttgaattcaaacgatatgtatatatatatatataaaacttcattaagatatatgcagttataatatatttattaagccagctaataacttaaaataaaccttaaaatgcatgcttttccacctattttcttttagccttttaaagtgtagaaaaagaggggtgttgatgattcatgatgaaagccacaggtatttgatttaggattttattattatgtctactaaaattagtattagaaatacttgcaaaatgtacttatttaaatagtgttaaaaagacatacgaaggaagatgacattacaattttttctttttctttttcttttttttggttagtgataataaaatttgtgatggagaataaataaaaataaaataaaaaactgtgtcatgataaacgaacatcaaacaagtataataaataaatagttcgttttttcttttgtagcggaattatcgatctcgaattgagatccagataatcgatgctcagtactcttaaatatatagagaaaaaacgaaccatatatagttaataagttgataatttaacatctttgggatataatggaaaagaaagaaaaagaatgtcataatggtgagttaatacaccattaattatatccattttaatgacacattaaactctcacacctacatacatatatttatcctatatttatattagtaaaatataagtcaaaaaaactggtttaatatataaatatataaaataatataaaatttaaaagaagaagaatataaagagagaaaaaaattaaatga

SEQ ID NO: 307724 - DNA, 1194 bp, Cannabis indica
aaagcagccttatctccctctttggaagtttttttgctttgtagatatggttgatgaaatagaagtaccaagtagcttaacatggttcttactttaccgttgctgtttctttttatctgcaattttttttcactttaaaagttagatattagctttggtggcagcagattttagtctcagatgctgattttattgtaataatttattgtatttttagttaccgtggctgcaaatggtaggctaagatacattgacagcatagcaaagaaattcgaagagttgactatggctcaccgaggagaagtgagagctattgtgacaactgtcattgtaagttttaattcttatgtagtttcttttaattccttatttcttgccatttgggcaagaacaaaaatcattattttgatttaaggtaataaattgtgttagtgttgaagcataattgggtatgaatagttcttggcagcctaccatatttctcgtgggatttgccacaagacttgtgttaaatttactgtgaccaataccttaaagttggatgcaaatgatcagatccatagatgcattcttttgaaaattttgatgtgagatattggtcaatttcggaaaatatatttattgagggattttttttgtttgaccgtgtggtggcctgatttattaaatttgcaaatggtaaccatgggggtgatctggttttggactttgtgattgctttgatgatacataactctggcaatgttgagtgttaaatcgttgtctaggggtggtttatatattgggatagcctttttgaatttttgatgcaagtcatgatcaacttctatgtggttttctcacaaggtctgagattcgagttcctccttggtatctacatagttttctggtcctcgagtattgtaggggtaggtgggggtttcctagtgtaagaaaaaagatgaacaacttttattactttctttctgatctatatgttactgtcttactactagcccattccacttgaggaggagaaagagttgaaggctgcattgcaagatatcattggtcatgggaagaaggttattcttgaacagaaggtaagtactgagttgagctcaactcacttcacttgtttcaattcacagattttgtacaaacagtttttgactgtttcttttttacatggcagattgataccagtattctggg

SEQ ID NO: 307725 - DNA, 1055 bp, Cannabis indica
tactagaactagactcctgaacgtcaactttgacttccataaacgaaaaggagcgtaggcgtggtactgcttcacaagctgggagaggttgcgttatcgcccgtagggaccaccccaactccccgtgggcactttaccaacttatgagactcattttttccaggtggggttgctaagcaacccccgccttgtccataggattctcaacagtaggcacaacagcatcatcacttggggcagcacgagctcttttcaaaagacttctaacataaccccccaacttgagtattttaccttgtgtaaaatcttttcacccaaaatagcactggcaatgactctaggaggaagattagctccaggccctctcacctcataaggaagagcaataggggagaaaataaatcctttgcccttactaccaaaaatctgagcaataccaaggttaacagagccttttacaactttcattttgtcagcagtagtgataatagaagaaccataataggagtagagggaagctcaaaattcacattttgaaagccaagtgggaaagtcgtaatagagatcatagaactcagagcaccaagagtgaaattgctagaaaaaatagctctatcctcaatagaagaaccaacatttagaggaacaataaaagaagtactactagtaggagttgcagacacaacttcagaggtgtaaaattggttcactacttcttgaagctcctgttggtattttatgccctaaataaaacccatttcaatctaatctgatttgttattaatgaaagattagaaagcttaaacggatttttttaaaagaaagacctaacataaacacgaaggtagtctctataacccgaaataggaggcacaattgattcatcacaagttttaaggaacttgggacatttgttataggtgtaatccataagaccacaaaagttttgaaggccctcatatctaaaagtcaaccatttggtcctaccaatattcctaaaatgaatattcattcttctacgaagaggcttggtaacattgttggaatatgtttta

SEQ ID NO: 307726 - DNA, 1011 bp, Cannabis indica
gatttataatctttacaaatatgaaaaacttaaatagatctatctaccattgttgttgtcgttgcttagttactgaaatcttaaacaaaaagtactagaacttatataaaactaatatttacgtggctcaccacgtaactctcatctagtgtatagtaaaatggtaaatatttataattcagatttgatcaatatataaattaataagtggtgtcaatcaaaagcaataagttaatagagaatcgaaagttgtgagtagagtagagtaacagcatttattgtacttagcactacttacccacacatagatctctttctttttgtagtagctagtttagctagtgatgatgtgagtagtgcactatatatatagtttgttattgtagttgaagttgaggttggtggggacagccttctcaatattatagaatgtaataatttgtatgtagcatgtgatgagtgagtaatgagcagtgtggtgtgtgggcgcctactttcttttccagtacgttgttggttggtgtttggccaaacctcatctctcagtctgagttctcacatctcagaaatcaactgtatttatgtatatatataacgtaaaacaacattatttacttaaccaataatgtgaaataaaaatagacaatagattaatttgaaatgtacttttttttttatgaataagaagtatatatatagaactaacaagaagatacacaattgctaaatcagcagcttctaaacaccattacaatcaaataatatttgaaagaaccagaccaagttcttttgcttttccccattaatccctgtttaattagtaactcctgttatagacaccttttttttaattacgaagagtatagctattggcccaatacagttttatcctaaaaaaatacatatgtttctaactttccaaatatatatatatatggaagatgttttaatggttacatttttattgtaaccattatggttacattttttttaagccattggattactatt

SEQ ID NO: 307727 - DNA, 2024 bp, Cannabis indica
tgtaattggatcggtcggttgtcattggattggatcgatttatgcacacccctatctaagatcctggtaaaataatttccaacatagtagccttcttttgacaggcctttcaccttaatggcatcggccatgaacctttgaatatagtttttcaagggttcatcttgtctttgttttattttgacaagatcctccagttgtgaaggtatttgtctcgatgccgagaactgagtatagaactctcaacagaattcctcccaagagttaaatattcatggggctagcttgaaataccattgttggactatttcagacagagttgctaaaaaaatctggcatcacacatctccagttactttttggagatctgtttggatctcaaagtattttatgtgtgctaggggatcttctttccccgtgtacatcttctaagttggcatcttgaacttaggtaggggcaatgcattaatgtatgcagagaatggtgacccccttgacctgtcaagttctaggtcagacaactttgggccagacaggcctttgatcatgtctttgagtcggtccaactgcgcttgcacagatggatctatttcagtgggctcttgttcgggaagcctttcttgactggagaggtatccttggccaaccaactcttggctggacaactggccttggccgactagcctttggctgagtaatgggccttggttggacagcctttggctgagtaatgggccttggctagccatcctttggctgaataatgggtcttggtcagtcaacctttgactgaatattgggccttggctagccagcctttggctgattgcacttccttggccggccaaactagccaaattctcttggttggctaggtcggtctgtgggttaatgggaggttgatcgtaccgatttcttgagtttggttgatctacctgcctgaaattattgttttgtggcgaaacaaagtcatttcagttctcgctcatcgagttattattgtcccgtgtgttgtcgattatcccaggacccagcctgccaagaatagggtccctaggccttggaacaacttgttctcggatacttcaagagagagtcatagtgttggccggccaggcctagctagtaagaattaccccctcttcggagttgttttgtcgtcctctaatgcatcatggtgccaagagctggctatttatgccatacagtcaatctggtaagattggactgttgtcaagtagggaaaggtttgtcctcgtgttcaaggagcctggattgactgtctgcccattgtctacctgcttgtagaccctacctgacttgttgatgagccttccttaaaaggatcttttatcaaattttgacctcttctgacagtcagctctctcattgaactgccttatcatgtcactagcctccctattacggaaggttagttatgcctgatgggctcggagtatggcctcttggtcatccattcacctcaaaaatttgcatctttattgggcgaaagcattgccaccagcagcgtatggttcttcttgtcttgtctgagtgacctggactacaacttctctaagcctagccagctcaatatcacctcctagggccaagtaaggcttaccaataactagtttgccgattcctaactctatttctcttatgtagcactatagaacaaccctagttgtgttttgtggaggttgttctatgttgatctgttcttctgcacaagatcctgtgagttgtcctagccttggaggaatggtgggataactaggatttgcaagattggctggattgacagtgttatctggattagtagggccttccatggtgggaggaacatgaacattaggatctatcatcatgggatcctgaggtgcatctgatggaccaattcttctggttaaaaccatggtgattgatcagaatgagatggataaaactctcaatgaaagtaccaaaatattgactcaaaatttggtcaactgatagtgaagccttattaattgatgattatc

SEQ ID NO: 307728 - DNA, 2003 bp, Cannabis indica
aataagttttatttagggcataaaacccaacaagaacatcatccgcaaagtaaaagtagttcagctgaagacttctgcacctctcatggaatttaaactcctcattttgtcccactttcttcattattgtcgataagtactccataccaagaacaaataataaaggagacgttgggtcaccttgttggagactccttttagcattaaaaaaccagggagctgtccattcatcataaaactgtatctaggagtgcttatacaattcataattaattgaatgaacggtcttcgaaagttgaaagcattaagtatttcttctatgaagccccactcaattgtatcacaggctttctgtaaaaccaatttgatcatgcaattggatcttgaattactgcttccataatgccttactaaattctggcacaccatcacactgtaagcaatgaatcttccatgcacaaatctactcttgttctgagcaactaattctagtagtaattctcttaatcttgagcaaaccattttggtggcagttttatatataacattatagtaagctatcggtctatactcacttacatttgcagggcatttcgtcttcagaacaaaaacatgtgaaacaaaagcaattgcctagatttaaaaaaacacaaggcctaaaaccctgacactgacatctgaaaactaccaatccattcgacgatgacctttaaaaaccaccgactcaaatccccatcagacccaccatgacctagatcaccatgaaacccacccaattttcagcattatgttgaatccaagtgcattgaaccatctcatctctgatttatccttagcataatgaggaattactcacactcttgatacctttgatggatatgctcccacaagtgatcatccacctaatatcatctccattgataaaaatcatataagacataaaaacagaaatgtgaagccatttaaaaaaaggcaaagacataaaaagcaagcactggttgtggaagtctctgaatttttttttgaagaatcatgaatatttagggattatgtttaaatatgacggtaaaggtacttgccttttgaacgatttgaatatccagcttgtgacactacaaaaaccactattccatcagtcttgaaaacactatttttgggggaccgttactaataaaattaagcgagtgtgtaaaacatttggctatagtttggaattgccgacggtttataaactttattatgtatcaccgacggttgtacatcgtcacatagcttagaattgtcgacggttaagagtcgtagactaaagggggcatattttataaccccaatatcactcaaatatcatttcaaatgtttctctcatttcaaatgtccctctctctcattctagcatgcctcatcctcatccatgaccgagtcaccactcctcgctctccctgtccactctctccccctctctcgtttggcgacgactccatttccttcgttcagatgaaaccacacttcttacttcgaatcacccaagctctctcttgcttttgaactctcgtgttaaaggtatttactattttttactaaaagtaacattttgttgtaactaaaagtcacatttagtcacaaaaaaattatattgagactaaaaagttatcactgaaagcagcagttttttatagtgagtatcaagtcattattcacatgtcattttcttataagtacattaaattaattttttaaaaaatttaatggcatagactaatcagggattgccacacatttatttgacacttaatggtcaagtacagaagtatcaaaaatataacatagtaataattactattaaaaactaaatttaagtatttaagtatttgctgctaaggacacagttaagcttggtttaaggaaaggcatagggtctggtttgactgtgcaaataaccacagatccttggctgcctatacttgacagagcttctcctgttcccactgtcccgggacttgaga

SEQ ID NO: 307729 - DNA, 1776 bp, Cannabis indica
ttttaattttttttttctagtgtaactctatgtagttataacctcccaattagaatataatttacttggtcccaagtgtattcttggatagaggttctactgtaattatatgtaaaattaagaaaatatttttataattaatataaaatgtatgataaattgtaaataaatttttatgcacatataatattattaattaatataaaatatctctaaatctaattagaatttttagcttaagagtaataacgatatgtatgggtagtggttaaaataaggctcagactcaatggcatacgtgatatctccaaaaaatattcaaacaagatcgagttggatatttaactaattatgatggtacggtcacaacaccaaacctaacgggcccaaaacaatacaattgagtcaaatacccatcatctgacattaagctcgcaataatccgaccggtatacaagatcgagttttaacattcatctaacaacaatctttgaagtggtcagtcaaattgaccacgtaaataatgatctccgtgataaagtgagagaggagtgcttctaaaagggggtgagcggtcatgagtaacgtctctccatagacgcctataagagtcactctcagtcactaagagaggtagatcagtttcagtcatctcaatacttcttactcattgttcactctcttattcctctaaaattacatacttatttccgcaattaagataggtggtaatttagtttggttatttattcttatttttttctactacattgttaatgattttgctaacttgaccgttggagtctcttcgaccggcactatcacagtgttctaaggttttccgattacttttgtctttcttctacagattatcagagcccgcatacaattatgttcgattgattattgtaaattttaatatctacaatatgcactcaatatatttattaatttttgaaattaaacagaaaattctaattgttttttttttttttagttattggctattaaattaaattaaaagttaatatttttaaagttgacatttaattatttatgatttttttttttggttaagaaatgatccttatatatattatatgctaagtaaaagaaaaatggtcactttagttgatgtgatgttttagtataataaatttttatgtatatatcatgctaattttagttaataaattttatagagagaaatttaagtggggtgatcacgataccatttaaattacgaaaatgtgatatttcattattctaaataccattagttcttaaattattttgtgaaaggtaatgatttgagagttcataatcaattccactcacgtcgctcccttttctttcttttttttcctccattttttatttattacatatggaacgtacataccaattataatttcctttaatatttaaagaactctctctcctttttgttttttaaaaaaaattatttttttcttcaagttataccgttgattaagggtctttatctaatttaattcgtactattttacttataatgtatctaatccacactaattgtaaatttcattttttggatctaatccaattcgtacaatagctcaaatccaatatgcaaaagcacaaattaaatcagttattttaaatttgttactttttaatattaaattatttaatatttatgaaaaaaaaaatatttttttaatataactagtaacaaaataaaataaaggacttttttttcatttttacacttcaaaacagtttttttattttttt

SEQ ID NO: 307730 - DNA, 2008 bp, Cannabis indica
tattattatttaaattaatgattaggtaataaaaacactaatacaattctaatgtattgcattgtatgttagtaatacttattatatactatatttattaaaatatataggagagtaaattaatgatccagctatgatccaattcgatccaatctggtccgggctaggtctgggtccgagtttggatccaggtttgggtttttttgggtttgagtctgggtctgggtttgggttagtgtcctgggtcttgtcccgagcacaggtttaggtttgggtcccaggtccgtgctcaagtttcgagtccaggggtccatgtctcaggttcgggtctgattccgggtcccgagtttgagatcagattcgatcctcgatttgagtctgatcccatgtttgggttagggtccaggtccagaactccgtggatctgggtccaggttcgagtctttaactaagtctcttttttaatatattgaaactggattggatcagatctgatccgaaaataatttcacagggcggagcagatataatccaagattcaataagtattcgaatagtttggatctaaagtgattcgtcggatcaaaactctgacccgatctaactaaatagatctttttgacatgcctagcgatagattctataaataaagttttcaatacaaattatagacccttagattaaaatcaatcaaatcatttatatgaaaacacacataaatacctaattaattaaaagataacataaaatcaaaacaattcattttttcatattttagacccttgtaatgcattaatgactaacaatacacctttactttttttttacaaaaaacaatacaactttaagaaaataaaataagacaatgtaatttttcatatcatataagcttaggatcttctatttcgtcatcttccctaatcttagctagccgccacgtggggttcgttttttcttcgaccaaggctcatcacctctctattgggttttagtgtggctctagtcgcgattgctaatttcacacagtagggcattttgggttctctcttctctttagttcttggaatgatttttgttaagtgtctctttgctttgctggcggattaaatctcaagaaaatctggtttggatcgtttgtgggtgcattggaggtgtgttttctccaaggtgtttccttttttgccgatctatttgaagggcttcctttctaagaggattggtagaaagtcacgtgatttggggttgtcattatcggtagagtcatcacacaaccatggtttcattaggaaaaaatcctctgttgagggtcacaaatctacaatcatggggttttggggtatggttcaaagcaaaaaagttttttcagtttcgttgagtgtatgagaggtagtctggggttcatggctacaaatatgtgtggtgttatttaaagttttattattttcttaagttttattgtaatttttttaacctaataatggtggttattcaccacccattagattaataggtttagttattgtcctagagtgtgccttaaatttttccttctattagcttgtcggtaattcatcattggtttagagtagcttcgttgaggatgattttgtctctctctttggtcattagatctttgggattctaagatctttattgaccttatgttttgtgaacgaattctttgagattgagtttcataacatagttagttgcgttatttctcttatatatgatttaaataatagggttattatgtcacaatatttattggatgaccatactctatttttatcaaatataataatggggttatacttttatagattaaattagatttaagttattatgtggattagattggatccaaaaataaaatccgcacttcctgacaatcatcaaatagttattgcaccgaaggactaggagaaaatgatgtttacattgttgggttttatgccctaaataaaactctgtttcaacgtaatccagattattctatatcaataaa

SEQ ID NO: 307731 - DNA, 1013 bp, Cannabis indica
ccacccccactatatgacaagaagaagatcgtgagaaactcacaatgaccggctgatcagagtagtgttgggaattttagaatcgctaaagatagctaaaagtctagctactaaccatatcattagaaatcaacttattatcattagacaagatacccaatcaaaagttcttaaaaattggcgtcatcttcaaactatccaagcccctcaaatcctacacatgctgaatatatttaagggaaggacaaaactacaaggcatgaaaagttagtttattattctataaacaaattaaacatactttagaagcgctcatttcatgtatagtcggattagcataagttaggatgcaatttaggctagctttccatacaattttcttcatctttgaaggaagagagaggttctaaagaaattttcaccacttagaaggcctagaagatgacgagttttgaatccaccgaagtcgagctaccaagctccaataacaatttattactgtaaaccaaccattgttagaaaaatttcaaattagtctatcctttctatcgaagttggaagacagaatagacaaaatggaagaaacttccttatcattgaaaagattataaataagaggaacattccacccactcgtatcaagtataaaatcacacactccatccacaccaccctcctaaatcaattgaaaataatttatttcttattataatttctaatttatttcttattattattctaaattaattatatttttaataatttaaaattaaaaataattagacaaattaagtgcagccatgtacgtttttggttaaacttaacaaccaaagactcgtggttgtattaaatttgtagagttaggcattatcgcaactaagttttttctcataggtattgaaatgtaacaaatcaaattacataaatattaatggtgcaaatttcatattattaatatgagcaatttgcggcgaaactcctttatgttttgatttttatacacttaaccccct

SEQ ID NO: 307732 - DNA, 1722 bp, Cannabis indica
accctgaataatgtacaaatgttaattatttaaaattgtagcatatagaaatggttacataatagctaaaacaaatgaaaaacttcaggtataattagttgtacctgtaatgcccaagatgcaaaactgatataagacatcggatagcgccagaagaacttgggaatatcagacataggtctgaagatttcagatgccatcatcataaacacctgataaaatatcaccaaaatcaacatttagagacaagttttcaccacaagtaaacttctaggctttgtttgaaatttggattttagaggtaaaatagtgggaaaaaatataggaaaacaaattctataaatttgatatatatttatttttaattgttctaaattttataaaactactctacacccaagttttaattcttctataaataaaattattaataactgattcaatgcaaaacatgaaaatagaattaaaggattttttatttttcctcttacaattcaaagtcaaaacaagaccttaaagaatagtgacattactctatgtaaaacaaatcttattaaaaccatttgagtattaattgataagagatatttagacatcatatgagatatgaccattttcgtaaattatatatttttgctaggaatatattttcatcaattattataataataataataatagtaaatattagtgtatgtatacttacaattagaccagttccaatccctattcccatgaggacattgggaaccaaagatgcgacgagcatcatgagagtttctatgacagaaaggcagcaaaataggttaagaacaaaatagaaatagtgagaaaatccaggatgtaatttcaccatttcatatataattgttcctgttgatatggcagtcaccaacaagaatggaaatgatgaaataaaatttgatatcattactactgccgctccatagtgattttttatcctttcactgttgtaaacctgtgaaaaatgaaattgtttttcattatgttggtttacaatgacattattctaatgtaatttattattacaaaatgatattataatcaccttattagataatacccatttgacacttgtattttgttattatttaacaaaatacaggatcgatcgtgtgtttgtcctaaacacatgggctaaattagtatttttcctagcatttgattattaccttgatttcttctatgaaagaaggtaagcctccattggataaacaaatcatgaagccataaacaaaagcttgacacttggctcttgcaatgatatccaaatatgaagttttgatgttgtagtagatagttccagtacatacagctacacccaagtagaataccatcctcaaccaatagtatccaacatctcttctcatgtttacaaatgaacgatctgtcaatgtgtacaattgcttccaccaacttgatttgcttttgtttgataacacaatcacttctttctgaacaaaaagcatgaaacacaatgtcaagattacttggttagaccaaagtaatctttcatagaagaaatatgttggctgaatttgagcttctggaccaaatagaaatttattgaaaacataggatgccaaatatgtatatcgatagaagaacactaggtatatcaaataagtatctgtccttaaatattgctgaacctatcaggaccttctctagcctttacggggtttcgggtaaagtttaaaa

SEQ ID NO: 307733 - DNA, 1638 bp, Cannabis indica
gcaactaaaaaaagtatgaaaaaattttgagagggggttattttcggggtttttagagtaaaaatggtcatatatttttcaatggtgatatgttattagttttagggataaaatatttaagtatatgtaagtatagaaattaaatttttcatacaaattgatcagagaacaaaggtcagaacatatatatagtcgttttaatataaaaactggttttttttttcttctattaatatatgcacaaattattatagagcattgctattaggcatcagtggtgcctaacactttctcgatatgttgcgttgcgatcggctagcgatactctttaaaagctattatattaaattatatgagatccgatacttagttacaccaatagcaatattgacacataagaaggtgctaggcagcactggtaccctttaacatttctcattattatattacatatttataataatatttgtattgataagagcgggttatcaccggtactctactgcttggttaaaatggcaatagaaacaactatacatatgtggtatttatacaaggagaatttcaaaactgtctaaaattttgaagaaacaaaaaataatctaaaaggaaaacacaaaataggaagatggataatatttattacatattagagtaacaaaatattagagtaacaaaatgttagctggcaatgatattattgagtgttgtgtaaacacttataaaaatgattagttaaagattggtttagttagtttgttagcttgatagttagtataactaacttttggttatatgtatttcctttgtttcttgtaatagcatctctataaataaataatgaagctcacagttatgagttaagtttttttagactaaattctctatatatgtttcttctctgttcttcttctggttttttaccaatccaaagttaagctagcttctacatgatatcagtcgcctccaatgtagtcgtcaattcctgcttctggtccaacatcatcaacaggcaaagtaattgctgttgacatgtcctctccgtcttcgaatccaccttcctcaatctggaacccattctcaagttctttatcctcctccctcgtgatcaaactagaccgagtcaactttctctcgtgaaagtcccaagtagttttcaccattattggacatgaataagatgatatgttgctcagtgatgtctctcccatttggacattggtcatcgacgaggtctaccctacttatctataataatagaagaaacgtgatcaacttcttctttcttggatccgatcgtccatgactgaaggaattctagcctagtcatcacacctcatttgccgtctggagggctattgaacaaaaattctcaagtcaatcccgcgcgtgattactccaacttaaaggtcaattttctcatgttcaaataggcattctttctattgctaacgatgttgacaaagttcagtctcttgttgttgctctgttgtaacgtccccgcttcaagcctccattggacccttacacccacgaaataatggctcttatacacgagtatgtcactctggctgcttcatggaatgacgactgaccctacaaaccaacacgagtgtttccagcgtgctttgtcctgac

SEQ ID NO: 307734 - DNA, 802 bp, Cannabis indica
atccaatccaattagaatccaacttttagcatccaatccaatccaattataattggatatccaactttttgtaattggattgaattggatcgattcgattcaattggattggatcggatgatgcccacccctattgtaaggcaatatctatttttgttgataacttgataatcatattgtgattgacccctctcttggtgaagctttagaccacaacacatgtttttgttggagatttcaactttgaggaatctcttgggggcatttttagctgtgatcccgttttgtggaaataaatggtgagactactatcataaatactaccacgagaaagtttttgaagtagtttatgaaggaattattttccctttgcctagtccagataagtggcaagactaaagttataatccaatattacttcttattaaagaaaaaaaggaacgaaagaattgatgagtcacttctaccaaatgcaacatttaaaagtagcaaagtagatataaaaatgcattgctacacagctagaaaatgcaaaaaatctagaacactataaccactacaggtatatttttatatcacttaacttgctcatattttaatacaatttcagttagtattgactatgttattatattgggcttcaaaaaataaaggagggaagctacttgttcaaaactcagccccttaaacattaaaaaggaggatgtgaaaggagaagcagtgagttggaacggcaacataaagggtagcagaaaaaggatcgacctcacagtctactcaacaatgaagttaaatgttataa

SEQ ID NO: 307735 - DNA, 2670 bp, Cannabis indica
aacccatgtcaaaggacaggacttgattcctatatttaaaccaactatatttttacttactttttttttatatatatttttttaactttacacaagctgttatgatgtttttattttgaaattatgctgtttctattttataaattatttctgtttgcatgttatactagttaatatagccatttttgtaaaattataaatatattatcttatttcatattattataaataatttatttattaaaatctaaatgtacaattttattaattattatatatttaaaattatttattaagaagtttaaaatttattatatatagtattttaaattactttgtcaaaagttttatttttataaaaataaataaataaggtggtatagaaaaaattacgacgtttctcataatgcattattttcatatctcaatcattcaaaactattgttattattgtatctcacttgttgtctcattgtatctcacttattttcatcactgtatctcaatgtatctcactagggctaacaactcgtgttatcgtgtcgtgttcatgtctacacgtttatggtgaacacgaacacgacaagattatttatcgtgtcaagaccccaaacacaaacatgacgtacataatttcttagcaagtcacacgacacgacacgataacttttaataaacctatcatatgacacaaacctaaaactgacacgtttaacacacgattaaacatgctattacatgacatgaattctacacgcactacaaaaaaaatacttttaattacaataaaatttgtgactaaaagtgaaaaaattgtgactaattataaatcttgtgactaaaaagtatatgactaaatgtattagtcacagtaattataatttattgtgacaatatatttttagtcacaatatttattgtgactaaaactaaattagtaacaacttttatctaaatactatattttagtcataggtaatattttttgtgactaaaagtcatatttagtcaaaaaaaattatgttgtgactaaaaagttatcactaaaagtagtagttttttgtagtaacgattaacataattatgtatataaacacaattatcactcttaaaattcacagttttaatttattattgttcttttataaagaaaattagaagaaattatttttatgaggtttgttagatttaattattcttgtttgggtatagatttatctttttcttgattggtgtatcattctattcatgtatagagatattttctatttatccaatgtataaatagaatatgttgtaaaaatagaatataaattttttaaaaatacttctatatttttacacgtgttataatcgtatcatttttaaattaagcgtgttgacccgaaagtaacacatttgataaatgtgctgactcgattttaacacaaaaattaaatgtgtcacctaaacttatttatttcgtattattttcaagttgtatcgtcgtgtcgtgttataagttgtcaagcttactgaaacatgtccttttttatagctaaacaagaccaatacaaaaaaagaagactatagtcagctaactctaggatcctgaagtaatctaggacccaggggcggagccacagccaaaagaagggtggtcatagccccaccccactccccccaattttaaaatcccattatatataattatttataaaatgaagtatataaataaaaattaataataaggtaaataaaataagacaattgttattatttatttttttcttttcttcttcaactacttttttcatgttttttaccaataagttagtacacttattattgttatattttttacacatttggctcaaagttattcactgattgataatttttatcactaaagtagaagttgagatttacgatctcctctagttaagtgttagattttgttaaaactattttattccatataattttttttgttttataaaatatttaccaaattttaaattttaatgtgtgcaagtgtattaatattcttaatttagataatatatagagtaaaaatttgaataatatagtactttttgtttaattttgacatttcattatagataattttcgacttaagaaaatttagtattgaatacatatagtgtacaaattttatttgatactaaactaaaatgggaaatttgatattatatgcttaaaattaatttatccactaaaaatatgctagcatattttgcataatgcaaaatatacttacaccatttttctcatctaattttacccttaaataattaaaaatcaaacatccatctctctctctctttctagggtactcacaccacacacacgcacacactctaccagtcggacgacccatcaccggagctagtgttgttcggccgccttacatttcaaaaaaacttctctcattttttgcattttttcttatggtttaccagttttttgcaatattttgcgatatttaacgatgtatttgcaatgatagaataaatctgaggtcagggatgaagtttgatgatttgcgatatttagcgatatttagcgacgtttcacgatatttcgcgatgttgtgaattagagacatttagagatattttcatgattttgcgatgttttgcgacatctagcgatgtttcgcgacatcgt

SEQ ID NO: 307736 - DNA, 889 bp, Cannabis indica
tttttttttttttaaagtatatttaaaatattattattgtttactaaaatttttagaaactcaatatcataaattaagaggttagaaaataaataaagtaacagaaatagagacaggtgtttttacgaattattcaacgagtcagttgtattaggctaaatagccttcaagtattacaccatgttcatcgcaagtttatgaaccctagctttttactattgtattcgagtaataaatttctcccctcttgcatgagagtatgatgcatttataggctaggatccaggtatggatatacccgtgacctactagggtctgcatataaacatggtccacgtactataatttagattatcgttatttggtactagtggcgtatagtactacttagatgtgacatcttgcgattagttagtgatattctataataatttatcagttttactgtgaatgtaacttagggccaccagacacttgatttagttatacatgtactatgttataggtagtatttgaattgtatgaattattaataatgctaccaatattggcatgaatagtactagagtgcttgagttaagttggtattaaatatggttaattatactatacgtataaatcttcggacatcaatttatgaactgctagatgggttagtttggatttatacggtaattaaatgggtgcttagttagaaattatttatttaattatgttgtattacgggtgcttaaacttttgaatttgttgttagacaattattgtggaatatctttatatattaaaagtgcctatctaatgcatttcttggtttaacattctggtttaacagaatatcttaaaataaagaatattctgttaaatttaacgattaggtttgatctgtcgt

SEQ ID NO: 307737 - DNA, 1119 bp, Cannabis indica
gagctaaaaattatcatagctatagcataatatatattgctttgataatattattaattcattattataagataaaaggagtggaaatatgtataataataccgtattgctttctccatttctcaaagaaaggaaagagaatgttagcacagttgtgttggaggggagattctccggccgagagggcggcagaaaggcgagaggcggcggacttagaattctttatctccataatatttccaagaagaaaagagggtggtggtccggtgaggccttgcttcgtcatcagagaacgaagcctctgtggattggccactaatgacttgtataaacgaaccaaaaggcttatcattcccattagagccacacacataaatatgtttgagtactcatcaaactggcccataataatttctaaatttattactgcaatatataattgatatatatatatgtatattatgatatataacttgaaagctagagcctatgagaattatttggtgtggtaaggagttggtttatatagaggtcaggtctaataagtttagtcactttgtgaacctaattaattttggtagaggtcgattatacactaattaattttggtccttatttgactctactaaccaaaaatcaactcataatttcttttctttttccaccactgatctctcatgtagtgacaccttgactatattcttgtaaaaataataattattaaaaattccaatatctaccaataacctagtctcggcaatgtaaaaaataggattttcttcacttttacctaccaaaaagtaataatattagaaagatattttttttgagcaaaaatatttttagttggtcaaataaacaaatatgcagctcaaattaaaaaaggatccataataccacttacacacaccttcaacctaggattcatgtttcttgggcaaccatcgcacaaccacacagcaatccaacgcaatcgaaacgaaaattcaaccagaaagagaaccaccattgattctggcgacttcacctgagaagacgaccagaatcaatcaaaatatgagttgttcggaattcatgaaaaaaaaagtgtagaaaaactactatgaaactaaaattcaa

SEQ ID NO: 307738 - DNA, 1694 bp, Cannabis indica
ttatattagtcacttaagctaagctggtttggtacattgtattaggttatattgtattatattgtattgaattatatattatatttttatataaatgttaaactttaatttatatatactaaaatattatatatttaggtacccaaaaaatcaatatcacatatagttttacataagaatattgcatgaaatataattcaatatataatactatacaatagcgtaatacgacataccaaacgaaccttattgtattatcttaaattgagttatatattatattattaatttattatgttgttatattattatataatatcatgttaaatttttatttatattaaagaattatatacttatatgtttataattgtcaatactaacagataatttctcaaaggaagctttaatatcaaatagcaatggtacaaattatgtgactcaacaaattaaaaaaaaaaaaaaagtacattatgattgtcctacgaggaaggccattccacatgtgataatgagcttcatatgctatgattacagaagcaaaaggcagtcatatatgtatacatatttattttttatttatatatatatagtagataagagaaacactctaaatgactatatgaacattatatataattattgtttttaagccaacagcaggcgtgatgaatagcaccgtagaatgaaagtttcatgaggaaaatgtatctgcgtttggtggttgttatcattatatatctcatattcttttcccctacatatatatacaatttatattcttctattctcttctaccactacatatctctgcctcagactttgtcaccgctttgcttaatcatctgttccctactatactatatatatatagtaaccatcatgatatcacacctttcactattcccactactcaatttcttataatcactatacatgtaattaccacaaaacattttaatacatttttcagcatgcatgtcatctcttgtcacacacagatatatttctcaaatttacaattttttttttaatttacttgcaatttgtgaatttcaccgtgagaaagacttgttttgaccctaccacacactactttttacttttcagtttccaatattccatatatatatttagctaaaataaaatgtcttaatcaacaaagggcatcttcatcatcatctgtttataataattaagcatctctatatgaacatggacgtgtatggatgcatgtctatgtattgttgtattgtaataagagagaaaaagagatcatatatatcacataaatatatatgcaaacagagattattaattaattagttgattattatgagataaatttatagaaataaactttctaagaacccaaaacatggaaaattaaaatacatgtacagacacatctaagagaccaacaatttcctttcttactttcttttgtctatatactactaattcagtaatactaattaagtcataataaactatattaatataaataagaaaaaaaaaacatagaaaagtacacacccatttaaaatttttatatatatctcagaaatattattataaataaataaaagaagtagtgtcgattacattaagaacaaacaacaacaactgcgagtacctcttagtgatcaaccacatctacagtagcagcacaagacaaacacgtttggaagatt

SEQ ID NO: 307739 - DNA, 1144 bp, Cannabis indica
aatgtaaggttttcttaaacccctatgtgtttatttcattgttttagagaattcatatttaggatgttaatcaatatacttgttagtaaatctagatcctggtaaaatattcccaacaatcacagtaccaagtcacaagtaaacagagtcctgaaactatgaacaaaaagaaagagaaggaaaagataccatatgttgctgtagtagggtcaatcatgtaccttatggtatgttcaatacttaatttttcccatagtatcagttgtcttagtagatatatggccaatccaggaaaggatcattgacatacaatgaaatggttaatgagatacttggtgggaactatcaatgaaggacttttgtataaacaaaaagctggagtggttagttttgaaaggtttagtgattcagattatgcagatcacaaacacaccaaaagatttacctgaacctaccagttcttagtgtgttgaaattatgttagctaaaacataattgttatctatgatagctctagccaccacagaagttgagttcatggtagctatagaggccataaaggagtgtggttggattcaagggattatgaaagagctaaagctatttgaagatattgcatggattaatttggatagtcaaagtgctatacagttgtacaagaatttcatgtatcacggtagaaccaagaatatagacatcaaatattttttcataagggaaaaggtaccacaaggacatatcaaaatagaaaaggtgcatacagatgacaattcctctcatatgggaaaaaagttataactctaggaaagttttatcattgtaaggacttgcatagaattggaattagctaatacaactttgagaatttatgaactccctggtggcttataatcattagttttgagttatagtgacaggctaggtgttggatcatctctcattaaacttagccacgtgttcatcctagatcatctctcacatacttagttagaaaaagaaaataattattatttttttcagttattttctgttactcgaagctttcaagccatgtttgtgttaaggtttatgcactgaaaagcctataaagatatttatatttataaataagagtttaatattttcatatatgcttgaatgttaa

SEQ ID NO: 307740 - DNA, 1066 bp, Cannabis indica
tgaaactcccttagccacagccgtgccttgtacttgtacacactgccatccattgtttttgttttttcctgtacgaccacttgcaaccaattgcttttccaccagggggaagcctaacagagaccaagtggcatttcagcaagagcaagacttcatctcccatagctgaattctagtgagggttagcaagagcttcagcaagggtagtaggaactctggatgccatgaacactttgggttttgaaatgcctgatttgcctcgggtttgcattggatgggagttaactggtagatgagcagtagcattgtttgaattcatggcagtactgtcaagaggagcaccagcagtaacctggggtaaaatttcaacaggaacagggaaattatcagtagcaagtgtgttgttgaagttctgttgaacttcaacattgatgagatcagcatttgaaacacctgcatcatgaaaaacagtccctgcaccagcattgttagaaatattctctgcctgtgttgtgtgcattgggctattgccagtgtcattaatgggaggaggagagtcattacaagcatgttgatctgaagtggcagtgagtggagaggactggaaagactcaggttgagaagatgagtgatcgagattgtccaaaccagttggagtgtgataacaaggatgggaagaagcagtagggattatatttgacactagaaaatcagatgtgtagttgactggggtattagaaactgaagaggagttggcaaagggaaatgaatgctcatcaaaaataacatctcgagagatgtaaagcctgccattcgaatcaaggcatttgtagcctttgtgatttaggctataccccagaaaagtacaaggagtggatctgaattctaatttgtgtctattgtatggcctaatgttgggaaagcaagcacaaccaaaagtccttaaggtgtggtaattgggttgttgatggaaaaggacttccaaaggggatttgttggacaaaataggagtaggaagtctattatgcaaatagacagcagttctaaatgcttcatcccaatattt

SEQ ID NO: 307741 - DNA, 2092 bp, Cannabis indica
tatataaagatatatacatatatttttaaataaaacacttcattcaaccaatatatcattcacagagcacttaggtaactccaatcatgaagccaaattttgaatttaatcaacaccaaaaaatacaattttagcagtagatttttttttaaaaaaaaattccaactacaatactataaattacattaaaaaatatttctttattattatattattttagtactatttttttttcaaattccaacccaaaatatattatcaaattattaaaaagtaaaaaaaaaatattgtaatttacaatgtctaccattattagtgggacagtgtagactctcatgaaaatatgatagattttctagtttggctagagcattttgtgaaaaaaaaaatcacattatatataatattttaacgttgaattggagatgaccttatgttgtcggagaaatttagacaacactaaatttgtgcgagtattcaagcaaacttagaacactcaacaacaattatgcgagtatactcccttaaaattgcgagtactcaatagtttgggctacgaaatagacaaagcaataatagaaatataaaagagactagagaattacatggtatagttagagctcggtatgcttagtctactttttgataattgctttcagcctagtttattagatttgaatcacccgtttatatagaaagcaagtatccattaagattacataatcgattagacaagaccgttatcacgataattacacattttaattaatagaaatatttcaaaaaataaatgcaagaataattttgcccgttcttatcttaattggagcaatgtatgcgacttactaagtcgcagtttgtccattcttattccaagcgcacgagcctttgggctcaatattgttctctcataatagacctttgagcccaagtttaatttatgaatgtctacgatcatctttgatcgcatattcgaacatttcatgtgctaacgacttagagcatgcaagtttttgacgagtcattgaacacatttattcattcagactatacttatacaaaagaaacagtttttatttgtcgcgtgagagatttacttgctcattgcatacaatcgatatgcgcgatcagttattaaattctcttggtccccacttatctttcggccatgccaggtatggttatgcgattaatggtgaaaatacacaattatcggtcataaagtttaaaataaattaagttcgaattaatattttcataaaattaatgaaatatattttatattaaaaatatttatttggattaatttactgtaattttgtaggaattaaagtgttgttaatgaaggaaatggaaaaaaaaaatgagaaaacaagtgacaaaattgaaaagaaagaaagagaataaagtaaaaaaaaaataaacagagaagaagaagcccatttccaaaagaaagaaaaagaaaagggcccaagagaagagcccaaattagggctgccttctcttccatcagcccaacttaatgggtcccacctaccaagtcagcgccagttggcactccataattcgtcactggcggtcccgtcagcgccaaagaggcgcttcttctttccagccccgtagccacatggcatgtcctcattcgctgcattcttccatcaacctatctcattgtccacgcgtgcggcacatgtcaggctcccattggtcccttctcttcttttcctttccagctgccataatgtgtcttttcccatgagcttctacactttgggcttgaggacactcaacccaattcgagcccaacttcctacaataaaagtacattttatggaccattaaattaccaccaaaacactcaatttatcttaaataccactaggcagtgacgaagccagaaatttagttgagtgagggcttgaataaatattaagtcaaaactaataaaaataatgataaatgtatctttcaaattttcatcttcaacaaaataaaataatactgttgacaaaaataaaataaaatattgtcaatggtattattttatttttaataaagtattattttttttattatttgtattggactactt

SEQ ID NO: 307742 - DNA, 745 bp, Cannabis indica
taataataataataaatttaaataaattaaacataaattttatcctaattagaatttttataaactaaatttgataataatttagaaaataaatagtaaatgttggttaattagttgcaccttttgttaaaaaatcataaaaatctgcaactattacctcactctaacaaatcataaataactcgatccgatttgactctcaacttcctctacgactctaccatgttttgcacgcgcctacttgtttaatatcatcccctaacttctatcctatttttccttcaaaaaaacttctatcctatttactatttacttaataattgccaaaaaaaatactgttagtgcctactattttttttttcagtgttatatggaggtgtatttaattatcatgtcaaaataaattttaagcaatattgctaaccaattgtgaagtgctacctattggacaccaataatattcaataataatactcataaataaaattagcaaaataaatattttagagagatatatatctattctgtaacagaattcttagtttaacgatacggtttctacgttaacttaacaaaatatcttattaattaacagaataatttttattaattttataatattattatatatatttaaaaataaaaattatgtaaatattttatataaagaaatttaaatttaaatttaaaatacgtattaaataaaaaaaaaaattatgtataatttatttaaagaaacttaaat

SEQ ID NO: 307743 - DNA, 3151 bp, Cannabis indica
gaacgtaatgggttgatccattaactggggccttagagccgggagctgagtaacttcccaaacctcactatgttttacggcccctgcataacgtttcagctcctttcgagtagtccctccgatatggggtcctccagagatcatagctactcttccgttgggtcttggtggcaggccaagaattcgctgaggttcccctgggggagtgactggtgccaatgctccgggcgcaccccctggtgctccttggggcgaaggtcctgctgcctgaaccgggttgagatgaggcaagtggttcttaatccactcatatagatggcccaaacgaatcaagttttcgatctcatctttatggtttttgcattcattagtgttgtgtccaatgtcattatgatactcgaaccttttgttgcgatccctgtacagaggaagcggtctccggtagtgcgtatttttgggagtccgtcagttctgtctacttggtgtattggggagtgtacccccttttctaccgcttatcctccgtctggttgcttcctttcgaggacctcttactccgagagccttgaggagggcctgctaggcttgaagtaggagcggagtgagacgggacttttccacttatccccgaaggattcccataatgagaagatgcaggagccaatgcctgattctagttatatcctgggttggcgaaaaattttatgccgctcattagtggagtagctgttggtaaggttcccaggagctgggctccgggtacataccctgctattccggtcgggtagtatcccccataagccactatttggatctcttctaagttgatgtatttttggactcttttttggaagtcatgaaggttggaggctccttcttgctgtaactcgttccagaacagagtccctgcatgaatccttgcttgaagaagcgtaagatgttgtccgtcatcaactttcttagtctttgaggcttcttccttaaacctctttatgaaatttttcagcgtctccgtggggagctgcttgatgttagttaagtcactgacctcaagattaacctttcttgcggcgacaaactggctccggaagctgacttgcagcttgttccagcagtccacagatcctggttccaatttcttgaaccattcctcatcggacccacttaatgttagcgagaagcataaacatttagcgtcattgctgactctcatgaccgtcattactgggttgaaccgtgacaagtgatcgctagggtccgagttccgggtgtaagctgccatttcgggcatcttaaaattttttgggagctccacctccaggatgtgcctggcacatggttccagatcttcacagtcagagtcagagtcatcacctttttgtctccaggagactcgagcaatgtctttccgtagtatggcaagctcagccatgattcgttcattcagcgttcccgtggtgaccgcgggcgcgtgtttcttgattgagttgcagctttggattggttagagtcgggtcggccataccctgcgagagggtatgctgaaggctgaccaacccagagtctggcagctatccatggccaaccagccccagggcctgtccgtccactcttccttgactggctggtggagcttgtacgctgacatggggtagatcacactaattgctagagtttgatggatctaaatgtctcaagtgattgtatttactttttaggttattgttgtcttgggtgtttccacacgttctcgagcctcgctgattaaagattggcctttgattgccacactcccctcagggaaggagtgtactcctttggcgtacaagaggtaatctcgcaggtggctgaccgaccaaaggtttgtagatgggggctgttgttaagcttgagatccctagccagcctccagactgctagctgttggggtttggctgttctcgtcattagaccttcgtggcaaggcctgtcctccttcaggcaagggaaggtctgtcctggttccaaaagaacctagttggttagcttgctgatacaccctccaaaggggaaggtctgtcctggttccaaaagaacctagttggttagcttactgatacaccctccctagtctataaactagtcttccttggagtggaactctgatgagatcctgacctcttccattggttctctgactaaactgctttagaaagtcgttggcttctctattgcagcgatccggacctgcctggtgatatcgaaggatctactcttaatcatccatccatctcaagaattcgcgtctccactaagcgaatacatcacaatcagcaggctagccaattcctaatcctatctttctagcatagtactgcagacgagatccaattgttgttcctaggggctgttccccaagggtacttccttcaatgggaggtttcagtggagggtcctccctttgaggcaagggcctactattcaaatctacagagatgttagtgccactctggtcagctgtagtggccggactcgaggtgcctaccgtggtggaaagattgaccacatcttcagtgttcatgggaattctaattgtggctggaacgtggacatcaggatctgcaatcaaaggatcttgaggaagaccttacgatgtcgatggttcaacctgagttctccttgtgttaaccatggcgtttgatcagatatgatatcaagtcactctgaatgaaagcacacctttaaaagtaggcaaccgacaacagagtcacattaacattaatgctttctacgtgttacacaattagaactagaaagtaaaagaacacaagtatttttatagaggttcgatccccttagttagcaggtaataacctactcctcttttagctgtattgatacctagagataagactattcagattactataggtaggatcctatatagctttcttaagattacaatgtatgaaatagtagacaaatctctaatgagagagatagagccttggaggcgtgtgagagagaggaataaagaaagccctttgggcttgtagaaaaagagaagagtagaatagggtttcaaacttagagctttatggttaaatgagatttagggttttagggttgagttaaggctctttatataggagagcttaaaccctaattagta

SEQ ID NO: 307744 - DNA, 3368 bp, Cannabis indica
tttcttcctaatttgtgtgggtttcttatggtaatcaataccatattattcattcacattccctttaagtaaacatgtcataaaaataaaagattttacaccaatttagtgtagattcagtactaaattaatgtaattattagagatgcttacaatcttaaaaagtattaatgtcttacagcaatgattagttttctcttagcattctcttgatttgattggttctcataatttatttacgacttggtaggatagttttttagattgtgtgctctggaataaaatgatttggaaaaatgttatgaatagatttgaaattttggttttatcctaaaaaaaatcgttgtggaatattttgtgactgattctgaccaagtaaattcaataatccctctaataattcacaactaaaatatgggatgaactaatctaataatttaacttggttaacactttacgctatggtacatgtttaggtaaataggaatcatttataattgaaataatttctaaggaaaagaatttagaataattatttattgggaataaggagaatcaaaactaaaattaaagtccttaaaaataaaaataaaaaactaaaatatgtttattttacggacttgaaataagaacaaaattacttcatcttgtgagaaagtaatatttaagaaacatgattgacaacactttgtaaaaaaaaaaaaaaagaaacataattcgaaaaattaatgtttgaattgattaaattactctttcactcaacttagataaacatgccatcaataacttctttctttttttaaaaaaaaaataaattaaatatgatttacacttttgttgatggagtgattttgttccttttttagtgatcaatttaagtaagaaatataataaattaataataaacttaattgtacaattaagtttagtttaaaatgtcttaaataatgttataataaatagggtttttagaaagttcaatacttaatttcttgccataaaaaaatcgtgcgaaaggaaaatagggagaaaaagtaggacaagtggaaatagtgggaaaggaaatttggctgctgactttctatgatttgtgtttggtaggtcgagatgagactgttgaaggtctgggcttgggctgatgaaaagagtgtattattatgggcttcctcgtaagccaaaaacatcagaggcccagttcttctaagtgatacttggaggaaattacactagatacctcttttaatttgatttctttaatttttacccactatttcgaaatctattatgtttaccttttttttcaatcattttactaattttactcctatcacttcatgacagtttttatttttctttaattaaaattttataccaactttcccacaaacttatacatctatctacaacaaatctattatgtttgaaattatatcttagctatgtcagtgttagaggataatttgagtacaatactcataaaaagatatatatttgaattaaattttattttgaggtaaatttggttaatgtataaaaaaaggatatttttcaacttttccccaatttaaatgtatgaagaatgaagcaaaaatagaggaaattacattgtatgtccattttactttatttatttaaatttttacccttattttcatatgctttaagatatacccacttttatagatgatatctcaattataccttttaggttaatataaattatgtgctaaacttaagtggatggtaaagatatattagacaactcgctcacaaaataataaaatataatatgagggtattttttattaatggatacaaaaaagaggtatttcctaacttatcctgcaaaaattggcgtaacttgataacaaacttgtttagtttatatttgaaggcttgtcatttttattttgatgaaagtagtttacatttccaaacttgtggtttccattttggattgagtagtttgcattccacggctagggctgcaagggtaaaatagggaaaaggacatcaaatataaaaattgttggaaatgaaagaagattaaaaatttgctaaaaatgtaactagtaaacttaaactacctaatttcctcaaaaagaaaattgggctattcctttacagtgagaggaagagggctatttgttgaagcccactttatgatgtggtgaggttagggtgattgcttgaagttgaagagagttttgtttttctttgtttttttttttttttttttttgaaaataaaatgttcattagatcataaataagacctcaaggttattacaaaataagtttgttgatattgatgatacaggcaagttactaaattgtttatgggtaaaagctcactttgccacattatgggtaataaaattacaagatcaggaaatgtaagaaaatacacgaccaacaaaattagtggaaagcttaacttaatattataattcagttttatccaatcttgaggaggaggacgccaatcctccacctggataggagaaggagtagggattagagttagctcgtaagtctgcatgatgagaatcatgaggttccatctcaaaactaattggtgattagtggagtagctcatgttcttatatatgactcaatacttttacatttaatatatgtgagacaatgttcgccaatactacataaaaaccatgaatagagtcaaaacactgttaaagggagttaataagtgactcaccttgctcatctcggtttgaagacatgaaattactagatttatttcaaaatatattcacaaaataatttggaatgcttatacaatttgaatagttgattataactcatttcaaaataataataataataataataataataataataataataataataatggactatagtgtccactcaatcaaaaaaaagctaaaaaatacccatgtttagatgatagtaggtttgttttaaatttttataatatggagtcatgttctaatcaagacatttgggcattaggggaagcaatgcatttgaaagttggattggatttggactgtacccatgttttcttgtacatagaatgagtcaacagagataatgacctatttaatttcaaactacccacccacatgttgtaatgtggggaaaataaacctatttaaaagtaatgatcaaaacagctatctttttccttctttcttttttcttaagaaaatagtatagtagaagaagaaatcagaatcagtcacattaatttatttgaagtaatgacatttgggaactatattttctatttgattagttggtgggaaagtagtgtttaaattgttattaatataggggatatttgtgctggcagaacaactcaaaagataaagaagtatc

SEQ ID NO: 307745 - DNA, 817 bp, Cannabis indica
aagataaaaattaaaataattaaaataaagtagatatataatataattttgttaacagaaggtggatattagaatttaagatctctttgtaaaaccagtttggttaaactaaattatgcttaagatcattttttttataatattttatttttattaattttcaggaatatataattaaagctgtaagctcaattattattattgaccttgtcaacaatttaaagtatataggtatatttattcaaaagaacaatagtaagatgtcttggaagtacttatattcagtgtattaaatatatatattatcttcacaaaaacaatgttgttcaattccatttttttttttgtttataaaaacattgtttaattttcaattattgagttgataaatgagcacactatataattgtaatttttccatattaaaagatattaattccctaacaaagtcaatttagtcccaaaggacccaaactatatctttatgtttatggtagctggatgatttcttttttcgaagcaaatctatttgaaagattcaattaattatggaacctcaagattagaagtagtcaatttgagaacaaattaaataagttatcataattataatgttaactacaattttcctcaactataatatatactgcaaattatgttctcaatttttcatgacattaaaaattcttgtatgagttattaagaataggggtgttcacaaattatccgatccaatccaatccgcacgatccaatccaatccaatccaatccaatccgcaaaatgcgaatatccgcacttgtgcgaattggattgga

SEQ ID NO: 307746 - DNA, 2233 bp, Cannabis indica
attttgcatggcataatggatataattataccaatggttttgtatttaattttgcaaaaacttaactctataaatctagcttgcttttttttttcccctttgtttggattattttgattgtgagttttccgaatttctcaagcacattcatggtttaatcaagaataggattcgacctttgtatggtagtactttaattgatgtggttgtttatgtaaacttaagtataacggttgcatatatgatcaacactcatgtactgtcatatcgaatataatattttggaaatttttgtagtaaaccttcttaaagggtaattatagtaaattccttatctgaattgatattaagaacacttttttagtctattatttttttaagatcgtgtatattatatctatttaggatcaaatttaaatttttagaaaattccgaataatttataatgtcgaaaataaaattcaaacaattacttaacacgcgtataaaaaaaatagtctcgtgtgcatcaaaatatgtgaattttatatttggcattataaactatttttttaaaaaaattttacaggtggtcttacataactataatatacgcaaaaatagactaaatgccaaaatagatagaaaatctacagaaacactcctttagggaatgtacacttaccctaatatttacatatatatttttatatgagctagattaaagtagtttctgaattcatcatattgcagatattgtccatatagacttgacaatctattgagtacaacttttatctgttggtaagtacataaatttttttaaagatacatagctttgcccttcgtacgaaggaatacatggtatgtatgtataactttttatactagcacttcgttagtcattgaatatttttctggctaaaagcgatatatgtataaatatttggttataatgtaaattctatatttatctgtttagatatctatagtaaatttacttttttacaacttttactagtatccgcgtctactaccactaaattctttgctcagctccaccccatatattggacaatatatatatatagaacatgatagaaatgtcaaaatatatatatacgaacttatgtttttgtgagattccaggtattctgtagttcctattcgcatcaatcgccaattgtctttgatggatgagattcattgagcaattgagacggttatttatgtctggaaaatcttttgttatcttgttgcatgtgcctgatcgcattcatgatgagccataaaggtgagtatatatacatagtgacaaatatatatatacatatatgcatttctatactaggatgattagcctagctaatcgcattcatgattagaatgattaaccttttttgtttttgaatgaaaattttatttcttattatacaacttttttgctagttcctagttagcagttttgcataccagataatatacgaatttatttattttctaagtgcctagattctttatgataagaattagaattaacagttaaaattatttatgagatttatcaattgctgtattaaaggttttcatttgcaggaagatcatatttgtttcccaccatatagttgaaggaatacatactgatacaaatataaccctataccacttcatttaactcaatagaatattagtttttcatttttcaagtggaaatacaattaaataggtatgatagtaaaatgtattttcgttttaatttttgtttttcaatgttaaagtcaatatgaaagaaatataaggtaatattatcaaaaatattaacagttgcaaatagtttgaaagctcagtttctagtaatatatttgcaataagaatgttcttttttacgtaactagataattatataattggaagtgaaagttttcaaatttcagttacatctctaattctcatagatatgtaattatgatttattttttaattattatatacatattgtattttaataataatgtataggatttccatttcgattgtattagtgcggctgtggcctgtgaagccttgcttcctgaatgagaaaattagcaagaaacactcgaggggagcatagaatcacctaagaaaattgacagcggctgcacacattaaacactccaccgcattttgatgatcatattcatagatcgcacagaatcgtcaacgttttcctttcgatgaggggttaaggcaaattactcaatattaatcatcc

SEQ ID NO: 307747 - DNA, 2728 bp, Cannabis indica
aaatagttaactattaaacgtaagttatataatatgttataaatcattttagtaaaaatatgtaaatcattttattcgggttatttgggcgagttagaataatattcaaaccgcccaatatattcattgggcaatttgaatttttcgtaaaattattcgggttgtattttttgtagatttattcggtttggtttgggcgatttatttgggttgggcagtttgttaatattttttgaatagccctagtgaaaagggtgatcccctagtctggttaagttctaggtcggtcaagctttgcacacggtttgtaagttgatttatttgggcttgcaccattggatcgacttgatatgcccgtgaagcgacctgtgtcacttgtggaccccctagaacattactgtgcacgtagttttctacattgattggttgagtattaagggggatgaatttttcatcttgtccccttctataatttagattgtctcttaaatcatgtgcatgtcccaacttgttaaagactgattcccctggaggtcttcttgttcaactgttattagtagttgattggtttggtatattcgtctaagaatagaaattatattgaccattcccctaagataataggctggtaaaacgtgctcatttatcgcatggcccacaattttatcctgttgccttggattggacggtccattaccttgggtctactgagtgtagttggccaaacattcttttggcccatactacgatatgtttgggatatagggctctttccctctgtttggatcctttatgagggtgttatcaactggaatatgcccagttagcttataagcttttgttattaactcagttgcctgtttggagcagttgtcaattgggctctcatgatttccacctgttgattcatcaactcctagaactggcatttttattgttcagatgccatattcacagttggtcgggtgtccttctggtcatggtgaagggtgtttgtatgatgtttcatctgtcttagggccacttgcatattttgtaattcagtatcatcaccaatgagtacccgaggtccaccagtggatggacccccagtacttgctccaatttccccatgatgtgtactgatagttctagtctcttgtgtgctcagagagaatctagtctgaggggttgacactcttagtcttgctagttggggacccttggaggctgagcccagtctcgtgaaaagtttcgatgtgtagccagtcttcgcaggattcacgaacacgattccaaaagaagaagtatggccacagcaaccagtgtaattagagagaatgatcagcctaccttacacaatgtgaacttgcgagaagatacgactgagacagggtctagttgcatgttatgctccgcataatcaaagaataagcaggattgagagaagttaatatcggtcgcgcatataccaattatatgcgatgatcaagtatatctctcctgggatgagtaaagattgtctctttacctaggtttggtctgaatgaccaatgtgtttgaccactcattaggaactcgcatgttccaagttttcaatgcatagaatgttagatatggcaatcaagggtgaacgcagacattcaatgaaataggcccaaaggctcatcttgcgagacaacaccgtagagtttgtgagctcgtgtgtttgcaatatgaataggtatgctgcgacttatcaagttgcatacgttactgaaattaatacaagaacagacaaaattgttcttcatttattctttaacgtttattttgattttatactctcatttattataaaatgattttaattgatcagttatgtaatcctaaaggacacttgctttctatataaattcaaattaaataaactaagctaaaatcattacaaaaagtggactaagaagatcaagctctgagtgaaccactataattctcttgtcttttctttataatttgcttttgtttttgtctatttagtagcctatactttaagtactcgctattctaagtgaatactcacatatttgttagtgaatattctaactttgtttgaatactcgcacaaatttggtgtggtctaatttcctctgacaacatttggcagtttttgtgggaaagacaagtatttttgagattttggaggagaatcgaaatgactacagatcaaataaacacgaacaacaacaatggaatcttcaatgttggcactatcaatgttcctatttttgcaggaggaacgacccccgttgatgttgtcataggaggagtaggatgtaccaatgtgactcccccaacatatttcctcaattcttaggaaatgttggagaaacctcgacaccagtagctatcgtgcgacagtttccaccaatcacgcccattgtcgcatccaatggtatcatgcaactgacaaactcgcagtgcgcgactatgcaggaacaaatgcgagcattacaggtagagatcacaggaaaatattacattcaagcccaacgtccaccacgagtcccaaactaatgttgcactaataattaagtaagtaatgatactaggtgttatccccaaattggcactctgacgtggcatcacaagaatggtgacacgtggcatctacttagagcacctggtcggatcaacatgccgagcaggatgcgtcgctggcatgtccatgatggaatgctcaacgagccgtgcagaatgagcaacactt

SEQ ID NO: 307748 - DNA, 1986 bp, Cannabis indica
taatttttttggcatcttcttttatttttattgattatttttttcatcacaaataattgttagctagttatacatacataatataatatatatttatctcgatcattatcataaaagttaaatttagttgtgcaatacttgcttgttattagagcatgaatgttgtaaatatggtgtaaatataactttttagcttatattcataaaattaaacttcaataatagtgtataatgtgatctaaatttgacatgtactaaaaattatgataaatttgacttaaaatataacaatgatcaaattttacactataatataaataccacttttttatttacttttttttatcactcattaatataattcataacattttatatttttatttatatatttaatataatttctatatattttcatgaaaatttaatatttttgttgatttttttacacatttttattaaaataaaatttactttccctattgcattgaaacacaattataaaatatttagaccaaatatgaaattgattcatattttgaccaacaaaatttacaccatctatttaatatggtcttcttaataagtttttcaattttaatggtatattttcaatatatacgagctaatagatacggaagtagaaaaatacaattatattttctttaattaattagttgtaatgcatgtgttatacgtacgtacaaggtccggtgatcaaattgaagtttctctctccttgtaagcttattgaaatgatcaagtcatgtagtcgtatattaattatcaaattaattgaagtatctcttctattatttttgtgtaagaatatgtattcttttgatcttttcattttatttttctatagtagatattgttatacttttttcaatgtgtatatgtttagttatagctcgtaattaataaatcacatgcaaatgcatatgcctgagaaattaatttgggagagctagtggggcaaaagtacttttcttttttaaataattgatcagagaattaataataaactatttaattataattacgtaattatatgtaatagtgtttacgtaggtatcttcttctctttttctttttctttttccttttccaaacaaaacaacggtcaaactatatatgcttatcaagaataatctagcgatatcgatcgaattcacaacccagtctgctgtatttagacaaatatgtttacgagatctcttctctcgacgacttttttttttattcttacttttattattattagtttctccaaactgtgataccccaacagtcatgatcatcacacttggcccatttgcatcaagttgaactctcaacaacgtatatatatatatatcgtaataatattagtctaacagatcgatggaccaaatccaatattagttcaatgtgtgtatatatgattaatgattatgtaaaagcgatcatatgtatgtaattttatttggtatacaagtttttttttcttttttatgatcaatccaacaaagtactccatatcaatacataatacaaaataataataataataataataataagattaatatttggtcttgattgaggtttagccaaaacgaagatgatttgtggaagagtacaattagtttcttggatcatgggatttggcttgctggccggcgcttctaggatcacgtgctgcactaattttcatgtcaattaatattttataaatatatatttgtatataactatctatataatttaaatttttttaaaaaaataattttcatgccaaacttctttcaaacttaacgcacataataactataagaccatctctaagatttaaacttatggtaaaaaaaagaaaaaattgtgctatattaatttgacccactatatataatcgtgttcaaatacaatgcaaaataaagaaaaacataattaattatggtagcgtttcgtaatatttttttaatcagatttctgtttttaaaa

SEQ ID NO: 307749 - DNA, 1418 bp, Cannabis indica
ttaatttaataattattgtagaatatcactaagcatttgcaagacgttacttcaagataatgctaaacactactgatacctaataacaatactctattcgatatgataaatcataatatagaatctatatcctatgatataatatttaatgctatagattatttacttggttgagagctggatggattttggctatggaaagtaggtggtgaagcatttgacaagtgaaattgctgactccaatgtccctagttaggccaagtctcttgcactcttccatgccttcccatactgattttatatctaaggcttcaataagttccctctccacaggcaaacttttcacatctttgctcaatttgaatggccagtgaataatgtacatgtcaacatactccaattcaagctttcttaacatcatacaaataagttattatcataaaatgtaattttgtgaaacttaaatttagtgttaaatcaatactaaaagaatactatttatttagtgtacctaagactcatcttgattgctggcaccacaagatctcgatgagcaaaggtggcgaaaagcttggtagtgatgaagagctcatctctagatttgatcaagcctaggcttaaagcttcagcaatggctttggccaagtgctcctctgagccgtaaacaaaggccgtgtcaaagtggcggtaccccactttgatggcttcaacaatggcgcttttcgccttttccatgttggtaggaggataagaggacgttcccatccccaccaaaggcatggccttgatctcattgttgcaactactactaatactactcctcaattctattttaggaataataatagccatatagtatagtgcttatgtatataagtcttaactttgtgttgccttaatataccctaaagtgtgttgtgtatgaattaataatagatacacatgtaatttatacacttacatgtgtataaaaatgcacaaaataatgtcaactatataattgttttctagttttgtctatatttgaagtatattataaacggttaatatatgatatggtggttggtttttagtgtttgattccattttgaatccattaattgtttgacttagggcacttggccggctgatttacagattaattaagttagaattagacaaaaattaaagaaatattaaatttaattttttattgcaatctctttaggatgaaagaaataattataatttacagtgttacagatttatttttgtttttttttaatttactttttttttacgaaaaacaactaaaaacaatattagttttaaatacgcgtgttgtgatgtgttagtccgaaatacaagttgtgtcgtgttgaactataaaaaaataatgagtcgtgtcgtgtaacaattttatgttggaaattatttta

SEQ ID NO: 307750 - DNA, 729 bp, Cannabis indica
ctccaactaaattttatcttggaagaaatagctagagtaaccatctggccttggtgctttagctcatgaaatgtcaaaaatggcatgtttaatttcttcatctgtattaggtttcaggaggatatctttatgttgacttgttaccaggggaccattgctgagaacactagatataaccctccttctatttgtcatgcttgtgccaataagctgcttatagtagtctaagaatacctcggttatcctaatcagatcatcaattctgtttccttgaggatcaaatatggagaggatacaatctaattacatagagtcgtttttactaggttacttttttttctttctatgaagaggtattatatagaatttgatagtaaattgtacaactatctagatagagaaatactaagacgtacacagtgatgtttaacaccattaaatgtgttatatgtcgctattaatacaattaaatgttaaattttaaattttaatttaataactatttataaaatattcttaatcttttgtaaaaattcatcttataataatattaacaccaactattatctaataaaacaatacaattgcagtattacactatatttagtgtccacccaggatggagagacttaagcatcaagcccaattatataaatgtataattaggattattttataaatacacaaaaacaataaaaaaaattataaaaatacagttttatggaattt

SEQ ID NO: 307751 - DNA, 2625 bp, Cannabis indica
aaaagaaaaagaaaaatatttatgattaaaatctaaggacaatttactttaaaaaaatatctaaggagaatgcagggagaatttcaaaaaatttaatatttttacactatttattgtagatggtctaacttgtatgtgaattgtgaagctcttcttccaaaaaaaaaaatagaaaaagaaaaatatttaggattaaaatctaaggagaatttacttttaaaaaaaaaatatctgaggagaatgcagggagaattttctatttatttaaactattttatatattcttttgttgcttaactaatatttaattatcaaacaaattttttttttttttaaaaaaaaataatctaattaatttcaataaagtagctggtaaacctaacttttttgttattaaaaaaaactattattgaaagacagtagacaatagttaatctagttgaggagttaagaaaatggagtagctagactatcttttagaatattatcaattgagtatcaattgtgtgacaagaatagttgttacttttatgcagtgttaagtactcgtaaaaagaaaaattatatttttaagctagaagatgatagtggcgtttggtttacttgggatgataggcatcttcagttagtaaaagactatttctaggatttttttactgcctcgaataccgagttgggtaatttgcttgagaatattcaatctatagtttcagcttatcgaaatgacaatatggtgcgacctgtgtcggaagaggaagttcatagagccttatttcaaatgaatctagacaaggctcggggtcctagtgggatgaatcagggttttattagaaattatggcatattgtgggggcggatgtggtgaagcttcttcaacaggttttctctttgggtgagtttccaattggcattaacgataccaataatatttttattccaaaaaataagaattgtgtggagatgggtgattgaaggccaatttctttatggaatgtggtctacaagattgttcttaaagttatggcaacccgatttaaagtgctgccgccacaagtaatttttgacacacaaagcatctataccaggtcagttgatttctggtaatatcatggtgtcgtttgaaattatgtactatttgaagcgtaagattttcgggaaagaaggggttatggtgttaaaacttgatatgagtaaatcgtacgatatggtggaattgaattatctcaggtttatgtttcagaaacttaatttttcataacattgggtacaactggtttcaagttatttttccacggtgaggtatcaggttgctcatggtggtcataggatggggcctattattccttctcgagggattaggcacgaagaccctttgtctccttatctatttttggtttgtactaaaggaatttcgatactacttcatcagtatgagcgaaatttgttaataaagaagtgtcgtgtggctaggggtgttctgtcaatttctcatatattgtttgctgatgatagctatcttttgtccaagctaacacaagaggggctcaaagagtgatggagattctacatagttttgagagaatgttaggacaaaagattaatgtgactaaatctactgctttctttagtacaaatgtgagtggtgctattcgagaggttatttgtgttatattgaatataaatgaagctaatgagaatagtatgtacttggatctcccaagtacgatcggtcgaaacaagtttactgtattggacttcctgaaagagaagttatggaagcgtatagaaaattagaatggtaaacccttgtcgcatgctggtaaggaggtcctgattcgtaatatggctcaaagtcttccaacttatgttatgggtgttttctttttgcctgcaggaacatatcatgatttggaaggctaatttttggaagaagtcggctataaattcccatcaaggaattttggtgattagttgggagagcatgatgcgtagtaaagaggttggaggattggatttttgctttcttcgtgatttcaatttggctatgttgggtaaacaagcttggaggtttcatactaagcctagttcgttggtttctagagtctagaaagcccagtattttatgaatgggaacttcttttcggcagaacatggcaatattccaagttatatttggagaagttttgttgaggtaaaagagtttattcgtaaggggcgaggaagggaatcggtaatggagaggagactcttttatttgatgatgaaaaggttagtagttttttttttttttgtggtgggttagaaaacgtgggatgttgatgttgtcaaaggcctgtttgatgaggaagtggcgaccaatatttttggtattccactttctaattcgattttcaaggattactggtattggagttttgacacttatggcaaatcgagatggtagtgtgaatgaggaggttgtaggatttcagaagaattttcgacaattaaaacttcctccaaaggcaaaaaaatgtgtatggtgggcagttagtgagtgtcttccggcgagagttcagttgaagacgaaacatgtgaatatttctttgttgtgttcgatttgtcatgggcaggtgaatcaatttt

SEQ ID NO: 307752 - DNA, 1396 bp, Cannabis indica
atagaagaaaagaaaaaggaaaaaaaaaaaaaaaaaaagaaaaaaggaaaaaaagaaaataagggtgacaaactttatgtgatttagataaaaattgggcttgacttagtttgaagagtttagctaaaacacaaagtgaaaaaagcaagtaaactaactgagttctaaaatataagagatgggtttagtttagtttggttggttatgaagagaaaagaaagaaagaaagaaagaaaggaaggtggggtttggatgtaaaagaagattgatgaaataagatgaggattaggtgaattagaatagtgagatttataggagagatttgttttgatgaccaaaaaggctctctttttgccaccttttagagaggtaagtttcatacttacccaccaacggctaagatggcgggaactctctttatttgactccgttgatcagacttctttgccgatgtgggattttttagtaactcacataatttaatgcaataaaaacaggggaagaaaaagggtgtgagtgttggaattgattttggtgtcattggctggctagattattagatagatggactcttataacaagattttgtgcttatttttttttttattattggtaaatgtaaattatttatgaattttatcatgaaaattacatgttattttggtcagcaatctttgagtggttaaaccatatgtttcaacttttttttttggagaagtgagtagagagagttcagagtgttctctgaactgtggagacattttcggtttagattgcagcctctgacttattatgtatgcattaataaggattaggttttcttaggcacaataatcttgtaataataaaacatcgtaaattcataataatcataccaccaaaattattatatagccacccacttttttcattgaaaaaatctatgtacttatttatgtttaattataatgggtgagcaattttcaaattaatctaattagaccgaatcaatctaattcaattatgaaaaattagattagaggtaaattgttcgattctaattgaattgaatctgttattataggacacttttaaaatctaattaaaaaccgatcaaattcaattacatataatatacattaaaaaaaatattgtatttatttataaataataaataatattcaaatgccattttatggttgtttattaatttttcatggatcctattacactttattaaagaaatccttaaaaaagactctaagaacttatgcctagtttagttttattgtgtatagttttaagattacaacatatttatatatatatatatatgtatatatgtgagatatataatatatatcatgagtgatttatattatatatatttagatgacattgttgaaaattattttac

SEQ ID NO: 307753 - DNA, 1075 bp, Cannabis indica
catagagtaattgtgagaaccactcttatggttataagtttaaccacaacgctgaatgtttcatgaaaatgaaaatcttcttgttgatgatatcctttcgctacaatcctagccttgagcctatcaatagaaccatcagcattttctttaactctgaacacccatttgcagcctataggttctttgttaggaggacgatcaacaagagtataggttttatttttctttaaggcattattttcatcagacatagcaggaaaccattttgcatctttcaaagcacttttcactgaagcaggtgtgagagaaggcattagtactttaggcttttgaatatctgatttttgtctttttttcataggatgattgttgacaatatgatcacctgcaaattgagaaggaggattgacaataagatgggcagcaggaggaacaacatgatttagtgtaggatcagcagcaatagttcgaatagttgcaatagaggttctataagtaaaaaattttcacctgttgctcatgaaaagtaggggtatttataggcacatatgtgggtaagggcatgccctttacccacatagggtttcttactcaacacgccacaagggctgagactacaacaagaggatctgaccgttggcttcgtaggtagcttttccatcgtgtggtacgcaaccattgcaagaaatttttaggagcattgacatgtgtccctcaaagttttctcctttaaaagtgtttccctagacaagccattggacaaaaagggctacagaagcatgtacgtgcactaccattgtttgatgtaggggacaagatctaattcgatgtcaaagggcatagaaccgtcgcatggagctctagatagctggataggttccaagattagttggccacgtctaccccagactacatgaccctactatccttttgggacgcttgcatcctctgaggactttatcttttctaaatagtagatgaatggtaagagctttgaaccttcctgaagtgcaacttgtagattttaatgatccaaaattccaagttgattatctttagattgattgatttcaag

SEQ ID NO: 307754 - DNA, 1667 bp, Cannabis indica
agagagagagagatgattagagagatagattgagagagcaatggtggggaaaggggatggggtggaggaggagcagatggcgatggcgaatggggcagagaaggagaagacggaggatgataaaatgaagaagaaaaatggggaagaagccttcagacttaagttttatttagagacttttactagtgcaatttgatacaccagtaaaagtatccacatgcacaagggaaaggggaaaaaagccctaactattgaaatgcaccatttgaattagaattttatcgagtcatatttacgccacaaaactcttctctgttacagaaaagttatgagggaatattcccaccaatgtttttttgcttttgtcggcataaaatgtgctgacaaaaattaaaatgggtcagaaatagtaattgacatgccaaaattatcctacctaaatataacacctttttctggtgcatattgcgccagtaaaggtgaccaaagtattgaaatgagatcgcaacaaatgatggttaaaattcttagttttgtcagtggaatttactaattgcattgtataggctaatttgctgatgcaatagtgcacttggaaaaagttttatatgaatgcttttggcacttccttgagtctctttatgctagaaacttttgccagtgcatttggccaaatgtaccagaaaaagtcgtatttcatgtagtgaattagcattttgtgttagattagaaagtcaaataggactataccgccgattctaaacacgcataatagttattttacttttctaaactgaagttgaatgccctattttcctctaaacctaaatagcaaaatcagactattcattttcttctccaaatcaaaaattagggctagttcttgcaatgtttgaccccgctcctcctcttccattaatagacgaggagtggtcctccctggacactgtcctcctccttctcctcttttaatcggccatgacatgtcttccttgactccttcctcctcctcctcctgtttgaaacccacacctctgtaagtgtttttctctctctattggttgatgatgatgcaaactgatttaaatgagaatcattgttatatgcttgagaatctttctttttcttttcaaatattcttataatattaaaaatattttattacgattatttgtttctactaatgatgagaattttatttttgtatagatatgttcattgatttgattttgagcctccatcttctacatgccatcacctccaaatgtcctaatattgcacaatatttgtttttattattattattattattattattattttctctaatgattttgtagttgtggttgtggtcatggttgtgttgatgatgatgttctttgtttgttgttggtgatagcaaattttaatggtggtcgttgaagtccttgaagatgtgattgattcttaatgagttttttttgatgttcatgagattttctagtctctatctttctggtgcatttatttgtagtttaatgtgataaactagttgctttatttaactacaaaattttgattggttgattattttatactacattatgattggaaaactcatattgaaaattagtttcatagttttttgttttgttttgtatcataagccttgttaaatgtataatttg

SEQ ID NO: 307755 - DNA, 2323 bp, Cannabis indica
ttgtagtgtaactactgtgatcaattttctactgaatacatcaataaagattgtcattttaatcagctaagttcttgttctttaattgtacagttgtttgatctttgatattgttctgctctgtgtgttttagttaattgaatgttcattaagtttgctcattgaattcttgtctttgcattctcttctctggtttgtgtaatgtttaatctcagttcttgcacaacaattttagttgtaatttaagttgttcctttaattgctatgtgggtttttatgaagatttttataaattaaaatgcaaaaatatatatatatattttaaaatgtaattaaaactagaaaaacccatatattttatttatttctcaaatgtataatattaattaaggtatacatatattcccatataaaaagaataattcaaatccgaaacaaataattaaatatacattttttattctttctttaattgtatattgtcaattattatttattttattttgttgggtacgtactcttgctataaattaattataaaattattatattttcgtaggatgttgttgggcgttttctgcagtggcagcagtggaaggaattacacaaatcaaaactggaaatttagtgtcactatcagaacaacaactagttgattgtgtaagtaaaaacgaaggttgcgggggtggatggatggagtatgcattcgaatacataattcaaaatcaaggcataaccactgaaacaaactacccttatcaaagcattgagggaacttgttacacaggaataacttcttatgcacagatcactggctatgaaaatgtacctaaaaacaatgaagatgctttgttgaaagctgtttctatgcagcctgtctctgttgggtttcaagttactcagagttttaaattttatgacccatcttctggtatctacacaggcgatgactgtgataatagcccaattattaatcatgctattacaattgtgggatatggggaagaagatggaatcaagtattggttggctaagaattcttggggatcaacttggggtgataatggctatgttaagatcttgagaggtggtcagtcacctcaaggtgtttgtcagatcaacaactatgcctcctatccaataattgcttaattatttatatatttatatagaatatgatcaagtactgttgtggagcaatatatatggaattttattatagtacgtactaattaattaagtttatccttttgtgttttttactatagtggaatcatgcatgaacgtactctacgttgtaatattaatttgcaatgttttgtatgattaattaatagagttaaaattttaaataaacataattaatgtttgtttcttttgttttaatttcgatatcaactcctatgtcttatataaatcttttaattgagataaagcaacatggccgatcgaaaagcgtgagaaggctacttaagtgtagggcgggctcgaaacgagttatttttgggctcttatttaaaaaaaaataatatagtattttttaaaattaataaaaaaaaatgtgtattaacaaaagtaaaaaaaaaattggcccatagactaaatgagcccaggcacaaacttaggaggaaattacatgatatacgtatactcactttactttatttattttaatttttaccttttttctatatcctttaatatatactcacttttatagataatgttcccattagacccttaggttaatgtaaattatatgctacatttcattagagagtgatggtatattgggcaattcactcaaaaaagtgagtatatattaataaaatataatatgaaaatatatttgattaatggatacagaaaagctgtatttttcaaattatccccaaacctaatctatctatacccaaaagtccaggcctgcttaagtgttggcatttaacgatcaaattaatgaaatacttagcgaaaaaatatctaacaagttagatttacttttgtaaatatatataaatttttaaaaaaaggaagaaattaaacttgaactctttccctattattctctttttgttatgacaaatttttgagatctcataccaagatctttctcaatatatagtttcacaactcaaagatgagtatagacacagccaaggccaaaaaaattgaggaaatcttggccaccacgacctaaaattatcctaaaaagagcaagttttgttaaggggagtgagttgtatgcactacaaatgtgacagtcagtagtcccgtgatccgtaaggagaaacaccgggtaagctgtgcaatcccacaccgc

SEQ ID NO: 307756 - DNA, 535 bp, Cannabis indica
gggctttgggaatgagcgtaacctgcccccaaaccgactatattgttggtcagtctctgaaagcagttgatgatgcatttttttgggccagaatgtggagggctttgggcgtgggcccaacctgccccaacccatgggccggctatgttgtgacttggtctatgaaagcagttgatgatgcatcttctagaatgtgtgatgctagagctgctattttttaagtacaatttgtacagataatgatatggtaacattttcaatcacatttattaagagtgagataatatgacttattataggtgattcttaatattaacatatcattattgtgtgcataagtattacgtctcaaggtcattactcttccagaaaacaattgatgaaaaactgttcataattttgtaatatatttttcttcaaaaaaatcaacatgtggtaatttcttaaaaaaaagtcttataaagtcaaaagtgaaaattacatgaaatatgagatttcatagaaaagttagaaaaatatggcatttataggtttg

SEQ ID NO: 307757 - DNA, 1817 bp, Cannabis indica
cctacacagtctcagaatcatcctacttgaccttccccaggcgatgtgggattgtatagcttacccggtatttctccttacggatcacgggactactgactgtcacacttgttgttgctgtcttatctctgagtggtcaagacattgtgctacaactcttgaatggtctaggtccatcccgttgtctctagcattacttcttgcagtgactccttgtctcttgaagaagtttaaaccttgcttatgtctcatgaaagttgtttgaaacataatagtaatatgatagattcttcatcaaagatgcaagaatatcttgcttttggatcaatattggccaattcttgcttttctctaccacttgctcgtggaaataccagtgattccacttcatgattctctggaagaggtggttctagaagttacataccacaataagctcgtttaatattttaactatgcctcaaatctggtcactctgcaactgtttgtcactaagggtttgacaaaaaaataagtcactttaaagccacgaattgcatcccctcgagcctatctcactgaattggataaggactttgatcctcaggtatatgccttttactatttttacctaattttggtgataataatgcttggtttgctgatacaagagctacttcttgtgtcactaattgccttaaaaacttagagcccacatagcttatactggatctgaaactcttacagttggtgatggtaagcagattcttataacacataggatctgcatctttaccatcctttacctcaaatacattgaaattaaactctgtccttcaagttctagctattaaaaagaatctagttagtgtctctaaactagcaaatgacaatgatgtatttcttaaatcacaagaattattattttgtgaaggacaagtaaactggagaagttctactcaaaggtctagttaaatatgggctctatgtgctaggtgaatctaataactctcccaacactttgtagtgtaatctcaccaccatctcctagtcaagtagatgtagcaattttcctagttaccaactgtttataataatctcactgatgattcagtgaacaaatgtatcacacatacatgtattaatgaagaaaataattttgtatattttctaaattgttctcctcatgtttttgttacaacaatgaatcaggacatcaatatctcacattataaactaggacatccaaaccctactactttatgcagagtattaacaactattcattattctggcacattaaaatacttccaattttgtgctactagtcaaaaatgaaagagtcacaagcaaccttatcctgtttctcctagtcatgcttcatagcccctagaattgatccatactaacttatgtggtccctctcatgtgtcatctaaggaagggttttaagtattatgttcattttagggatgatcattctagatacgcttggattttacccgtaactcttaaatctcaagcctttgaggtgtttattaagtataaaagcatggtttaaaaacaatttaatctaccaattaaatgtgttcagtctgattggggttgggagtataaaccttatgctagtgttgtcctcaaaagtgagtgttttaatatttatactcgcaagtgcacgaatcgtttcggaatatagtgttcatgtaagtgcaaggtcgaacccatgggagttgactaacatcaaaagaaactatttcaaacaaaataagaatattctaacctagctccaaatatttgatgggattttagttttgcaaaataaaataaaagacaagtaa

SEQ ID NO: 307758 - DNA, 1401 bp, Cannabis indica
aaattaaaaaaaaaataatatatggagtaattcctcaatattaaattataaatatttttacatttatttattttattattctaaataataaaataatgacaaattataattttttatagattaaaaaaaataatatatttcttgcataaaataacaattattatttattttttcatcaaattttgcaattattacaatataaataattgatgcaacaataaaattaatttttgtgcaaaaaatataccacaatttcaattactttttccttaagcattagacaaaacacatttggcaaacctaatttgaagatgatgattttaagattcaagaaactatgaaactcccaattttattattattattattattttcattaaacaagtaaaaatgaacacttttttgcatgtggaggttgacaaagtttacaactttatttgttaggagtggttggttcagaaagtgaattatataaacatttaaggatgtaaggcttagcaaacttcatattaaatatttcatgagtcctaagtggaattccattaccaaatataaaatatatgattattattaattatgtctcccaatacatacaataataataataattataataataaaataccattataatatgtgccaaaggatattgttagaaattagaaaaacaaaaagtaatcaaatcaaaggaaaagagagattggtcccccacaagtgcacccccaccaccatgttctaatttttcatacttttgtattgtaagattcacagcttaattaaaagacaattggatggttggattggaacattttggaaatttgcattggaccctacttttacttttttacaaaaatattatacatgtatagtataccactaaaaataaatatacccatatatctttttgtgttttaacgttcagataattttaatttttttttatatcaacgtacattataattatttaagataatttgtaatatttaaaaattttaaaataatttaatgtaccgaattttttaaaacttatgtattataaattatttaaaatttcttaacgtagaattttttaaataactacaatataaatcattatagaagaaaaatgtattaatatcacaactacttaaatataaaaaaaaatgaagggaatgcaccctaaacttataggacaacacatattcacatggacgaaattacccttctcatgtgattatcctcctcttaacttggattttggttatagaatattatctttatataaatacacataaatttacataataatattttcctattgatgattaaaaaaaagctaattagaaattttgacatgtactaaatcatgtcctctgaacttttaaggttgttgaaaatacctcctgaactattgagattgtt

SEQ ID NO: 307759 - DNA, 2171 bp, Cannabis indica
ccacaaggccttccaaactggtttctccttaagaatctatccttttgagataaccagtaagctcccttgaccgagaaagttcctttcgatcccatcttccagaaaagtatgtctatatctccctcaagaggcatgatggccgtaatagcatttgtcacttccacttcaaagcatctattaattagttgaacgttctagctgcaggtaccatgtacaaaaagatctgctaccttcgtaaacgcatgcgtagtgttgtaggaaaaactcctttggatttcggttggagtaaagccaggcacccaaggtgtagtccagatgtcaatatctcccttacctaccaaatacccagcacctgccatagctatacttcgcgcttcaagaattccactccatatagccgaatcttcaggcttatgttcaatattctagaaatccaatctgttgcagtatctagctctcagtatctgaatccatggtctatgactctaatcgagaactagccaagctagtttggccaataaagccatattcatgtcacagaatcgtcgtaagcctaacccacgattacgtttgggttggaaaatctcaaaccaactttttgtggccatgtagcggttgcttgtgccattttccttgcatccattccacccaaatcatgccaccaaactgtccaactcattacagattgttttaggaagcttgtgagtatacatagtataatagggtatactatgcaaaactaagtgaacaagagttaaacgacctgcctgggacagtagcattggcttccattcctcatatttgttcaagatttttgtctaacataggagaagtcttgccgcttctttgctgaactaagaatggatttcccaaaaatttctcttgtctacttaaagtgtgcattcccatgatgttcatcagatcctcctttgtctcattggtgaccttgggagaaaacaattccactctttcctttgtttattttctgtcctggccatccttcatatttgtcaaagcaagatagcaaagttgtagcctctttgttgtttgctttacagaagaagatggcgtcatccgcataaaaaagatgtgaaatggggagagcatttcttcctattttaatccctgttatctcaccccgagcctccgccttgcacactagttttgaaagtacctcactacaaaggatgaacaaatatggcgagagagggtcgccttgccttaggtcttgctcaggataaaaggcttgtaaagggggcccattgagcagcacaaaaaatctaaccgaagtcacacggtgcattatgagagtacatacatgtgcactgaatccattagcttccaaaacccgtctaaggaacccccattccactctgtcatatgctttgtgcatatccgtcttcaccgccatgaatccagactttcctttgattttattcagacagtgtagaacttcagccgccatcaccaaacactcagcgatccatcttcccttaaggaaagcagattgaaaaggggatattaatctgtccagaacaagctttagtctatccgtcaaaattcgtgcaattattttgtacccaaaattgcataagcttatcggtcggaattgatcaaagctagcagggctttcacacagataaaggtatggtttaactccttagcaaacgaacccgaagcaacaaaatctactaccatgttgcatacatcagcttcaactgtactccagtatttttgaaagaaaacaccagggtacccgtcaggtcccagagcctttagggggtaaagactccaaactgcctccttgatttcctgcgctgtggggattctactgatctcatagttctcatgatctagcacctgtttttcgaaaaggctcttgaattcagcatcctgaacaggttttgaactttgaaaaagattcttgaaatgttcctcaaaatattgtccaattccattcctgtttcttctccaatttccactttcatcaaggattgcccaaacatgatttcttcttctcctgacaattgttgatgtatggaaaaattctgagttacagtcaccttgagaaatccacaactcacaagacatatacttccaaattcgctccattttcagttccacatccaagatctcgagttgcagttgttggaatttattttaccaggatc

SEQ ID NO: 307760 - DNA, 1133 bp, Cannabis indica
aggttgacggtagtactcctcaaagagaattaatattatacaataacttcttacaaaatcatcccataaacatgctgaaattaataaaaataactcaactaagaaatcataacacaacaaaaaaaattgatcgtataataatgtagtatgcataatagactaaaaaataagattggagaaaaatatagagtttgataataagctttaacttacataatgaagaggaagctttagcacattatttttttaaaaaatgattcttcaattatataagtgcagatatattatcacataataattttgagccttaaatattaaaattaatgaattattactattatgaataacctttaagatttttaattgaaaacacatgtatatcaatgtataattcttggaatgaaaattttgaatcaaaacaaaaatcacagaaaaagtaggtagaaaagattgaaaagtacgtaacttcatggttgtgatgattcttaaactttaaaaattatcatccaccatataagaattaagattaataaaattaatttttaattatatatattatatatgataaaaataaaaatttaggcggttgagaattatggggttccatctcaaatatctccctcaagatggtggctatttttgcttggatctcaggcgtctttgcaccatctcgtgcggctgggatatagctctgataccatgttgagaatcatggggttccatctcaaaatcaattggcaatgagtggagtagcccatgttcttatatatggctcaatacttttacatttaatccatgtaggacaatgttctccaatataggctacttcaaaaaaaaaattatgttaaaaaaaaacaaaaaaaattaggttttaattttaacaatagaaattaaaaaataatgatatatgtatccaatctaataataccacagtagcaattctttcagattatggaaactaaaatcgaaaagatggtacacagaacttatgacttatggggagcttaggctgtttgccttctaaaaaattgaaaacagtttttaaaaaataataggggtcgtttggcaacattttttaaaaacagtttttaagttttaaaaaacttgaaaacagaaacatcaaaatgtgtttt

SEQ ID NO: 307761 - DNA, 1085 bp, Cannabis indica
tttagtgttgtggttggagtggtaagctttttgacagtaaatttaatgatagtgtaatactaaatttattgtgctctttaaaaatactctcaatttgtaggtctattggccttattattgtttacttacttttgatttatttttacttatggttaagctttgtaatgaactttattcttcaattttttaatttttttttgttaaatgaaaattaattttttttaaaaaaaaataaaaactgaaaataataaaggaaaatataatgaagaaaatatggagagaaaaatgaatggataagcattacacaaggcgattccaactattaattagcctagggttgtccactctcaccttggcaactacctagaatttgcctaatattaagtagaattattaagaagttgataaaagaataaactgaatttagatgagaaagataataaataaataaataaaagggacaataagagtaggaggaggtggggaccaatccaatggccattatttgatctgaaaaagggaaacaagataagctaaacgtggatatttctggtcattgtctacgccacctcatcacgaacgtgtcaaagcgcgttgctgtccccaacgccgccggtaaaggactttttcgtctttttcacatttaaacctttttccggagcaacacctccgactattgtacacgtgtcctattcattttccaaataatatctcaatataaatatagttgtatctatttgcgggcgagttaagcacattatttgttttttgttttctctctctacaaactagaaactggataataccatcatcacccaccaacactccctagtcttcttcttatacttaaccttcacccgcttacgccttgttatcctgcgcaccctcctcccacccacccaactctgcgtatttttgtttccaaacgccttcctccgattgatgacagcagcccccctgatctggaagttgaagagaagacgacgaaggatcggagaagggtaggatcgtaattttgttttcttctctctctctctctctctatatctccctctacttaaaattactacggcgtccatggaggt

SEQ ID NO: 307762 - DNA, 1620 bp, Cannabis indica
tgacagctagaatcaaaacatggagttcaaggaacttatctctagcaggaagggccatacttgttaactcaatcctcatgtcaattcatttttactggagtcaagttatggttttactaaagaagacgattagagatattgaagctatttgccgagcttactgtggaaaggccatcatgtgtcccaaggctctggaccaattgcttgggatcatgtttgccaaccaaaagcaacaggagggatcagtttgaaaaagattgcaaaatggaacattgcagcgatgacaaaatatgtgtgggtaattgcgaataaggaagacaatttgtggattagatggattcactgtgtatatattaaaggtgaggaatggtggaactaccaagctccaccccaagcaagctggtattggaggaaattggttgttgttaaaaatcaagttaaagcttctatggacattcatcaatttgttttcgttcagtacaagatatctaatggctacaaggctctttgtcccccccaaaacaaaatgaattggagccatgaggtatggaatagacttaatatacctagacatagttttttcttatggattgttgtccaagataggcttagaactagggaaaggctgtataaactcaatatcattggagaagacttctgcttgttctgcaaagaccaaactgaatcttcagagcatctattcttctctttctccttctctaaactttgtctatctcaagtaaaagcttggcttggctggagggttgaaacaacagctttgaataggttgttaagatggttagaacgtgccaaaatcagcaggtttcacaaggtagtattggtcgctgctgtggttgccttggtatatcatttatggaagaaccgaaatgatattttgtggaactcaacaaagcaagcacaggaacaggtggttcatgttacaaaggaagatgtgaagagtagagtggtctgcaattggcctaaatatgtcaaaccggttgatggttgttggttttcaacattgtaagtcagtttttctttattaacaaagttagatgcatgattatacattgatttcattgtaccgatagaaaaatttcagatcttcaattgaagatactagtaggttgtaaattgatatttttggagtaatgaattttactgattgacaaaaaaaaattgtttattcaatactgagtgtgaaatacgatacacattattattttctcataacaattacatcactgcggttttattttctagtatataatatatcaataaataacacaaacacaataatttgctataaatagagtacagaaccatgtgacgatgaggagggcatcaaagctcacaactactaattaccactgatttacaaggcaccaatttaggcaccacgcatatatataagataacattcgatgcatatttacttaattttcgattgaactcttttcattattactctacttatatttaattttttaaattaaaattttgacagtaaaactttccaaactactaaaaaataaatttaaaatgacatccatttttcacaattaattatcagtataaattgtttatgtgtacacttttgtatatgtgtcacatttatat

SEQ ID NO: 307763 - DNA, 1789 bp, Cannabis indica
taggaaaaaaatgattatatgatcatgtactaaaaaaattatgagagcaaactgctgatcactttcctataactaataataaaaaatttgaacataacgagtggaattaattaattataagaaataaaaaagaaggaaaaattaatatatgagtttgatttttaagagaattaataaagtaatgatttcccttttttaaaattgtgctttttgacaggttattatgagacaatttccccctaccacctaatatagaccgactgatcatttttgtttgcagagcaagatgttggtcgtgtatcgcaatataataataattatttcttttccaaagaaaacgaattaaaaatatttatttatatatatatcatatcaaacattctttcataacaagtctaattcgaataaaattaatttaatttaattaattaattacagccctccgtttgtatatctgaaacaagtggctatggtgtttttgagggtcacttcagcagaagatgaagaaaaaagaaaagtgtgtatgggatgggaagatgagtagcggttggggacgatggtgagagacttctctacttgagaagagtgtagacgccctaccagaaaaataatctaagaggtgacaaaccaagattttaacgacaatgcacgattttctgtcagaccacaatattttcagatcagataatttccaaattaatatataaatatattatatttttatgtacttaactaattcccaacaaattacaggttgtagtttacattagacgaatctaaaaaattggagtgttaattataattttttaattaatttttatatttaaaattatttattgaaatattttatttttttaaaaaaaaaattgtaataatatttattataattacaatattatttctataaaattttaaaagaatttaaataatttatttataatattaaaaaataaaattcttcacattttaattttataacacaaaattaattaaaagattttaataaaaaataaataggatatggagacttcattcctcccgaaccaagcattgtaattggttaatttttgtatattaacttaaaaataaaacatgtgtttaaaatttcccaacataaataatttctcttaaatctaattaaaaaaaattaaatactaaaagttactatgatatctaagcatacccaagatattatatgctattagtttaaaaatcactaatcatttacgaaggcggctctcatgttgatcatagctactcataacaattttctaagtataaaatatatagtgataaattttagagaaaaaaaaataaagatgaccacaaataagacaatttaattttacaaagtaaattaattagggaagaataacgtaaatatcctttggacaaaatcattagaagaaaccctaattaaccggcagatagagttttttttattttatttcctaccaaaaaaaaaagaaaagaaaaagaaataattaatgaaaaattaagaaggggtagtattattaatccaaaaatgtggagacaaggctagaagtctaaagtaaggtacctatattaacatcacgaaatactctgttcctactgtcatcaccaaagcgtggcattatcactatgcatctcgagtctttctctatctattatttctcttaattgaatagagaaatggtaaaggcaggccggccctaggcataggcgggctaggcccgcgcctagggcccacaccttctgggggcccgaaataaaaaaataaaaattttatttaggcttttatttaagt

SEQ ID NO: 307764 - DNA, 1016 bp, Cannabis indica
attgcattattttaaaacttattagttgcagacttgtctgcacatattcggggctttgtgcacagtggggtcgacactactagtagattaatttttggaatctgtttagttccaggaaaaaaggaaagctagaaggagagaacgagtgagaacagcatcaaatgaacgtccttctccttccatcaccgatgaagaacctaaaaatgcttaccaaatgccattttcggattccgattctgagtagtagatgctcctcacttttctagagatgatatacttaaccaatagctgaagttgtgttcatttttaacacttcctacatgttttatgctttaaaaaatttacaattacagttctttaaagtttctagcttcttgtaaatggagatacctgcttattttcctaaccgagtgactcggtacataatcctccatcaatacaagaagttaaagtagtttagttaaaacacaaatcggcactcaataaacactgaatttgacatacaaatattacaaaaatttcagttggcagtaaattttggaagaacagttattaaagacacaatatgtacttgatccacctaataaggtaagggcaatcctgccctaacaagcagttttgtagattgagttagttagaggtggtccaattttgtaatgttgagtgcctctaatatcgatttgtttgcagctgtttggcatagttcatgttgtgcgggatggagtatattaaaatatactcgatccacctaataggtgagggtgattctttcctaacaagcggatccaaattctctatctcatccagttacaactaatcgattcaagagaattggatattaaattataattaaattggatgtaaattttaaatatctaattagatatcggttattgaatgagatatttaaatgtctttaaaatttgtttatttattttattttaaaattattaattaattgtattatgcgccatgagattacataaaactaaatataaaatttcacaaaacacata

SEQ ID NO: 307765 - DNA, 1039 bp, Cannabis indica
ggcataaaacccaacaataggttagttctgttagagtgagagttgttagttagttactttagtgtacttttgtaattaattagttagtttctgtcttagtttataaatagtccatacacattgtaattcattcattctagataaatgaaaatcactcatctttttcaacttctacttctctatagcataaatggtatcaaattcatgtgaatcgtgagctctttttcttattattcttcctcatcgaggttcattgattgtttgtatcaatggcttgtagaagagttaatactcaaagccagaccgcactaagaaacacgtttgaagattctaatcctttctctattttcaaactgagttctcaatctcatgattcaagttaagatccttattaattttccaatagcgatcattctagtgcaaatcttgttcccaatatccttatgggaggcgacaactacgattcttcgaggagagcaatgatggtggttttgcttgctcaaaacaagatgcaatttataaatgggaaattgaagcacaacctgatgaagatcatgaggactatgatgtttggaattgatgcaataacttggaggtttcatggctacttcatgtcgtaataagagacaaagttgatagtgtcatgtacatgaagattgcatcagatattagggatgaccttctagaaaggtttcatcaaagaaatgtttcaagaatatttcaagctaaaagatctatgcaaatgttgaatcagggtgcattagatgtcacaacatactttactcgaaagaaaacattgggaaatgattaaagagtatagactactacctgtatgtaaatatggtactatgaaggttgctatccgcatttttgaacaagcgacatgtgtgcgtttaatgtctgtagaacaatttacgggcatattttctcatggcccaaatgaaaagcggttaggccaataacagaaggttcatatcggttaagattgaccagagtaaacccaaattgacgaatcaggagagcagaccagaccgaagta

SEQ ID NO: 307766 - DNA, 1765 bp, Cannabis indica
gagagagagagagactccaatatcatagtgagtgtgtatagaaggatgtaattggagtatcactcttgaagtgatttccctcaatgtgagacatttatttgtaattatttatcgtgttgacttttattctcggacatactcaattgtgtactactgactattcaatcaataaagatccatgattcatttattctcgagctaagtgtttctcgtctaatttcaattaaattataattttgattttgtgattgattttagttttgtttgtacattcttaaattttgttactattgtaacaatctatttggaaggtgagcatttacacagtaagattattttttaattttttgaacaagtatgtaagatattctttagtaagacctacattgttagaatatgatgtttgttagtcatatattaatctaattttgctaggtgattataactttttctttggaagtttaactttataaagtaaaattaaaaaaattattaatctagtagtgttattttatagggtataataaataaaataggtaggggaataaattggtgtgcttggtttgattatgacacttccaaactttttaatttaatatatttttatatataatttatcttcttcttttggagtttgactgcttttgtatactattgttttatgtttaccacatgtatgtaatgccctatatattttgtaagtgtgttaaaattattatgttatcttgtcactttatcaactttatttatatattaatttattattaagaaaataatataaaaacagatttatttgtcttctttttctcctaatggatgaaagtaatttgagctattctattctatgacatatgagttctacaaatgaatttttttatctactattagaataatacctaaaatgttttttttatttgaaaagggaaactaaattgttttatcttttattaaatttatttttagatgatcaaattctccacttatatttcaagttataaataaaattcccactcataacaagaaaaaagaagaagaagattctattagaaaatttgcatcatatatataagaaatcataatattgaaaggaaaaaaaacatgttgacaatggataatggattagaaaattgaaggcattgacttcactaatttatatttaattttccaacattttggctgcaaaatgaagattttatatggataagattcttacaaaactatgtacaaatgaatataattctaacatagaaaataaaataaaataatatttaagaaaatggattaattaagttaagcttttctactttttgaaaaatgacatgtttacacatctatagaataaaacattttaactcttctcattgaggtaatattgcacctttgcaacattgactcttagaaattgatatagcaatggccactaaattaaaatactccaactacacaattatccaaaatgatatatatttatatatatattttttaaaataaatttttttaaataacctccaagtattttgtttaataaaatgtgtcctatgatgttattttagcaattcatagctactaaatggtatggcaatcccataaatttattgaatgctcaaactttttcttgcttaggcccacttgtctaaacaagcctgtatgtaggcccctaatgttttaaagaagggaaacttacaaaaaatattgaaatttgggttaatttttacaaaaatactgtcttatgaatttttttttcaaaaatattatatttttataa

SEQ ID NO: 307767 - DNA, 2315 bp, Cannabis indica
aaaaaaaaaaaaaaatcaattgtgaagaaatatagatgtgatcacttagttcaacatgtttatatatgaaatttgtatgggatggctttggctcaaattatttggtactctattgtaagagttgaaaatgtgataacaaaccttgagaatctccaatgagaaaaacaatggcacaaattaaaataactctgtgaaaagttttaaaccgtagtaatgatgacagagatatcattttaaaaactctaattgttgttcttattttttttcttaacaagaaaatattttctaacaattaacttaaccgatgtgtatatataaatataaatatagtaaagcaagcacatcgaatcctatctaatatcaatggctataattagcagaaaagtaagtagttattaacaagaacaaaagaacaactaatttatttatatttagtagtaaaacttgttttaaaaaactgtacagtcaatgttagttaaataaacataaatttatatttatatattaaaattgaaacttaattgttgggatttcttgtaaaagaaaatcccttgaaaaaattagagtaagttgctctatgtggaaagcacacggtattctttagtaaaaggcgaaagaatagttcgctttgtgcttatcacgcgactgcttggttttattgaggtatcacatttgtgtatttatactcacgttcttgttttttctatgtgttttggccaatgtgggacaattttaagccattgagttctgccaaatgagttgggagtaaagtaattcagaaaggaagaaaagaatagtgttttttttttttttttgagaaatggttgtttttttggttaactaataacataatacccctatgcaactttgcttatcatctctggagggccctccccttgggggtgttcccgattcatgattcgggaggacgggtctgggattgggttaaatttctttgaaatttgaagcagaatggggtggacacggacaagttatttctttatgcctcaataatcgtggacactatatggaaagctcgtaatgacaaggtacataatttacaaccttgcaacttggccacgtgtattgactctatttcttactgttatacagattatgccttctgcttattccctccaacggttcatgtggctcatccggtctgaacacctccgcctgaggactggatcaaaatcaactgtgatgtcaaggttgggggcgaatccatgtgtgcggctgctctggccagagaccatacaggtgctgttctttgggctgttgtgaccatggtcagcttcagtgactcgttgattggtgaggcagctgcttgtcggcttgctcttgaatcggctgggatcaagaatcacaactatgttttggtggagagcgactcggatctggttatcaaggcactcaaaggaattcactctatttggaatattgataactatgtttgctcttgtaataagctttttagaaactttttatcttgtaatttttcgtttattcctcgtttgtgtaactttgcggcccataatgtggctaaatgagcgttcgcccagaacttaacaggcattgtggatccgtctgccattcctgcagaactcctttgtaatgaccatgaggtctaattttcccttttatttaatcactcgtattttcaaaaaaaaaataacataacacccctttgaattgtatctgctattttttttaggtgtaagtacgactattttgagacaatacatatcatagaccattctgttatttttgtttgagaaatgaatggaattatgaggtcatgtgattgtagcattagcatccatagctattgtaatttgtagtatacatgagcaaccatttacagtgtagaatttcaattcaatcaagatgatgatattaatttagaaaagaatcatgctgtttcagcagcaatctatttgtaggcttactaggctccaaccattcttatggtggcacgtcgggatgtcaataataatgatctatagaatgccaaaatcggaggggtcaatactcaatagtttatggggtaagcttatattactatatttttgtatagttattttatttaacaataagatttaaacgaagaaatacaacaaaacggagtgatttccatccaaaagctcttattgggtagctaaagtgcatagaaccatcaagagaaaagcaaatttacttttaaatcgacatgatatcgacaagctgtcgacaacatgtcgataatggtcatccctgacctttcttagcaggatatcgacatatcatcgatattctatcgataaactatcgataac

SEQ ID NO: 307768 - DNA, 681 bp, Cannabis indica
ctttacaattgaatctactgtaaaacacttagcattccacaagattttattcctatttaaccatattctgtatgctgcacaagcaaccatcaacaacatgcacctgctcttggaaagtttaccacgagaaagccatcttactatagctttgatatctgttgcctttgttttctactccaaccaaactttgatttcaatcagacatttcatactaaattgacaatcaaagaaaacatattcaatggtttcattatagttagcacatatacctcacattttgtatcagctactatattgaatctgctcaatcttatttttgtatgcagccactgaaaagttgccaatcacaaaataaaattgtgcttcggatcattcattcggttccacaccatattagcccaataaactttagtttgccttcctactagtagttggtagcattgtttaatgctatatgttttgttcatgagtagttggtaattaaaaacttttttaatttgttctttaacagccactatttgtttctaataccaactccactctccctcttttatgtatttaaaaagttttactgtacccttatgtattatctaaacaatatattttttttttctttctaactacgttatgattatcaaacctttcatctccttttctattcaatagtatcttaaaggagca

SEQ ID NO: 307769 - DNA, 795 bp, Cannabis indica
agtgtgttcagtaaattttatttaagttgagtctgggacaaggtttggcccaaagtcgaggttcgagttcgggtccttgaggcaatagtcagagctgagtttagggtctgggttcgagtctggatttagggtcgaaatccgagttcagctcagggttcgactttggagtctaggttgaggcggggggttcggtatggatctggatttgggaccggggtctggattttggtccaggtgttaaggtccaagttgggaacgaagtccaatattgattaaaaaaaaaaaaactgtttaaatttttttgaaagtgactgttattccaaatttcgtacagggtgacgtgacactcattagagtgacacactggagttcattttaagacctgaacgggtatactcgcataagattttgtccagaacggctcgagattaaatcgacaaagtttagttcttcaacaggtagtacccgaacatattctatgcctcttaatgttctgagctgaatacatgtgttaaacaaagcactgctatccgcacaaaaggatgcgacagctgaaataaacaacaaacttagttttagttggttgaagctttgaaatgtctgagaagagtttgaggccttgtaacatgtaatagatgctcttaaaattgcctttggagaataatagaacatcatctgtgtaacgtccccgcttcaagcctccattgggcacttacacccacggactaatggctcttattgtaatatccagtttaaaatagtatttaatttttcttttggatattaattgtgcga

SEQ ID NO: 307770 - DNA, 1280 bp, Cannabis indica
agtcccagccttggactgcagacctggcaccaaactccgactctgacccagacccaacaccggacccgatatgaactatgaatgatgcaatttcacgtggtgcactacaaagtagctcttttaaaattaatatttatcattttctcattgtaatatgcctttaaaaatcactctctagctaagagggtacttattttattcgtatggatttagttgtttaatattttaagctcctctttgtatcttatgactttatagactttgtgcattttaatggatatttctattttctttcaaaaaaataataattaatgatgtgtacttggtctaattaattagcctgaagtagtgatggtgcatattatggattatactgaaaataatactgttatgggttaagtatcactcaagatgtaactaagcattatatccttcataatcgttagtcacacagtaaaatcgtaagtcatgtagtttcctccgattctatcgtggctaattaatgctatcttaaagatcttcaagtatttcacgctagccttaaaacgtgcttgaacaattcaaaaaataaatacacatgttttgaataggcattcaaaattaacaacaagctatttacatctccgaatgtatgacaagttattcggaagactttacttacagaaagacaagcagctatccagaagaatcatccagactgaccacaactttacaagcaaaattttctgaatgaacaccaaattttctgtaattcctttcatgaactagctccctaaagaataccaaacttataaccataattaataataaaaaatatataatttaccaaaccgataaatagatatatttatataactgaaagtcgaagcagacaataattccatccttttcacactattataagtacgtggaccacttttaataaggtgacaaaatcatttcccaataatatatacttatcaataatggtcatcacaagtaattccaatcacatctaccaaaaaaaaaaaaaaaacaactaaagtcatcacacgccctttttcttttgacaaaaccttaccataaaggggaccacttcacttgactaattaatttaaatatataatatatatatatatatatatatatatatttcaatacaatcaataaaaaatatttatttattaatttattttaaaaaaatataaaaaaaaaatacacttatccttacaaaaaatcttatttttagtcctaataaattaaaactgaaaaaattataactaattatataaaatataatt

SEQ ID NO: 307771 - DNA, 1344 bp, Cannabis indica
aaaattgaagaaaaattacaattttacatacattaagtatttataccgctaataaatattgaatttataacgcttaaaaattttattagttatgccactatttatcttcattattattaatagatgaggatagagaaatactaaaaaaaaatactagtagtaatgtaattatatataaagatttggtataacaatttttataaaatattattaatctttaataactctagatcatggttgtactagccaatactagtatgtaatagcaaatacccataataataataatgaatataatctaagagtatatttggtttaatgtaacgaaaattataatgaaatcattattattattacacttaacattataatatatagtcattacaatatgtattgtaattcttattacattataaaacaaatataataaaaattacattgtagaaaatacctcttttgttatttttttacttttatttaaattttcaatattaaaattattaaaactaaaatatttgtatcaaaataccatttaatttattcaattaaaatgttcattacaaagtacaaccaaaaaaataataacataatccctataattcttattctcattacattacataaaatcaaaacaaacatatataatacagtgagcaacccaaacataccttaatttggtgagcaacccacaaccctatttttttttccaaaaaatatattacaatatattgtgtcatgtatcatgatataagatttgtttcaactttatttaccaaaacctgcaaagttaattcaaacaagtaggtgaggcctagtatagtatataggaaaatttgagtttcccaaaaggggtttgctttagccaacgtgttgtcgttttaacataataaagaacacaaaatgtgatgtcgtttaacattacaaagagaaagaaaaaaaagtactgcctatgaactgaaagggggttggggtagttattagggggctatgatatcttttactatttacagctcaattgtttaaaaagagtctcatctcatctatggagatctatcttagtatctagtagtaaaagttgactttatgataaaaggatattttgactttgtttattaacagttacgtctagctaggttattatttgtagctaactctgccaaaaaatctaatggaaatttcactttgtcctctcaaatacttaaacaatttattttattagatagatatggagtacttcttctttagccaatgaacaaataaatatatttactttaccctttggttttaaatcgtacaattaaacgaacaacttctatggtttactttttacttttttcttttttt

SEQ ID NO: 307772 - DNA, 1116 bp, Cannabis indica
ggactttttacctaacgaaatttgtccttattgatgcccatatttcttgtagtgtctcagcatgcaagtgttggacaacatctcatgacgctcatgacaatgacccatctcgcccgcgagtcttcacattcctcaataacacaaccatcacttagtgactttttttaagtgttgaaggagaagtcgttggagatataattaaaagaagaagacaagcacgtggccaagtacacaccagggtacgaccacaccacctataaggtcagaaaaaaaaagtagtggatgtacaaggggtacatgtagtggatgcgtgattcccaagttagtacagcctgacactcgaccgccactatctccattccactaccacctaccacctaatgccatcagaatagtatatgggccaataggaaccacttacaactcattttgtaaaccacgttaatagtgcctaactataaatactcctctactctattagagagaggattgaaaccttgtaactttgagagaccattttttgaataaaagacaattcataatttctttcttacccatgtctcatatatatttactagaataatacataactattttttcaatccaaaacacaaagtttccaaccataatatatataattgatgagttcttatcgtcaactaaaattataaataatttttcaaaaatgggtctactataactttatgtataaaaaaagttggattgtaatttttataaatgtcaaaaatataaatatttttatcgatagggacaaagtaagtagtgttacgtttgatgtaatgataatgataatagtaatagtaatgtaatagaataagaatgataacagaaattgattacaatatttggtttgtagttatagtgaacattgtaatcagaattattgtgtttagtttggtatgagaatgtaatagaataaagtttgtattgaccaaaataactctattacttttattttataattataaaatattttaaaaaaaagatgatatagacctttgactttttttagtatatttttattaaaatattactttttctttgtaatggaaattacattagttttggtatgtaattaaataaggtatcattttt

SEQ ID NO: 307773 - DNA, 3260 bp, Cannabis indica
gtaacaagaaaaaaaaaattaattatttttttattcaattttttttatgcattttaaattttattctattctattcctattcctattcccattctcattcttattcctatattttaattcctcccaaccaaacacttccttaaatacaaagtaatcgacgcctagcacatcatgaacaacaagactagcccatagataggttacgcgttatgtacagtcccccccattgagctcttagttaaggtgataagctagttttagtagtgtaatctctctagctatgagaggataatattgattaactcatatatataaaatatcttattctattttatgagttgattgaggggtaaataactaaagaactaagaaaaaaaaaggatttcaacatgaaactcatcaacattattaatctaataatctttcgaaattcatcatcttagacctttcaacctttgccttattgattcacttgttcctgaaagcttactataagttaaactcttctacaccactagtgatcccaaatactttgacttcttaaacttatcgaaaataaaaagactttttgtcaaagacactcaactatgttatatcaaaaaataatttatacgtaaatgatttgtacttataatggcgtatctttctttgtagctaaaatcaaatgtgagatgtatgagttcttccacaaaaaggaaaaaaggttcttcacaaaaaaagtgaagcttgaagttttatacttgtgtcacaaatcgagctaataagagacataaaataaaaaaaatgttgaattaatttcaaattttatattcttttatatcaactaaaaaaaaaaaatactttccaggcgtaattccccaaactcgccagcaaaagcaaaagcattgacatggggtattacaaaaatttaggtcatccatttgtaagtgcaaattttagctagtaaaagtttgctttattggctcgatagtggaatgtcgcctgtaaaacttggttggtaaatcgccaaaaagtgctattgttttggcgggtttaattacatcggtgctttatgcaccgataaaagtctaataaacaaggtgagaagtttttggcaaattactattttggcgagagcacttttgtcagtgtcgaaaaaagtttaaaaatgagccaaatgtgacgacttcacattggcgacttaattattcccagcactataagttgcgggtgtaggtcgctaatgccggggagattgaaaaagcgtaaacaaaaagtctttgccgactaaacaatgtagacagcttttgctggaagtaattgcaccgaggcattcaatgtatttttatcagcaaaaatttccgctggcaaatgtgcctttactattgtagtgtactttccaccataaacactaaatcaatcactatatacatatttactcaaaaaaaaaaaaaatcactatatttttaatgacctaaatttcatgtacactaacaaattatgcaaatgttaattaaataccttgtataacaaatacctacctattaacacctaaacatgtgcatgaaaataattagtcattattattattattattattattattattattactataagaattatgtaaatttaaaattataaataaacttctttatttaagggatagacaaagttgagaacaaagtaaaagaaacaaagcaaaaagattcaacatgaaactcatcagcattgtctcaagagaactaatcaaaccatcttcccaaactcaccatcttaagccttacaacctttgccttattgatcaacttgtgcctaaagtttattatccagtcaatatattttaccccattagtgaacccaaactctttgacctcacaaaaaccctaactagaatgaaaacatccttgtcagaaacactcaacttgtattatcccttctccggaagaacaaaaaataatctatatgtagatgattttcataagggtgttcctttctttgaaactaaagtcaaatgcgagatgtctgaattcatccaaaaagaaactgagtttcataataaattagtcccgattcaaccgtatgcaaaaacattgaataatgatgttgatcctcccattgcctttcaattaaacgtattcccttgtggtggaattgctctaggaatttctctcaaccataagattatggatggcgcaacattaagtaattttctcaaatcttgggctgctttttctacgggttcaactcataaggtaataaaccctaatctctttgatgcaagtactattctctttcctccaaaagaaactgattttatcaacaagtactcattaataatggatcgacggtttattaaagatgggtattatactagcaagaaatttgttttcaccaatgaaactatacaaacactaatagagatggtcaaaagtgaatgcatgccaaaacctactcgtaacactgcaatcacttgttttatattaaaacatatcatggcaactttttgggcaaagtcaccccatgatattgttacagctagacaagcggttaatattcgtcctagaatgaagtctcctcatcacaatggcgattcattagatggtgttgtgggaaacttagttggggaagttgcaacatttttcgatcctaataattttcaaaataatgttaagaataatggttatgacataaagctgagcgatttggcgagacaattgaaggaagccatgcaaggatttgaggatcattttctatgtcaagttaagaaaggtggggaagtggcttcatttgagattttgaaaagagtagagcacataagtcttttggataagttagaaaagcctaatcactcgattacatttaccaattggaaagggatttttaatgaggttgattttggttttgggaagccatttaacgtagggccaagcttaggaaaactcaatcacccatgttcaaattatgtggtgctggttgatgctgatcgatggggtaaaggatctatagaagcctttattgcattagaagacaaatatatgacattgttagaaagtgatcacaactttttagcgtttacttctaagaactcttaattaatatttgttattataataaaagttatctatatatctatatctaaataatatgtactcaatacttataattagcgttttcctatacataaatatactagcaaaaagttacgtgcgaggcacgtatactaaattttatgctaatttttttttatgttattttaaagttatacaattaaaaattaa

SEQ ID NO: 307774 - DNA, 2433 bp, Cannabis indica
agcttaattttatcattaactatatcccaacccaagtcccattcgacacgtacgtaattgtgaacactgtggggtcaagcatttattttattttatatataatacagctatatatatcaggtaaattatcatgaataaacttttcttccattattacgtgaggtatttgattaaattatacatatcgattttaattatagtatattatagtaaatagttatttgggtacgcacacataataatgtcatggtcatcattattgaccataattcaggagataatataccaagaaaaaaaagtacagaaaatgtatatagcatgcatgatgaaattgatcatatatattaacattaattaaaactactaataattaatttataacttaattttctgtaatgaaaaaaaaaaaaatacaagttaggaaactatactttacaaccctagttaataaatataaatatactgaaatatatatatatatatatcgtatttctcgaaaaggaagtaatagataataataataatagaaaaaaaaggaaaaacaccaagtactgtctggtacttattacatatatgtatgttagacatattccatgtgacaagtatatatatatatatgtatattattatatagtggtatgattatatgggccaatattagtctacaaaaggaatatatatatataatatgtaaatttatttttgcttatttttcccctatgttttaacgcacatatatacatgctcaaagtcgatcttaaatattaattaattagtgtggtttattttattacatagaaatttttcacaaaatgatcgagaggacatttcaaatgctactatattaattgtcaaataatgcatatatataaattcaatgtaactcatcctgatcaataattaatttatatgttcttttgttttggtcatttgatgtataagacatcatgattgttgttttcattatttgggaacattatatcatatatatttttggatttatacgtactattaaataattaaaattattacgcaagaaatataatgctaattaagaatatttataagattatgatttcatttcaaaactaattatatatatatataggttcagtatagtgttaatttcttgtacgtacataaattataatttggttttcatgtagggtcacatcacattattattatttaaaaaaaaaggatcatcaatttaattttaatattatcagtttcagttttctaacgcatgtatttttatatataacaacaagaagcagacagtcaattgatatgtctactgtatacatataaatatatacatgatttaattaatgagaacatcagaattaattaattaattaatgttttgtaatatatattaataataattgattgaggttcatgaatatggttgatatactatatatataattaataattaattaacagatctcttctatatatataaaatatcataaatatatgaaactaataaactgatcgatctcaccaacaaccttagaagctaaaatcgtttaaagatcgatgacggactcacattttttcctgctaattaatttttaaattataagtaatatattattgatttgacttaattaaaaaattcatcaatataataaatgtatgtttaaagcatcgcgaaagtaacattatttgttatataatatttttcatatatatatatattgtgttgctgaaaccttactctaaactgatgttactgcttctgcaattataagtccaatttggtatatataaaagctcttaattaactaattgattaattaattaatataaataaaattgacctcgtgcaacgaattgtaaaggtcaagctagttaagttattttgtccattatttttttctttttaataaggcatatagttaaatatacttctgtgtattttaatgtatctatatatatgtttttatatttatatatatatatatcaacatgatcttatatttatatctatatatattgcaagtagacagtccgacaaatacaattagccttgtttgtagctaaagattcctaatataattcatgtatcacatctcaaatatatatttgtatctaataaccaaataagtaaaatcgcatttctatgtataaataaatatataatttttgtttttgatattaatatataatatggtttatatatatttatatgttattgataaaaaggttcctttttttaaaaaaaataaaaataaaaaggttaataatataatcaagaataagatcgatcctgcttccaatgaactagtgttgctatttatttgttgatttgggatattggcggctaaaccacctaaactttacggtttgtaacacttaaccaccaaaactgaatttttggcggctaaactacctaaactctggttccgttttgctctgcacacc

SEQ ID NO: 307775 - DNA, 740 bp, Cannabis indica
acaattttactaacgtaatgattatgtaccaattatagtgccctactaattttgatatgtatatcaaatcgtgcctcctagaattatagaaccaaatcgtgtctatgacttgaactttcatctacgttaaacttttattagtaaaattagaacgaaaatttttaaatttaataatttgagaggacatgattagtgagattcaaataatgaagtttgggccgaacgaaagtctatttttcaccaatttttttaatatacaataatatttaattcgttttttaaacttgtatataaattagtataattatacaataatagtgagtttgggttttattttttatctttaattttattattgggtttattataggcaataagcttttttttaatagctaaaatttaattatcctaactttatttatataacttatacatattaaaataaaaaatctaaaaacttaacaataaaatattctacttttgagtatgatttagtagatattaaaatcaagattaaaaatattaattatcaacccttattcattattattaaacacatcaatttcttttattgatttattaatttttgttgttgagaaaatatatcaaaatattattatttgaagcaaatttcttccattttgatacggacttgtagatatcagaatgaccattcaaacgtacggagccaaaaatcattaattattaattataccctatttagtatatatatatatata

SEQ ID NO: 307776 - DNA, 1310 bp, Cannabis indica
aaaacaatttttaaattatgaagtcaagcaacctcttggtgaatagatggctattctagaaattacagttactacaagaaaattattctagcgattgatcatataaaatcatgtttaatattacaacactccacccccggcctcccttaaacttgatttgtgactcaaagaataatttctaatataatgaacatttctctcttgagtagcttggtaaaagtgtttggtgcttgatttttagattttatacatacccactatcacttcttttcttcgaatgcattctcaaatgtgatgataacaattatcaatgtgcttgcttctgttatcaaccaaaatattttttccaagtggaaatgttgacttgttttcaacacaattctaataagctcctcttgtggtacatcaaaattcttcatcagcacattatttcttagccaaatagcatgacaaacacatgaagttttaggaatgtatacggttttccaagtcgataatgtaacgattaattgcttctttcacatccaagtaaagtttgtgtttcccacgaagaacacaaatgccttggtgctctttctatcattgaagtctccagtccaatcgctattactatatctaactatttaatcaaatattttttttgtagttagttaactttttattgcatataaattgattacatcaaaaaaaactaccaaataaaaggaaatttgtaatcgacctaacctaataattattcttgttgctaattctatctatgatatatcccaaaattatatgaaaaaattattttcctctagtaacagcataagaaattgatggcttgccactctccaaatatgctttgttccaaggtcacaagatatgatatataatagcattaacatcaacaatgatcacatttctttagaacttgctcattttctatttattaatccaaaccaacataccatgtagattctactaccttgttatgttctataaacacctaaaatcttctgaactacaactagaactgaaacgacaaaaagaagaacagatgctcatagctctcatcatgaactccacatatcagataattttttgctaacccaaaaactttctttggtgacgcagacaataatgtttgacacatgacataaaggatgatgtcatagagttgagtaaacacgactcataacagtcaacctagttggggaccctagccctatgaccaggttcactccgggatctccaggatagaagttcagaccttaataatatgaatccaacaaagtatatttcaatattttgtaccataaagacatgga

SEQ ID NO: 307777 - DNA, 2479 bp, Cannabis indica
cttatagctttaaagtgatatctcatggctataaatctttcacacaaacaaaaggatcaaatctcagcatctatggctttacccataacaagaggtggcaattgaacaaaaccctcttaagcattctttaattactaaataatcaactaaaatggcaatagaaatctcaagccaatccttttattaggaaagaacatgtacgactactccataataaaataaatgtaaatctcaaacctgtcccaggctatttattaaaggtcactagaatgtgttgcctgaagcttcaccaagggttgagcaccgcaaaagaaaccaccaatcacccaatgtcatcaagagaggtaaccaaaaatcctatatcacaaccactgattgggaaaatttacttgctctccgcatcatatatatccgttctgagattatctgtgaaggaaaaacaacatacataatacaacaacagaagcaggaaattgaaaggtgacaacaaacgaagttcaatgacagtgaataatgaaatatatttattcaccatttcaattaagcatatgcattatgtgttcctaaaacttaggtatggtaaataaatgaactcctaacataataatatgggtctaaggaaatttgacttgaaatgtttatggaccctgactgaaatctacaatgttggagaacaagaaaaccatcatttcattctcatctacagaaactagttcttaatcaatgacagaaaatgaaactataacaaaccctcatagtgtgcagccaacggccttaaaaaaatataatacatataagggatattgacagcaaaaccacatgaactatacgaattgtgacacttaatcccacaaattgatttttaggtggtaaaaccctccaaactctacttctgttttgctatttacacttccatccaaaagttctatgctctaatgatcttgtcattgtcactattcaaatgacaagatcattagagcaaagaagagtttatcataactttgggtgacaatacatgctgttggctaccctcttattcttattctgtatcataaacactccatcaaaagaacatgtttgactacaatctacaaaaacacctagtgaattagtaactctatacttcagaggttaacaattgttccaaattgccaagacacggatggacctgaactagctttaaaagaggtgaaatctaaaaaatctttcagcaaaacccaaccttaatccatcaccatactaatgtaggagcccattttcaatacaaggaatttaaaacccaatctcatttctctcttatggcactcgtaatacatctattataagtaagaaaataaatatattaaagagacagcaatccatagttctaccagtctaatgtacatcaaagaaaaaaacccgttattgacataatacaagctgttattgtgtgcaaaactcctaaaaatgggatcagcatatacatgagtttggctgtttctatctatatattcactaagtagaaataagggacaaatgatagaaatctcattgcaatcatacatccctaaccattattttttccacaattgcaagcctaacaaacataacatgaataacatacatgcattatctcttaagttttaaagaaacaatgctattaccataagattacccttaagagctcatgggattatttagaatattattcatatctataatcaaatgaaacgagccaaaacaacataaaaggatacaccaaataaaagccatgagcaaatgcaccagccaaaacagcaccaaacaaacgatcccttaatacaggattccttcgcagagagagccgaactgaaaattacccagaaaaccagaacatttcacgggacaaaacccggttaggaaaaacaataagcaacaatacaatcacacagtgaataaatctatctatctaatagagaaaacatgtgaaactcacttagaggaagaacaggggcatatataagagggaccaggaacttaattgggggtcctttcttttgcttccttactgcagcctctcttgtaagataataagggttaggcacaaagaacaacaaaagacaataaaataccttaaaattcacagaaagatagatgaactcactgtgcagaggaatcagatggagacgccatggaaagatctgggtccaatttgtgctcctcggttggaaagaaaatatgcacagcgtggggcgctcttactttcctaagcccaaacaggtgccaatttaattcttttaggcgtgtttggtagcttaattttatttatttatttattattatttgtaatttttaagaataaatatataagggaaatttgattttctatacttagaaaatcaaaaaatttgatttctaaaccaataatttaaaccctaaaaaactataccttttttttctaaaacccaaaaataacccaaactaaaactatactctctttctctctctatctagccggtcc

SEQ ID NO: 307778 - DNA, 1708 bp, Cannabis indica
aaacagcccaggttgaaaatatgcgttgggcctagtgtcatgtgtcaacctggacgctgggtccatttttaggccatctgaaagtttcggttggtccccaaaaatagttgaatcttaatctttgatgaaaaaatagagtatgctcgaaagaatttttgaaaaaactcatcagaaatgtcaacctaggcaatgggcccttgttttggcccccatgttggcctgtttctttcccgaaagcacttgttttcccgtatttgatgaagacaaagaagatgcgaaagtcagatttttcgatttgatgcttggaagtggcccaggttgacaaattgtcaacctgtgcccgggcaccgggtgcttagggtgctcaaaaataaaagttctccgaatctgatactaatgtctcaaatatgttcgtggtatggctagtttatgtcttaatgtaaagtttgactcatttgaattaagacggtaccgaaaacataaaccattgtcgggttgtgaacttgggcactaggtgaaaccctaggcacccaggttaaattattgaggtgctaattcgtgtatttttagctcccgggccctggacttggatgcattatgtcttcatggtatagaagcagtgacgaagccagaaatttgactgagtgaggaagccagaaatttgactgagtgagggcttgaataaatattaagtcaaaactaataaaaataactgataaatgtatgtttttaaatttttatctacaacaaaataaaataaaacattgtcaatagtattattttattttttaataaagtgttatttttttattatttgtattgggctacttttaaaatgggcttgattagaatgagggtaggctcatgaatcatgattaagatattgagtgagggcttttgtgaattgggctttaataaattgggtaaaatgaattactacatgtatatatctacatgtgaaaaatttgatgtatatatttgagtgagggcttaaacctacatataagcttaagtccccttgtccttgtatagaagactgaaagatcgtgaattaaaaataatttattgagatccaaacactcatcccagagttctcggagtcaaccaaggcacggagctagggcccctcccaggcctactgctatgagtcgggactacttaattctaagatgttatcttttttaccacatgtcgaacattaatgtctacatcaccaaaaaatattttcaaattaacaaacttgtatatacatataaatataaactaaaatttaacataatattatataaaaaaatataatctataatataatttaatataatacaatacaataaataaatacaatctaatatgacaagctgaatgaagtgaatctaatcattataatatattatgttagtacaatttaataatcacaaaaatatgtaggagatataaatgctttttggcacaagagagtgcctataataccaatgctcaaatataatcatggccttgtaaaattgttgtacttagaatatgtttgtatttgtttaccatctttatgaagaaggcatattttcttcttttatccaattgaaaacaacatagtagtactatactcaactatagctaatatatttactgggatatgattttgtcccgtgatgtacttttacggaatgtattccgcggtacattagatgtgtctcagggtacattaaatgag

SEQ ID NO: 307779 - DNA, 2388 bp, Cannabis indica
ggagcaggaggatacaagccataaatccagaaattatctacactagttaactagatgaggttcctctactcggccgggaagaaaggatgcgattctctctatcccttatctatattttgaggatggaacgcttgaagaatggaactcttttaacatcttaagcaatgtttgcatgttcatcaacccttggcatagatgagatgttggaatcatctaaccattagtggcccactttgttaaaatagaagtatccaaaccgatgttgctgcggagtagacttcagattaaaatagtaactgacttcataaggagtgggttggaggccagcctagctccttatagagaacgaacaacgctgaaaagtacctgataccttcaaaggtgatttgtgttggattgatcctgaaataagcagaaatatcacaaaagtacgaatgaagagggagtacggctccttgatcaatgtagtattctgaacacgccatctagttgagagccaacctatgaactagttaatccgggggaggtatcttaaaatagatatcccatattagcccagtggaaatccaaattttcccttgtgaacttgcatcaagaatttcatgcttaagcgattggtcaaagacatggtccaagccaagtactgaaggctcatcgagcctgtttagcagataaccatcatcatcatagcgacctaagggacaattggacaagatgacacaaggcttgcatcccttcctcctaactaaaacaacttcctcacaattggactcaggctcaggactttcattctcatggtcaattccagagctaatgtcagcatgtggcaaggcaaccctttctacaatcttagtgtgaccccgtacagctattctggctgtttgagggttgtgtggggtcgccctattgatcctctttttcgtatcaaccataactacaagggaatttaagagacctacacaactgtcacgtccccaaaccaacacctggcagtgtctgcatggaagaaataaggggaggtgagcaacttcacaaagctacaaatatattcaagtcaacgacacccaagggtatcttccaagtaaaccaaagggtacaaggtcaatcaacgaccaagtatcgtcttgggtacaatcaccaagacacacagtaagtcctaagttgcacaattaactataatggactcattaactagccttacacatagtttctaagagaaaccacgcataaggccacaattgtatatgcctccaatgctgcctaactgtggtctaaagagggagaaagctggctactcgcttggagccttggccttggccaggcaaggttccaggtcctaatggtcgaccagaccccaagacccagtttagaggctagctaggcaccctagttccaagtataggccagccaacctagggacacaatccccgtggccagccagaccccatgaaagccacccatggtcagctaggcttcaaacaaagcctccttggctggctagcatgagcatggatcaagacacataatttttgaagaactcaaacatgttctttgtgttcttcgtgactcaaagagccaagaataacaacaaaggccagattcagttctttttcatctagaaatcacacattgtatatcctaaggctatcatgcggatcaaagtaccgaatggactacaatataatgtaagaatcaaagcatgttcaaaacaagaaataatgttcatgcattcatggaaaaataaatcaaatcaattgaaagagcagtaatataaagcttacccacaacaagatttcgataaatcaaatcaattggatcgttgaaatagcgtgaaaatcgtaagaaaaatgaagcttcacggtttggccacctagagaggaggagctttttcaagagccaaatactaatgagagaaagtaaaagtgaaaatgaaaaaaggagttctccccaaaactcactcataaagtacacgtgggcccccctttttcccacttacttcaccaacacatcataaaggaacataaaacagttatttctctattgcaatgagatcaaacagtcaagactaaatgcttcaacacacacaccactttttattcagcaaaggtaactacagtcccaacaacaccgattaggggtgttcgcggtgcgggtggtgcagtttttgactattttttcaaaccaacccgcacatgaagtttttcaaattttccaaaccgcacccgcaccgcaaaattaaaaacccgcaaaaaccgcaccgcaaaaaataatgcggtgcagtgcggtttttgtggtttatgcggtttggactatcactaaataattaaactatcacaaatacaacaaactttgagaaaaacttgtcaaaataccataagacttgaaaat

SEQ ID NO: 307780 - DNA, 738 bp, Cannabis indica
aactaccttattcacaataatatgatcaacataagcaatatgttgtattgcttcattaactactccttcaagtgcttgattttatccaaataaaatccagcatgtttggaatcgacaaattaacaacaccatctaacttgacatcgttaaaaatcttatcttcagcataaaatatctgaatgatcgatgctggattagacaacaaccctgccattaatggaaacaattgaactgtataagccacaatagttgtataaaatagcaggattaaacaaaagcaatcaacaataatcactgtcaagagacatactttaaaatcaaattaagtatcctaatcatttagaaaatgaccaaattttctacttgtagtctcaatcacataatgatcaaatttctctttcttcctctcaccaattttgatatcatccttaaaagatcacccctcacagtgcagcaaaggtaaccgttattcaacgtaataatatcttcagccctagtagttcttgcagcgactaaggaaaccatcaatgtctatctcaccaaatttcgaaaccaatgaaattagtcacatttttcatggaaatgaaacacaattttataacataaacaacaacagggctgtaccataaacaacatagctatattttttaattctcttcacatttagacctaaggcaaatctatttaaacttttttggtagaaagactcttaacatgtcatatattgaaataaaaaaa

SEQ ID NO: 307781 - DNA, 4525 bp, Cannabis indica
ttttttatttttgttatttatttatttttgtacttttatttttcattattatatgaattcaagtttagtcacttttgttttccatgtgtcaaattcttatttagtgggatataacgtacaactaaaaagcaaaaagaaaagaaaaaccagtccatcaaattcacattcttctattggtttatgactcatcaaaagtattcaaatatttaattagcaaataacaataaaaataattgttgaattaatataatataggaatatatatatctataaatttgtgttagtttcaacaatatacacaatattgaattcaaaaaaaaaaaaaccaactatacacaatacacataagaatatgcagaatcttaagaaacaaccaagtactgtagaatacaaaccttttgctcacttttctatgaaataacttttttaaaaacgttaagtacaattgtgtaattcaaccatatcagattatatatatataaaaatatttgcacttatttttaaaaatattatcatcaatcaatttgttcttaaaagagaaagaagaagaaaaaaaaaccatcaatttgttcaacgtgtttgtccgtacaacaataattattggatatatttcaatcaaaagatttgaagtcctaaaagatgattattataatgtatttcttttttctttctaaattaagtggtacttgcatcatatatatatgtactgtagattaatatttatataatatatagaggcaaataagcaagcagtgcaagcttcgctggtggcatggtgaataataaatgtatatgattgttggcaccttcgagttaaagatggtgccaaggcatggtccattataatttgtccaacactaactaatagtaataataataattggaggactatttgacttatttttgaattaataatataagattaaagattagacatcaaatcactatatttgtattctcttcatatgctattgtaattcggtgaagcacatatacacagatgtgactcatgtgttcggatcttattaccataaacaattgcaaaagataatattaggcataatatatgtaaatctataatctatatataacctaaataaaaatgatgacaatattttgggcttataccctatattatatatatatagcttaatattcaaaccgattacgtccaaattataatattttagttttgtttttctttttcactgaattacacatatacactcataaataagtataatatgaatatagttgaggttttatgtagtatttatttttttccataatttttaaatattaattgtagagggtaaaatctataacgatcagaatagaaggatcgtggacactaacaaaattgtagaaccaaaggaaaaaagaacgaaagccttacaatactggggtggtgccagcataaggttcttcaacgatcaaatcagtaaataatttgaataaagaataatagaatgttaataaagaagatagaaaataaatatttccactctactagtgatagaaaaggacaaataataataataataataatgtattgcgtgaatgcatgagtaagagtttggtaagtgaagatgcaatgatccttcaaggctcctagatcctcctcttatagagcttctgattgtaaaccttttgggtttgtgccctaaataaaattcatttcaatataattagatttactaattaataaaagatcagaaataattttatgttgcatagttcacttgatttatttcatgattatatgattgatgtataaattctatcaagtccagaatatatatttattcatgtttatagtgttgtcaacactagtggaatataatcatgattatatgttcaaaagtttaactcccatgatttgtcagtatactggatttagagtgacatgataatcaacgataatgtatacttacaccttggataagtgttatgtcatttccagggttgacaaagtatgcgagtatcggatgtacggagtatacatcagattggaccaatatttaatttggataagatatcataaaacttaccattatatctttctaagtaaatatcattggttgatcttaggtctataaatattaaatctgagatggttaggttcgatctcaactgtattaattttgttcttaaagttattcgttaaagtctagtcgactaaacacttacatcttgggaacatgatagtccaattgagtggaagtgctaatcatagatatggaatctatagcttctacgagtatttagaagtgaaacgatgatttccatcgagcttggcttaattgagataaatgaataatatctcatttaagtaattatattagtttactgaaatatcatttataggtagctaagtgttttaaggataaaatacatggtagaatagtaaatttgtccttattcaatgtagatcatttatagaggatctttgactatatggatttaaacaatagataattcataatgtatctatatcttggtacatatagagcattctatataattagtagtgtaattccgaatctatagtggcgcaaagaggaattaataagttagagaatttacttgctaaattctagatctacttattggaagcttgattatataggcacatagtccccacactatttgagataataatgcttgcagtcagttaattggttttaattaatcaattataattctaaaattagactatgtcttattataaatttttactaagaaagggcttaattgtgaagaaaagaggttttcagatttatttgttaattaagagactttgttaagtctaattaataaataaaataactgtcaattttatttgataattattaaataaatagttttgacatttatagttttgacaattaaataaattattgaaataaagtggcaaaattgtaactagtgaggtccattaagtagtcggccactatagcttgattttggcccattatttaattcttttttaatccatataattaaatcataaaccctggttgaaatactaaaaaaggaacacgatgctctcattctcatccagctaacctacttcaaccaaactaaacctagttttcattctctgacaactagtagatgagagactccattctatagtaatttcgcacctcattcattgtttttcatcaattcgagccatagtgataaagtaccacgcccacacatagcaagtcaagtactcaatcatagtgcgaaagacggtggttaatcaaactcgacggagagaaggagatccaggcttagatattgttattaccctgcgacagaaaggaacaaaagttagagatcttagcagaaggattcatattattctgctagcatcaatgtaaggttttctaaattcgtatgtgtttaatttcatcgtattagagaattcacatttaggatattaattaaacatacatgttagtaaatttagttcctgataaaataagtttcaacaattggcctctgagccatggtaattatttactttcatgaaatattgatttaaaaggatgaactttgttgatttagatgtgttcatgttagtttatgtgtgatttgatgaatgtttgtgaattacgaaatttttccataaaaataatttattttcattctgaaaataatttattttgattccttatgaaaaattaagcaattttggtttttatggaactcaattctgaagaaatacgaagaatatatgttgatttgaaaatcggagtccattgggtgtcgcggtgctcatgcgcaccagaccctcgaacaagaagacccagcacgcgcgtgcctctgacatttcatgtgtgaaactcggtcctcactcgttcaggcacgagctgctcgcacgtagatgttacaagaggccgagaaagctcggccaggcacactgcaaaaaccccttccgcgcgcgtatagaggctgcatccagcctcaatcttggcagcaaagcacccaaaaattgttttttaggtgattttttcactaaaatttgattttttaatttcaaatcaataaatatcaataaaaaaattatttttaacatttaaacttaaatatcaaatttttaaattaaacccatggcatattaccaatgtggtttgatgagccactatcaacgagattgtccacaaccgaagatggaagtaccaaaaaatgagaaaaaacccactcaagctcaaatgtttgccattacctaggatgatgtagaggccattccatcaattgtaacaggttagcttatcattaataactctctttattttgtaaaacttgattatgaagctacacactcatgtgtggaggctagagtcattgataaattgggtaggtctatcactaaggctcgaattttgatagtgaagaagactaagaatgtcgaattagaagagaaaagaagaagaagaagtctcaaactcactagttgtcaaatataatgaaaactaggtcaaaagtcattagttggattatgagacctgtaacaccctaactaccttaggcg

SEQ ID NO: 307782 - DNA, 977 bp, Cannabis indica
ctctctctctctctctcatttgatcattaatttggtggctcaacttttaaagctccaacatagattctcttgccagtgaaaaacccatcacctctctcaagagatacatactagtactagattaattatacttttcacctttgacgatcaccatttatatagaaattaaatatttcattaaatatggtgaaagaaaatcgtaaatttattttattttattttacaaatcgtatagtgggttagtgcatattatttattcattttattttgcatgggagtttatagagagagaggactacttttgagtagtcatcatagttttaagctttttacgagtcatatattcccactcttattgtcatcattgcggcctagatggtggtggggtgggaagtgggctgctacatatatatatatgaactttcctttaatactactttttagtgtttagggctaaggaatgtctctttgctttaagctagctagtacctttttaaataatacatattatatatataaatcattaataatcttatttcattttattgtatcttgaaattgactacctttgtgttgtgtgtaaaacgaggaacattctggcctttaaaaccttcaagttgtcgtggattaaagtaaaactaattcaatttctataatttttcacttttctcatgatcaattaccactagtgacacgtacgagattacatatttttagaaagttacagcaatactgatatagctctattgtttttttctttttaatccacttattgtttttgtatttgcggtccacacacaaggatctgtgactgtttctgattcacaaaagaaaaaaaaagaagaggctttgtgactcactgtacgtacttaatcagatcaacaagaataaaaataaagtaaacctaagcaaaatgtatagactattttttagtaatcctgctgtgttttgatacaaacatcatgcgtagcactacg

SEQ ID NO: 307783 - DNA, 946 bp, Cannabis indica
tgtgactacttgaaggatgaaattgatactcagaagcttctagtagtgaaccatgttgcaagtcgccttatacacattttccctagtgtcaactaggctagtgtacttagataattttggttcatattctttgcttagttattttttgaagtttcaatccgatttcagttcttctcaccccttttgtttctggaatgattcgtgttctattcttgaacttctacttgttgcttcaactatttgggagcgatgctatatccaatttctgccactccatacccagaaaaatgagtttatgttggtgcagtcccagaagaagaaggtccatagacagccagagttactgggttcgaggaagcgtaatttctagaacatgtacttgtggggtgatacttggtgttgctgcggatggagttggagccggagggactcaaaaatcttgctgataagcatcttctagattgatgatcccttgtgccttggacatgaactcagacagagtttcatccctcttcctttacattttccccataacaaggagccaactatgagtcaagactgaagggctacaagtttcatgtcatcactaaccttcatttttgccactgcttccatcattctttggatgaagttcttctggctttcaccgtgttgttgcttgatgttgttgagtgacctaacttccaaggatgggtgttgtttcgatcaccaactcaaaatcatcacttgtcgagcaagcatccaatgtacctaaatttttagttaaaaccacttcatttggctcttgctcttcaattataggttcaatctcttctatgtattcaactaatggtgattctacgtacattattcaaacaactctcataatgtttgttatttgagtaattgtccttaaaccatctaaattatgcacccttaaatttgttgggctttatgccctaaataa

SEQ ID NO: 307784 - DNA, 1061 bp, Cannabis indica
atgagtcttctcttttttgcatactgtttgacaatgatttttacaaagaaaaccaatggaatacagtcatcaattctcttcttcttttgtcatgtcatttttctttttattttctttagttaataaaatctattaattaattaatttattaattgatttttgattttattattaattattaataattataaatttaaattataaaagtattaattatttactaaaattgctcatttaatggaaaaatgaaaatggatcgagctatttatctatctatatatattatttcctatatttatatacaatcttgatacaaaacaaagtgaagtggctatcatccctatcaattttttatttttctaaattgtagttttttctaatttttattccctttttattcaaaaaaaaaatactattttattaacttaaaattgtttaatgctaaattacttttattattaatttagtttaataactgaggaaaaagaaatgaccctataactatataagtcattaaagatacatataaaagactaatttttgaaaaggtaaacttcgaatttgattgtatctaatttaaattaaaaactatttgatacattaatattttcttaattttttttatttaatacgatttcttattttttaattatttaattttattattaatttagttttatatgaaaaaaaaataacaatcactattattgtatacacatgaaaagattaatattgattcagttacaagaatttagaaagattaatatttataactatattaaaaactaattaatatacattaattattaactactacaaagtattaattaaaaaatgagtgaaagttacatattttaattataattaatttaatgaatttatatgctataaatttggaaagtagaaaataaaccatcccttaaataaaactactaaaaaattttattttgctaattttatttttcattttgttttgatatatctattctatataaagtgtgcttatataaccgaatttttggtttatgagaaattcatgggtgactttttatttatattaa

SEQ ID NO: 307785 - DNA, 1836 bp, Cannabis indica
ggcataaaacccaacataaaggtcgtgaacgaccttcatatttcggatgaagcgggactgttaggactggcgtgcgctttcctcctccaactgctggttggcttgcagaaagccctcaatttaaaacttggcgtcagtaagctcaactcagagggtcattttgacagcacctaggtcaaggtttgtcacccgaaccctctccagctccgtcactagtgcgccaacctccacggtagccctttctactagtagggctgcttgtcaaacaataaggcaaagttagaaaggctgaattaccaagaacaggggacgaggaaaataaaagcaaatggaatgaaaagaaaaatatctcaaagtcttaccccgatggcctacctctttgcataatgggccagtgcgaaaagcatccgcgttgctgcaagatgcccaagtctccgtaggcaattctgaggcgctcgcagccacttggtccaagagctctgcaacaaaatgagtggctcttggcccaacctatagggcagccggttctttagggcttcaacctccacgatttgtcccaccggaggcactgcgtgcatgtcatctgccatctccggcatgtggacaaccgacatcactctgataagaaaatggtagaaatcatacctcccacataatgacactacactttgaaggctaatgaggtaatgcattaaagggctcgtcataaaaaccaagtgcgcaaaaaatttctcaaaagaagttactacaagcccttggaccatagtatgtcccgaaagcttgggggtaaatgttttctacatttttgccagcacgccacgtggaaattaattaaagagagatgagaaatcattaagctatccaagggcctcgctctgcgctcttcgaggataaaggccctaaccttgcagaacagacctccacgaaaaagaagtcttcccgaatgcaggccacgagagagatgtccgcgagctaatgactctctcccttctagaagacgggaccctttgcttccgcgaagaatatggaccttccatcaagatacattgatccaggggactcttttaacttgcaaaagtttggtttgcacatgccagactacgggcccatcgaccacacctttcctatgtacgatgtcagaggttgcctctcacgcgcacgctaccatgcagagcatgcgtgtccttgtgtactgtgcaaaacgatcccgactaagaataaggtaattcaaatgagaacgaacctggaatgacatgcgttcaaagcaccgccagtacaaccaatacaatctgacatcagtaaagaccgcatggaaaatatactacctaccaatccaacggtgggggttcatccttatgaagatccatccaagatggcccatgcgaggagatcggcctataaatacccccaaaggcacacgaggcaagggatttagaccctaatttttacttcttctcctttccttcctttggctcttcaccttgagaccgaagacgaattctctgtgaaaacatcactataaccctcttgttaacttcagaatattcctactaagcgtcctcttcttcgagaggcacatagtagtctgggagaaaagtctattctttttgtatttgtataaacgatcattggccaaagagcctaataaaatagactcgtggactaaggatatttaatacctgaatcacgtaaaaatctcttatttgttattgcattatttataccttcattactttcttaagctccatatattcgattgccaaaaaactggtaaacacctaaaatctcttttcttcacaattaagcccttgtgtagtaaaaattcataaataagac

SEQ ID NO: 307786 - DNA, 643 bp, Cannabis indica
gttttggagaactcaagacgagatacaatgatatatgaattgaagtgattaagttttaaagcaaaaaaaggggggaaaatcaaataaaagaatagtacatcggttgcaaaataatgtcaacggatcgtaacacatgaatatagtgatctttacttgccgtgtgtaatgacttacatacttatcaacaaccaactataaaatggaagttgggtaggtattcagcaagtcattaagatcaacatattatagtgaaatcacttacatgtttctaattttttttttacaaaatagatctaatcacacataatttctactagcatacatacatttatatattttgtagtaattcaattatggtttttatgaaaaagtagattattaaatctatgcagctagctatattactatttcttgtacttcgtaataatatgacaactccttaaatgtataccatatataggcttcatttgtcaaagcttttttaagttgttttttttgctttaaaatgaagaaagtctttttaaagatgtttggataatagatcaaaagtaacttctttttttttgttgttataaaatatatagaaaaaaaaaaaaaaacgaagagagaaagagaaaacagaatagagaatttctcagttgtt

SEQ ID NO: 307787 - DNA, 2392 bp, Cannabis indica
taaaaccaactttgtaaagtaaaaatgtagacataggcgtgtagaggtatttaggtaataaattgtgcaaaatagatttttcatgtaaaaatttctaaaattataccctatatgtagattaatatatatatatatatatatatatatatatatctaaatgtttagcaatttatttaaatcagtacgtacgtatatataatagctagtcgtttgatcatcaaattcatccaatcagagaagccaaagaaattatgttttttaacattgatttatctaaaactaaaattaaattatagtgataaatttgaatttaaataatatacttttataaaaaaaaaaatgataatgatttttcttttcttgtttttttttttcataaagtgatatttagcaacaaaaaaacttgtgttgtagtagtaactatactgatcaaaaataatcaggcagtgtttttttttttttctaagttcaattacatatctaagctcttaattataagattttatattaatgaaacactactcgtaatctatttataattaatatgataaatgacacgtgcatctatatcttactaacgcattttgccttgccatcgaagttattatccattagccatagttgaactagagacatcgatgagcttatttaattaattaattaactaattaaagatacattaataaaaatttaggcaactaatattctttgtttgatacttatcgtacacatatggtatcatttctttttgctttgtattcattaaaaaaattgatttgaaaacacaaataattaatatagtttgagatagtataatttcttaagtactcatacgaaactgatgctttttttttttatgttattcttctattgtttaacattattatttctgttttttttttcaatacaatttatttgtgatcattttattctaattgccctctattaatttgttgttgttcttattattaatttgtatgggaatatatatagcatgcatcatccaaaaattttatttaactaagcaaactagctctagattaggtagctagctagccattttaattagatatttgattaattattgtaaattttttcaatttcaacttttgcattattcctttaattaggtagattatccccaaagtatttatattatatattatgcccgaactaattaaaggaatcgacgtgacgttattcacactattccatcctctaaattattattgtatagaatatgaacattgcaatactaagtgcctagcactatgagatcatgttctataataattggttagcattccttttaatttttattgaagtaaaataagtaagactctaattatatactaatagtaatattacacattataaaagttttaaatactatgggtgtggttttacatttctcaattagacatatttagtatatcgatgtatatataattttttgctaataaggacgtaattacattaggtaaattaattagactataattatatattatctggggtaaataatagtacatatcccgcaaagaaagaaacaaccaatgaaagaatctcaaaaggaaaaaaagaaagttaaaaaaggagccaaattaattaagaagaaccttttctcatcaaaataaagtcacttgatcttagccaaaaggctagaccctacacgcacactacaatatttaggcaacaaagcactaatgtcaataccagctatttatataatacatgaatataatattaatagtacgtaataatatatatttcaagattttatatatatatatatatatatattaattgcatatcatactcgtacgtatagtatatacatatataatattaatcgacggctagtatagccatgaggcatatataaatatataatgatcactacaaaaaactctcacttttagtcacaataaaatttgtgactaaaagaaaaaaaattgtgactaaaagaaaaaaaattgtgactaattataaatcatgagtcctatgttgtgattaaaagatccgtggataaaagtattagttacaacaattacaatttgtcgtgacaaaatgtatttttagtcataatattagtacttgttgtgactaaaactaaattagtgacaagttgtaactaaatactatgttttagtcacaagccaagtaacattttgttgtgactaaaagtcacatttagttacaaaaaaattatattgtgactaaaaagttatcactaaaagtagcaattttttgtagtagatatctgttacacacaaattagaaaacaacttttgcttcgcttgcgattaattatattttatttaataataattaaagttataatattatcttaaattttaaattttaatattttttaatatttttttcaata

SEQ ID NO: 307788 - DNA, 938 bp, Cannabis indica
cactctcgtctggcgtgcccttcgaacagcgattctcctctcagtcgaaagactcgattacttcaaatcaagtctcagttatctacgattcaaaaaggttctctctccattgctgattattatgacaaagttaagcttcttgcagattctttgtcaactgcaggtcatccaatggaggaaagtgaccttattatgcatcttctaaatggattgggtcctgaatatgaccctgtggtggttcacgtcaccagtctcgtcgacaatctctcgttcgaatccattcaatcacttcttctcacccatgaaagtcgcctagaacgccattatactgctggagctcctccttccacaatgactgccaatctctccgtttcttcatcaagatttggttctggttcgtccaactatcgctcctccaactatggtggtcgcggatcaaaccctaattctcaatacagatcttctgggcgtggctatggatctggtggacgggggagtagtaactcgaggcctctctgtcaagtttgtcacaagcttgggcacacagcagcggtgtgccactatcgcttcgacaaaacctttgttccacccaaacatggagaaaatcaagcatttctaactgaaattgaagatgatgatcaccatcactactcatccaacacagttcctgatttcgctcatgatcaagattggtatgccgatacaggtgcgaacacacatgtggccacaggcatggaacacctcgaaatagagactccttatcatggccatgaatctttggcggttggcaatggtaagcatctccctatttctcatcttggcaccacttctttaccgtctcaatctcgtcctttaaagctcaattccattttcaaagtccctcacataaccaaaaatttagttagtgtctctaagctaaccaaagataatcatgtttt

SEQ ID NO: 307789 - DNA, 2408 bp, Cannabis indica
attaacaattttaaaaaaagagagatgcaaaggaaaaaaagagatgcttcactggctgaactgttttttccttctttctataatgtctttgcgtacttgaaaaagcaggttagagaaatagcagaataaaatcaactcttagcaatcacgtgttaaaagaaaattcacacctaagtcgagacacaacaccaaactttatttaattgagaatattacaagataactctacttaacttttttttttttaaaaaaaaaaaaaaaaaaaaaccaatcgtctattaataagagaaaaattagacctgacgatcattacaaataatgtcagccgggatagtagataccttcgccatacaaattaagttatgggccaaagcctaattagcgatattgtaagccgcaaaattacatagtctagaaataaaataaaaaataaaaaattacaacccataaacagcttagagagtttaatacattgattaacataactatctattcttcagtcgacagaagaaccattcaaagaattaataactatttcaaagtcgctctctatcataacaaaatgatgctgcaacaggttcgtcgtcttcaaggcaagtaagcaagcagtagcttcaccaataagggcatcagcaaagtcaagtagatcagtagcagtccacaccacagtgccccaacaatccctagccaaagccaccacacacatagactcactcccaactctaacatcacaattaatcttcagccagtcctccgggggaggagaccaagagagagtggctttagtcggcatcacagggaagaaacacgagttataatctgcataactaagtttaatagaatcaagataatgagtaatgttatatagattattattgtggaccttatcatttcgggcttgccaaatagtatcaaccactatagaggcgtaaagaaaaacatcctcgacattaatccccttagcttttatgccccaccgaaacttaatccaatcccaaacatgaccactagctttaggcaccggccagcacggagaagatctccacaggtgataggcaaagttgtaaaagagaaataagtgtttcgacgattcctcccccctcccacataaaggacaagaggagtcgttgatatgcattctcttggctaaaagagtacgaatagggagtgcatcagagagaatactccaccacataaccttgtggcgttccaacaccttactattccacaatctattccagagagaagaagccaccaccacagggggcaccctgttcatggcttggaccagataagcagacttgcaagaaaacttaccagaattatccttggtccaaatccaaccatcatttccctgtccactcggtctacccccttcaagatattacaaaccgtatcagagtcaaagagagagttgaatttagcaatgtcccaatcaccattgtgcaataataagtctgataccaaacggcaaccattcggttggttatgagttggttttgggataaactctcttccatgcttaatccaaggatcatcccatatccttctgtcctttccatcattaatactcttgcaagcacctttcattaacacatcttggattttgatgacgcttttccagaaccaggagtctgagtttttgtaggagcaatccaagaaatgcttgcccttcatatatttggcccgcaagacttggcagcaaagcgattggttctcattgatcagtcaccattcccatttaactagaaaagcctgattcatctccaaagttttcctgaaacccaagccacccctagatttgggtaagcacaatttgtcccaggccttaagacataagccacggttccctttttctccaccccaccaaaagtcatggatcaacccatccaccttggacgccattctttttgagagttttgtatattgcataatgtaggcagggagagcaaggccaaccgattttatcaaagtagcgcgacccgcttttgaaagggttttcactttccaaccttgtagctaagacatcaaattctccaaaataaaatggaaagcaacattcttctggcaggttctgaaaagagggaggtccaagtagttaatgttcccactcgttccctcaatccccagcagctccttgcaatgtcttctccttctactactggtgttattgctaaagaaaatggaggttttgagcttattcaccctttgaccagaccacttacagaacttttcaaggcaattccagtacccaatcagtaataagactaattgtcttatttctttacatttttatatttatttaagatgtaaagaaatgggtatatatatataataacccaagtgaaataccaaccacacatcttaatttggttaattaattatgttatatactaaagggtaaatac

SEQ ID NO: 307790 - DNA, 2883 bp, Cannabis indica
catttttcaactttctttttctactactacttcaagttcgaggcagttcaagcctatttgctttacaaaggtgttgttctttacatcatttcttctaattttatttaggtatttttatgataatttatgtacctttttttttggagataaatgtgaaacttatttactcccagttttacatgtttgaaattagataatgaatttatgtatttgtttgaggcaattaacataaaattgccgattttttttagaaaatagtagaacttattaactctcagttttggatgtttgaaattaaatgatgaatctatattagttatttgaggcaatatttaataatgcccgcaaactgtttagtgaaatgtgtgagatacaagtgttgattgatgatgtggtgattgtttcattatcttttctcaatactactcaataaagatgtacatgtgagtgaatgtattttgtgcatataggaaaattgagaagcaaagggctgaaaccatatacttgcaagtgggacatcactcattcagctaatgagttgcgataggcttatgaaaatttagaaaatggtgaaaaagaatagtgagatagacaatgtatcaatagctagaaaaattgtggctcgccaagcatttggaaaacttgcatttctcactccaagagatgattcttaaggtattcttaattatgttttctgtccttacagtggtttttccatctattttttagatctatataaaaaaaaaattagttataagttccctaaaaatgagcggtttagcttttaaaagcatgtatcttttatggacacttaatttaaaatatataagttagttaccgaattgtcattggtatttctttaggggttgagttttccaaagtttgtgcacctctgtttctttcaggaggggacactttggagattctacagctcttcgaaaagatggctgagatctactactaaccaagttatttatcgttgcttgtagctcattatagtaaagacaatgaagctcattttagctcacgtgtacttgcttcgttgtattcctctatttgttcataattttatgtggaatatctggtttagttagtggaaagatttattttgtgtttcaatgtgcttcttttttgtcccctaaatgaattgaacttcgtaagtttaatcagagttatatttataggcatttttttagccaaagtgattgtttgaatgcataatgattgaagacattggaaatatagtattagcttgagttaaaatgaacgcaactttctaagttttcttcacattttttgcctaaaatttgttttaacaatttgaatttgtgctgtttaggtcttttgagagtcaaaattgtggttcaagttgtcatctctctcccactctctcttaatgatttttttagtcttgtatttagggatgggatgtatgtttgtgtgcatggacgtttgaaaagcttccacggtaaaagaaccttaaatgaattctccataaggtaagtaattttttttccttatcattttaatatatcatattacttaaaaatatttatattttcctctgagttgtgcaaagtaataggatttatatggttcattatgcaataagttggggctaggcgatgtgtctagacatgtcagacactagtcaaatgtgcaatttctataaatgtatgtatatttaaataacatatatatttatttagatgtcatatccttttttccttttatcaattatcaatttttcatttatcttaaagtttatgagaatatttgtttccatgttcggattgcatgagttggactgctttgataaaatttatgttgtgtagtatcaatgtaaatatttgtggaatatcttgaaacattaaagtaaggcttgaagccactttggtggctctttttcttttgcattcattcatctatttcccctacggtaattctgttagtgtctgtttccttttatatttgattttatttatcattgtttttggtttttagtattttattagctttttaacactgtatttttatgttgttttcaggcccatagaggagaaaacgagattgcgtaccattattgagtgcatatatgttcgtttttacagcaagaaggtcagagcattggtctaagactctttttgatcgaaagttgaaacaaggctctgtgttgatgtttcatttcgatgtggacttctgctccagtttctgatgttgtctgtttgtaacaaaaagtacaagcacaaggtagttgtttcattttgatgtggaaagattggggctttatttagaattttattctttgatgttttttttttaagacgacaatcattgtatgcagaacgaagatgagtgcaaaatacaaacatttcactatttaaattgctgagttaatagaaggttaagataaaatttttgtttagtttttctagattattctatctttaagactttatttaataattcttaactctatattttattttttagattggtaatttttttaatttttaagaattaaataataaatgttctcaaactactatctcaccatttactttaataatttcatttatctaaacaacactatgttctaagatttctttacattaaagataaaggttagagtatgttagagtatgcatatattgagattaatgtattgtttattgttaataacaatacatgtaacatttgtttataaaactatgtacttaccaaacacaaggatctaacgtttgcctttattagtccaatcgttcatgtgatcaaggcactttacataatttttcttcatttacaattacattacaataatattctaaaaaaaaaaaactaaaaagaataatctaacattttaattaggggtgttcatccgat

SEQ ID NO: 307791 - DNA, 1821 bp, Cannabis indica
tcttgattttcttccattgttataaaatctctaacaaataatacaaccaagataatatttattgaaattatacgaagttgatatattaatatttattgaaattatacatctcataggcttgaactagccataaacttttgaatattgcttgaagtctgcagccagcattgatctcgacactttatttgctttgctgcaacattatggcccctaattactacacctgcactagccaacaaccaatcttgattgaaccaaatctaatcttaaataaccataggctgatttaacaccctaataaaggattgagtaatgaaggtattaggaaatgtaagaattgatctttttgaatatgtattatttgatacatgaatatatcttatcatacttgaagatgtttcaatgaattattacagggggaaagactcttataaaggagaaaaccataacaaaattgtgatgtgtacttcttataaacctaacagttctaattacaatttttttaaaggactttttcggtatttggtgttacagactaatacttatatattctgaagtcctcattttcatgaagtcaaaggagagagagagagaaatttagaaacacttttgagagatttgtatgggatgtgagagagagttgtaagtgttgagtgacagcacaagttcttgggtgtaaaagggttctatggctttccatctaagtcgtacatgttgtccaaatcgatctcagctgatctaagacaagtctgtaacaaattgttttgcttatagtggaatctcttggaggagctcagtaggcccaaacagtataaacttggttgtgttttgttcatttcttttatcttgtttttaatatttgttgtttattgctttttgatatagaatctaccaaaatttgtgttaggtgttatattatgttattttagagctttttctaagtgtttttatttagttttagttttaattagttctattttatgcttcagtttgttaatgtttacatgtttcgctaataaagaaaaatgatacaaaaataaagatttaattgtagttgtgtcgctagcatgccaaaagaagagtccttgactaattgagaagtgtcggtgaaatcagagcctttgaagttaaagaattgaagacgttgttgtagcatcatggcatgaaaattcaatgtcaggcctctcctgtggaaaaaataatggaaaacaaggttgagttttagaggcaataggcgacccttgacattgtgggatttatgtcgaggaattggaggagacaaacctcacagcctagaaaacagctaccctataaagaccgcttaattttattatagaaattagcagataattatggtttaatttagaataagattttcaattattatttatgaatttatggtgatagatttaaattttaggtgtatatttaagctatatatgaaatttcgcattttttatattttatgcccgacaatattggaacgcaacgtttggccgataggatcacattttcttatggtttagtattctagtaatagcaggataatatagataaacattgaggatgccaagaatattcgagatattagttttgaccaaattagccctaggtggtaaggatgcttttttggcttaggcaagggcaaaataatttttttttgccatttgagttatttgtcctttagtgatttttaattatgttagataatctcaattaagctaatatatgttagataattaataagatctattcttttattcaaagttagaaaatttgaaaaaaaaaaagtcacatttcttttcttttctctctctctct

SEQ ID NO: 307792 - DNA, 1435 bp, Cannabis indica
ttaaataaattaaataaaacttaatattaattgtaccagtaataatataatatttatgttgctagttattatctaaaaatcccccttaaataaagaaaatacatatatatatattatccaaaaaacttggaatataaaaaagttgcaaccaaattgagcttcttcagtagaatacttagagcttacaagtacatattgtacctactttttattctatttaactcaattataataatatataattatatttaaatgtctaattatattaaactaaaacaattatttttaattatattaaactaaaacaattattttaatagaatacatcgtaagattattttttggaataactttataaattactactattctactattaatatttggaaaaatctacgaattccgtatgggaataactgctccccctatgccttttggtttgtctcgtgatggtgcgagagtagtggctgacctctttgagcctactccctgtttgaagttggaactattagaaatattttaaaaagtgggaaactgtctgggatagggagagatagttgggtttggatcaaagaacctagtggctctttctctaccaggtcggcttatttgattgatctaagcctatcgtcggacacctcttatttcggtagctccttccttatggaacaaactttgaaattctcatatctatgaacgtcataaaattctttagtagtgtattctttcgaaagctctatccaccaaagctattgtgggtgttagagttcaatcagatgatcttgtttgtctccttagatgaaatgagacctttgaacaccttttcctgttttgcgacttggcgtgccacctttggagggcttccccttggggccttactcctattagagatgatactccacaatgttgggattgggtcaaattgctttgggaacttgacattatgggcattgattctaaggaagttttcttgtttgcctccattgtggtggacctgatttggaaagccagaaacgacaaagttcatcacaatgttttgcacccctttactcatcatattaatgccatttttgtttgcttttcagagtttgctccctccctcttgacgacctcactagcacgtgttcctgctggttggtcaactcctctagagaattggatcaaaatcaactgagatgtggcggttggcaaggactcgatggcggtggttccagttactagaaatcattttgggtttgtcatttggatcaactcttaggtgctaaacttttgtaatcctctattgggaagcggaaccatgtcgtcttgctctgatttcgacaagggtgttcgaacacaattttgttcttgttgagagttactcagagtgttatattatttataataatataatatatagattaaatatgtgtaataaactaataatatgtaacat

SEQ ID NO: 307793 - DNA, 1131 bp, Cannabis indica
atccatgttagaatttttttactaaaattagacaaaagtccttaaatttaataatcttaatagttcagggagaatttttaacggcaaaaaaagttcagggggcatgatttagtacatgtcaaagttcgaggggaaaaattgctaattagccttttttttttcttttttggtaaaagttgtgttacatatatccaatatataattaagaaatagtacaaaatatcctataatacattttggagatatatacacacattaaattaagacatacggtctagctaataatgcatacgtttatataatatatatataaattaatttaattaaatatagttaacatcaacgaaaaagctgaatgaagaaagagtgtaaaagtgataattatccttatatggttgagtggaatttcatgttgaatggcgcagtagctcaaagatctaaaaaaaaaaaaaaagtaaaccctatatataacttgatagttgaggatggtgatcataattcagggttcatgaccctgaaatcactatccacgaagatacggcctaggatttcatttctacacgtgtcagacaaacaacggttctgtaattaatataataaaataattttatataatattaattaattcatgaagacaatatacatccatgattaaaaatacaagaacttctttcacctgaaaatagtaagattaagcatgcatgattaattaaaacgatgcttaaaaaaatgacagctaactctaaaaacaaaagaatacatgaaatatgcttccagctagttatattcatcaattatacaccatcaatatgaatattatacgtatatatttgtatatgtatatatttaggaaaatgtacacatgtacacgcttaaatataaaacgatgaccatcttagttaaggtgcgtgtacagatattacactcttccatttaatatataataataattacaatgataagccatcttcttaatcatcaagttaagtatttatgtagatatttgctaattaagtgaaggacattaatacatatatatttatactaggtgaatgtacgtgccgagccacgtattgctagttttatttaagattttggtatttttaagattttgaatgtattttattttta

SEQ ID NO: 307794 - DNA, 813 bp, Cannabis indica
tatatatattatgatatttttaatatttttttttttaaaaaagacaaaaatgaattatactattaaaaatatataattaaaatacaaattaaaaatatagttaagtatatgtacacttaatattaatataatatatatgtctttgtatatataaatccgacttgaaaacaaacttaccttttaaacttgtcgtcaatttatataatcctacaaataatctaatgattctaaggagattatatagggaggagctatcaactccgagtatatatatctttatgcttattgtttactacatgaggacattaatagtgtaacacaccaagtggaagctgaagacagagtttgtccattgaatttgatttcaaaataatatgcatgtgcggaagtggcacatgattacaataaatgttaacattattatattaacatagatatttatagagatttataatataatataatatcactactaaaaaattggtttatcacaaagattttaaataattgggtaaagtattttttttgttggtttttataatcgttgcctattcgatcctcgcagaatgagaaaaactagcgacaattcaaaaccgtcgccattttctctttctcaaatgtttaaaactatcacctataataaggtatatacgcaacagtttataactgtgtctagctaatactatactcaatttcaattctattagcatcaactatcaagcatatataaaagtgtttacaaaataaaatacattctttaaattttaaaatctcaacttcaaatatcgtctagtattgcttcaaagaaagact

SEQ ID NO: 307795 - DNA, 1523 bp, Cannabis indica
aaccatgcaacattaaatgttattctgatctatattaataagtaaatctaattatgaaatgagttttattagggcataaaacccaacaatttctatcttaccatgaggaaggattgcactaagtacgtccgtaaatgtgagcaatgacagtgttattccaagagccccactcacaaagataaacctcatgaatagtctttggccctatgtcgtttaaggaatagacctagtgggatgacttccaactggaaaggggggaaccaaagtcgctgttgttgttgttgactacttcactaaatgggtggaagtttaacccatgaacgtagttacatcaaaaaaggccttgaacttcataccaaaaatatcgtgtgtagacacggaataacacacaaattaatgtatgataatggaaagcggtttgatagggattaattcactgacttttatgccaagcatggaatcataaaaagctttttggttgtggccagacctcaagcaaatagataagtggaagtcatcaaaaagaatctgaagactaccatgaaaaagaaggttcagcatcgcaaagcacactggttgaaagaactttgaagagttctttagccctataggactactaaaagaactttaacatgccacgctccgtactccatggactacacataggagagacacctacgacccaactcaaaaccatgctctacttcaagaatccttggatttgattaaggagcttcgagtttagtcacaggttcaactccaaatttaccaaaacaaaattgctataaatttaaattccaaagtcaaaagaagaagatttgaaatcgacgaccttgttttgagaaggtctgtatgaagttatagacaaaatcagtgatggaacttaccatttgaggagattagatggaataagaattccaagagcatagaaagctgaccacctgcgttgatactataagtagactaggggtggtcagcttccttttatttttcttaactttttattttaatgtttaattttcatgtacgccccaggggaggaattatcttaataaaagaagaatgttcattttatatttggtctttcaaacctttatcacataacaagttatcaaaagtctcaactcttggtcactagggaggtagcatacattatatcaatataaagtgtcatacccgaaattcggctggaggacacgtgttaagataaagggaatatgaatcggtgcaatatctttttatggaataactcattaattacataagtgtcagagtatatttgtaacccaccgattgtaaggtcttaagtgtggaatcaatgtagaaactggcacttagtgtattagcgagaaaccatatgtcgctaaaggtgaatagcgaggcaccggagaaaagtgacacattccttagcttggaataagcaaactaagtgtaaaagtcggatcagcttgaagaataagtatgcgagatgaccatctcactatgagaaggcttcctatggcttcatccaactaacaggagcg

SEQ ID NO: 307796 - DNA, 1066 bp, Cannabis indica
ggaatgatgcttagaaaaaagaaaaagaaattattattcaaaaaattgtttaaattggagtgaaattatatatagcataagaaacatataatgatgtgaaaataattatatatatcctagtggaatataccttattctatttctaaggaatcattatctaaaaaaaatgataaacttgcatctaaaaattcatagaatatttttgtgttctattttgctaatattatatactgagaatataatcaataatattgctgtttttttttaacctagcaaacaagtggactccacaaaatatgtcaattatttttgttaaaaaaaaaggattaaaatagaagtgagctagaatcacccaacatgtaaaagtaaaatagtaatattttttggtcccttcccacaaaatatgttcttaaagttaaagctatgattagttggtagagagagggaacaaagatattataaagattaaataaaagatgaaaaaaagatatatagtaataaagtaaatttgtttcaattaataatatgtaaaagcaatttaataattacattttcaaaagagaataatttgtggtataaatatttaagtttaatttttgacggtcaaaaattgacatgtggataatgacttgacacttaatgattgagtacttatagaaattttagaaatataacttaagtattattatcgttaaaaattaaatttaaatatttatctgcaaccgaaagttaaatttaaataattttttatcataaattattttaaagaagatgaactaaatatatgtgagtttatatacatagccccattcaatatttcctatggatttttcttcttctctttcttttattctcttccatacatgatcaaaaaatatatattgagtatatatacatagcaaattgtaatacccggtaaaaatatacatgtattttaaattttatttgttatacaatttgtgtgagaataaatattcatttatttctactaatagtgaatagagactattgcttagaatagtattgatagatttctaaacatagttgaaattatagtaagtgtcaa

SEQ ID NO: 307797 - DNA, 2006 bp, Cannabis indica
aataattatatatattaatctaatgaatacctcactataaatacgtactctactcttgataattatagacatatttttactgagtactttatcaaataataaaacgtccattgatataatcattacatacatcatcaaccctctattaacaattcataattaaagagaataaaagttaataattattttacccaatttaattatcaattgttccaagagtactactgactttactagtaagaattgtctcatagattccatattgctaagttatgttcccaatcatataaatcaataaaataatttttcttagtctgatcaacttgacaaaccctaacgcacgaatcaaaggattgtgtagcatatatagaaattcaaacactactacaaaagtcagaattccagtcttaaaaatgcttttttgggaggatcgtcactaaaaaaaaattaagtaactgtttaacatcctgtggaaaaattagtattctcgatggtatataacatcaattacaggaataggcaacaattttaatcgaaattcgtgaatttattaggcccttatacccaacgatttaaaaccgtcatcaatactacacccaacggttttaaactgtcgggtataagggcccattaaaaaatcgtttctctcacatatataccatatttcagttgacctagcatactcatttcagactacctctctcatctctaacttttaatatttacaaaacctaaataaaattgtttacccacaccaattgcaaaaccttgacgaatccacaccgattgacgaacccacactgacaaacccacattgatggggtttttcacctaacctctctctcgtctctagctccgcctagcctctacacccatgaaacccacacgatcggacttcttacctccataaccaccaccgctacacccactcgacagccagagttcatcggtcgggctccatctcaaggtatatatctttatattatatatttatttatatattcatttattaattttttttttatatatatttatatattctcttcaaacttttcttaagaatttcttattatattttctttgtattggtgtacatccattgaccatgagttttttaattttttgcaactaaattgaaaaattgttgaaacttaattgagcttgaatattttctattatggtcaagaggtataggaggaatttttagattttttttaatcttatgtggttttttttattgcgaacttaggttttgtttggatttaaaattgttgtaggaatagtttttggccgattcacatcctaattgtggcttatggtatatgatatttggactttgaatagtgtttatttaatatgataggattttttgacaatgtatttggggtttaaacttgatgttgagattaaaatttacaaggtatatgatatttggcctatgtaagaaaatttggtaattatttaaacttttattgatcacttcttgacacttgagatgaattcttgaatgctagacttgaaatattgaatttgatgatgaaataccaacccttgatcttgaaacttttggagttttacatgttgattaattttcaagcatggtcgagaccccctgtgggcattctatccaacttgattattatagcaccataattttcacttgattgtgttgtgggtcacctagacattaaatttcaaagttgggttgaactttttacttctataggccgaagtatgcatgcatggttctagacttggtaatctatttaaacttttttatttaatatttggaaatattagaaaaaattgaaatatttcgcattgttaattttaattatttttaggtattagtgtgatgttgttggagtaaacttttaatttaatatttaaaatattttataagtttcgggtttttgtgttgattgaagagtggacaattgttgcgaaaattattaattactacgcaagtgcacgcaatcaagtagtatactcacgcaagtgaggtc

SEQ ID NO: 307798 - DNA, 1152 bp, Cannabis indica
aagattacaagatcaagccattcggctccaaaccagaaaaaccaaaaaaaaaaaatagccctcaaattacaattaaatcttgcctaataatttctctctattctattctattcatctttttatgctttacactttgaattctaaaaataactatattttttatttctttaacaatgtgagcagctattttagaatatccctcaaaagaaaatttgttcttatttaaccaaagacagtagcaagtggcaacaaagacagcaacatcaacaacttgcatggtattcgaaggaggctgggctaaccaactctgccaccccacaaggccagtcggccaagctctcttccccaaccaattaaaaatctgctccaccacctgtctcgaaagataacacctgaaaagaagatgctcatgtgattcatattcagctgtacaaacagggcaacccagagaatcaatgtcaacatgaagcttaactagattgtctctagttaagagctgaaggttcattgcttgctatagaacaaatattttaagtttaggtaatgttagagaactccacacagctctgtggtaaagtgccacattttgagtaagagagctgttgtaaatcatgtattttacgctaattattgtattactcttttaggaatttcgagagtggtcgctcctcacttattttttcttaatctttcaacatactcacgagtatgtgggttaatgaattgcaaggtcttacaagaacttgttatctaccctttacagcaatatagcttcagtcattgtattttagataatttcagaatattgctacctcgtagtactgtgtattatcaagactagagatagactatagcttagttttatggtgatacagtcattcataaataaacatactattatatactaatcagtcgttatattgaattaacttttaggaaatgatataaaatgctataattaattttacctaataattgcacatacatatatcaagtgtcagatcaaaacaatcttgtaggacataaagttgaaaaaactaaaaaataattgcaaccccactaaattaatgtatcaataattaggaagttcctggccacaaacacataatctgagacaaatctgtataaacattactatgatttttttttaat

SEQ ID NO: 307799 - DNA, 1479 bp, Cannabis indica
tgttatgtagaaaaaaattatatataagaatggaatatacatttaatctattaagttttttaattactattttctttacattaaaattttagttgtatatatagttttttaaatttgtttataaatatgtgtggaaatcaacatccaatctgcacaagtacgaattttgaattttctaatccaatcaaactcgcacaagtgcggatatccgcactttgcggattggattaaattggatcgtacagattagattagatcaactattttatgaacacccctaatttcaagaggaaaacaacttgaaaacaatatttctttctcgaagaaaacaagaaaaaacctgtacaaacaacaaaatttctaaaatgtgaaatatttatataaagtctgatcttaagtatattgtataaatttttcaaataaaaatgtgtttataacttttatttttattttatagtttttttaagtgaagaaatgaagtgaattttgattaaaaaaggtacaaaatagattatgattaaataaaattgtttacaaaattttcaaagtaatttatttattttcactgtattttataaaaaaatatcaattggatatttttaaatgactattagaactatatgttttcaaaatagaagattataatattctcggctcaattttagtcaaaaatataaaaataccttaaggtagaggccttttttttttgcacgtatttatactaaaaatggcttcaaatatattaaataaaaatatgaccaaatttcggctcaaggtattattatatttcatttttaaaaaaatagagcattattgttgttgtctctacttttgtcaaacaaagacaaatgatggtgtacccactaactatcaaaactcccaaaaaagttgatgtaatatgttaggaagtctttccaataaagttgaagaaacaagacaagataagcccgcatattagcaattaatattttatttatgtctatcaatgtattttcttctatcaatgaagcatttagacgaataaaaaaaataaattctatggctgcccataaatatgaggtcacatgtaaaggggctcttatcttatcttagccggatcagatccgacccgacccattgatagaagacttcatatttatgggtagccatagaatttttttatgggacccaacccaacccgaccaatttggtgttaagccaaaatactgccaaattttcaagagaaaacttcatcttctctatctctaactcgtgaactaacgctcattaacgcccgtaaaatctataatttctatattctcttttcttttccaactctaaatcttcatttatttaattagttatcaaaaatatcgattaacaattgtcatttaataaaatagataaactgattggtaacttttataaaatacaaaactgacgattttttaattttaatacatattttaaaattaaaaaataaaataattttactacaca

SEQ ID NO: 307800 - DNA, 1375 bp, Cannabis indica
ttgatatttgtagttaaataattgtaataaccatcaagcaatattagccattgaactattgcatagtaccctacccatatacacatgatgattcaataactttcaaaaactaaaagaaacgatggttatagtatcttgaaaccaatctttttctgcagttgattatatacatatatatgcgtacatcacgaactgatgacattaagatggggtctaccactttcaaattttagagtgttatacagtcacaagctatagaacaagaaatggagatggtggttacaaaccttctctctattattttcagtttcacatataaaatcataactagaaaccaaagtgatgaagaggtgggggcagacccaatttgtttttacttattattaattatactttattgggttatattaatatatacaggatgaaatgactcaaactatgtatgaaagcaacctcatcatgtagattgatgtggcaatttgatttaaatattgtcaatgaaaagaaggaaatatgccaaaactcactgatatgaaacttcaccattgtgagataaggataagattttactacagtctcgtagatattcatagttttttattactacccaataagcttcatccacgtaccaagggtaaaaaatttatatactgcagttttttgtattgctcactctcaaccacaaccagtttctatgtctcactaatattataagggtataatgatacttcatacacaaattttatacatcactttacttaattaacttcatttataagtactcatgccaatttgagtcaactagacagaaataattaaaagaataaacattaaaaaataaaatcttattttattattctaagtgttcctgttttagattggattgagaagtgaaggtcagttttagctttttctagacaacctatagagctagctagagagaaatatagttgaaatggtatttaactaatcaccctgaaattaaggatggcaattgattgtatctagtcgacatgaattatcacacaatgaaaatgtgtaataatgtatcagaaactggaatttgcatattaatttatacaattaagaggggttctcaatttagtggagccatagaaaaaatatatgtttgaccctttatttagaaaaaaaatgtgttattttttaaaattagtaaaaaaatatgtaatttcaaaataattaaaaaaaaatttgagcccttaagctaggtgggcagaccttagacacaagtttagcccgtctatactcagtgtcaggcctgcaactaaattgttgattatttaaaaattttaaaaaagggttaatttcacaaatgcacaaaaataacaaaaaaataacaaaaatacggtttcac

SEQ ID NO: 307801 - DNA, 2651 bp, Cannabis indica
gtgagtttgtgtgtctttgtaattactttttatgtgaagtaaatttcaatgtagagaacataaagaacaaccttcaggagaaaattcatcaaagtcttacaccaggaggaagcaagcactactatcttcgggaaaaaatttctacaagtcttacttcgggaggaagtaagcaccactatctttaggagaagatttttacaagtcttatttcgggcaaaagtaagcaccactatctttgggaaaagatttctacaagtctaacttcaggaggaagtaagtactgctattttcgggagaagatttctacaagtcttatcttgggaggaagtaagcaccaatttctttgggagaatatttctacaagtcttacttcgggaggaagtaagcaccgctatcttcgggagaagatttctacaagcaagcactgttatcttcgaaataatatttctacaagcattcatcaaataatttgaagagacttcaaaccttggtgtcttaaggagattcattcagcaaatgaagtacatcaagcttgcgacaaaatcattagagggagtctatcttttgtttaagtcaattactactttgtacttgtaaaatttgactaatgattcttatctctaggcgtgacttcgttgactgtagcaatatgcaaggactgttgctaccatgtataaatatcgtgtgtcatttttattttctgcattgtatttctgatctatcaagttcagattactgatagaacaaattttcaattattttcaaacatattataatagttgtgcatttattaaactgtttattaataacacttggtagtcgtagaaacaaattttcaattagtattagagcatttcactaaacttttaatgggattttgtggttattttccatttaatttgatttgtgtgaaatttctttctttgtagaatatgaaggtgatgatgaaatggagatgcttgcgaagaagtttcaaaaatatatgaaaaagattgagaccaaaaagttcaatgtcaagccttctaaaagttattcttcttctcttaaacattttcaaactaataaaaaagtcattcaatgtagggaatgtgagggatttggtcacataatcagaatgtgcaaacaccttgaagaataatgaaaaatatatgattgttacttggagtgacaatgactctgataatagtggtgatgaggaatgtaatgttgcattcacttctattttgcctattttaattgaaatgaaaatttgttacttgaataatattcaaaagatgaagaaattatgatagtgatgaatcggaattgaatgataaatcttaagtgaatctgacaaaaagatgtatggttcatgggtaaaagtatgttctaaaatcgatcattggtaaacaaaaaataaaaaaattgttgtttgaaatcaaattacttagtgtgtggatctcttagaacatggtcgggtacattgttatctgtattgtttggctgaatagtaggagggatgttatgcccatctaatcctcttctgcaatttatatcattcatgagattatgcacgatgcctaatcgatcaaagactgattctcgtaaaggtcttcacgtatggatgttatcagcaatgggttggtttggtatttgtataaggatggatgttatgctgatcattccctcccaagtaatgagatggaaaaacttgctcgtctaccgtgtggcccatcttttgactctgtaatcttggattggacggctcatttctttgggtttgctgagtgtttctcttggctcgtattgtggctcagtggggatgtatgtatttaccactggttgttgtctagtgatctaataggctcatatgataaacaagttgacctacgtggaatgatttccaattgcttcttgttgatctctcatgattttcatctgttgattcatccattcttagagttgacgcctttgttgtaacgctctgatacttaggcgcggtacagtgattttttaattaacgtgcctcctttgataatcaaagaatttttctcgaaaatcatgtcaaattaaaactttcaatttaaattattaaactttttaaacatacaaatgattatctatataaatcgggatcctataattaaacttttacaaataccatcaaaatatttttatagcttgtcagacagcgactacaaaatatatcccaagatgtcctgagaccgaacactccaggtcgtaccgtctcgacatgtacaatcaccatccaagctcgaaactcactcttgttcagccttcactttcttttacctacacataaaagtagcaactgtgagtcaacagactcagtaagaaaagcatataacaaataatatattatagacttgtgtctagctagacagccatacacctatccacgaggcttaccaaatgattaagaatattcttagcagttggtgctactgactgtgatatcttccactaccagcactatgatcgcactatgggacagacactatgttcgtaccgctatgatagcatcaatagcacttgaaaggacaattgccacgatatcactcttaaccaatattatgctcgtactgctgaaccaacacaatagttgtatcgctaatgataacgccaattaatactttctggggtgaatatca

SEQ ID NO: 307802 - DNA, 955 bp, Cannabis indica
tgatacattatgtacactatatgcatcaaaaatattaaagatgacaattcacgacacaacacaatgatacaattcgaaatatgttcactgtcaaaattgacataaacgttttttgtttcctttttcctttgcagtatttacgtatccagcaggagttcataatgtgttcaaagtaaatggggcagacttcagacaatgcacagcaccagttggagcagtgccgttaacgagcggaaacgacgtcgtggcattagaaagtcgagggaaaaaatggtacttgtgtggtgttgctaaacactgtgcagtaggaaaccaaaagcttgtcattgttgtggctcccaatccatggtctcccttaccttccccatctccagctccttcaccacttcttagtgatgatgtatctgatcaaaaccaacactagtttactacacacctataccaagtgatttaattataattaagttaatatgttttgtccaataaattaatcattttcatgattacacaaccctcatgtttatttagttgtaatctaatgagtttggaaacctatgtgtgtgcaagttataagaatttcatctcactttacaatgtattaaaaaataaaaataatttcataaaacattttatcgaaaaatattttattttctagttaaaaaaaaaactaattaaaaatataatattacaaaacatacctattacaaatattatacatccgaactcgaaccccgaatctcagaccctgatccaggatacttgactcaaaccaatactaaggattaggataacggctatatacgattattgttattagatactttaaggtgttcaacatcatactaatatggtgcgtcgtaaatatttaacagttttctatattatttattaaattaaaatacgttgaagtagatattaaattaattgaggaaattacactctataccttttttat

SEQ ID NO: 307803 - DNA, 1022 bp, Cannabis indica
tattgattagtacatcaatacctctcaacattttcttgagtcaaaagctcagttgtcaaactggtctaagaaaaaaaaaaaaccagctggctttcatcatctatttgcaacctcgatcaaaatgcaaaaaatattattgcattattttagtagatatattcttcaattaaaacaacagaaagagaaagagatacattgcttgacctcaatagtattatattagtaggtagtatagtgtatataatcctcaaattagacttcaatcatcagaatttgactaaggtaatttataaatgcatttaaaattataattagagattctattccattaatctattagtaatttaaccactctctttcacactcactcatctcacttcatatactaaggttttctttgctttatatctttaatttttctaaataaatataatactatttcatgatatgttttgtggaaatttgtatttaattagaataatttacaatgagagattgatagaagattagatcggagtatttttattaacgcgtgtgtgtgtttttttagatgatcattaaaattaattgtttaaaattatcgaccaaagttataatgtattagtatatctttaaagacattgagtaaaaacgtaaaaataattagtgtcacattgttaatatgtagaaataaatctacaaatttttcaggcgcaaatataaagtgagtttattaaagttaattacaaattactaatgtatagaaataaattaagaatttcatgcactttaatcactctcctttcaaactttaacactgttaattttttatttaaataaataacaggaagttgggaatatttaattttctaaaagggtaaaagatctatctatatatccattattcaaaaataaataaataaataattattctaatctctatttttctaccctaaagaaatataatattggaacttttttatttttacacacttcaaaatatttttttttacatttttacgaaattctatatagaaactcct

SEQ ID NO: 307804 - DNA, 1616 bp, Cannabis indica
aaataatttccaacataaataccattgaactagcacttgttgctttccttcactgagtctcgtagctaaaatagcctggggagtcactaccggtttgttgttgatagagtgcttgggcagtggaaaaaaagtcacgttggaattgcattgagacggtttcagcagagacacatgaaaggttggatggattcgactaccagcgggtaattccaaagtgtacgccaccgttcccacgtgagctaagataggaaaaggaccaaaatacctcctacacaacttgttgttaagtcatttggccacaatcacttgtctatagagttgtaacttcaccaagaccagctcgccaaccttgaatttaatatctcttcttttcttatttgcttgttgccgcatacggtgttgagcttgtagtaggttgtcttttaattgctacaaaatggtgtcccgagtgagtaaatcattttcaactgcctgaatggtagtggaagctcttgtgtaagccggaatggtttgggggaggtctgccataaactgcctgaaaagaggtcataccaatagcggagtgatgactggtgttgtagtgatattctgcccaggaaagaaacttgctccactgcttaggaatgtccgctgtaaatgccctaagacattgttccaaatatcagttagtaacttcggtctgcccatctatttgtgggtgatatgcggaactcattttcagcttcgtgcccatgaatataaacaatttcttccagaaagcgctagtaaaaattgggcctctaaccgaaacaatggatcttggcttactgtgtaaatgaatgaccatatgagagaaaagatcagctaccttggtggcttaataatgattcggtaatgcaccaaaatgagtgcatttggtgaaacgatcgaccagaaccaaaatgttgttgaccccgaatgaattcggaaaaacgacaatgaaatccatcgctaaatcctcccatacccattctggaagttccaacggttgtagcaatccataaggagagcagtaatgaatacttaactatttgacaaacaagacaagattgtacgaagcttctaacttcaaatttcatactaggcaaaaaaatagcactaaatcgcaagaatgtgcattccacacccgcgtgtccacccatcagagtctcatggaattcttgaataagctgctatttaaaattagagttagaacttactctgatttgctgcctgtagtaaagtaacccctcacaaactgagtaattagctgtggataatgagcctttagcgagttggttgtggagatgccgaagttctgggtaggtggtattttcacgtcacaatttctccaaaaaatcaaaacaagcagaggaaatagcagctataaggagcgaaagcacaccatcatgttgttgggttttgtgccctaaataaaattcatttcaatataatcagatttactaattaataaagatcagaaattgcattttatgttgcatggttcacatgatttatttcatgattatatttaatgtataaattctattaataagtccagaacatatgtatttgttcgcgattatagtgtcgtcagcacagtggaatataatcatgat

SEQ ID NO: 307805 - DNA, 1278 bp, Cannabis indica
caaaaatttccaaaatattatatatcaattaggaaatagaatttaatgttaaacggtctatttcatatacgtataaaacaaaaaattagcgaataacaaactctttgaatcctattttttttaaataccaaaacaaataatatatatatattaagtgttatatattcatttcaaatattgattaattaataatataaatgaattcaggataatgataagaagaacattctggcggtacagacactaaggaacacaatcatgggatcaacgttaatggcaacaacatcaatactactatgttctggtctagcggcggttataagcagcacatacagcgtgaaaaaacctctaaacgacaccgtttacggggcacacggggagttcatggtagcactcaaatacgtgacccttctcaccatatttctcttctcattcctatgccattctctctccatcaggttcatcaaccaagtcaacatcttaatcaacactccacaagaggacacctcaccagtcaccccttcctacattgctgagcttttggagagaggttacatccttaacactataggaaaccgtctcttctacgctgccttacctctcctgttatggatatttggtccggttctcgttttcttgtgttcctctacattggttccggttctctacaatcttgactttatcttcccatcttctactaccaacaaccacaagagtactagcaatatgactagtactatcactagtgacaatgacgatgacgatgatgatcgttatcatcgccatgataaccgaaaggggaaagttattcatgggagtgatgcttgttaggggaaatcatcatctttatcatccacaaactaaattatgattattattgaataataaaagacaaaataattaaaacaattccatatgtatatcaaaagttatcttcattgaataatttgggtttttgaatgacaaaaatattcgatgtacacttacgtactactgcaatcattaataataataataataatgtagtatatacatgttttcaatttggagattttttatttttatattttaaaataattttttttgtattgttacagaattctacatagaaactcctattgcaactaatagagcaacctaaatcgtaaccaaaaatcgtatagcaaccaaaatagaaatcactggagaaaccactttaaaaactcaaattgtaaatttgaaaaaaaaattaaaaaagtagtatgtaaggtaattctccttaaatgcaaccttatgtaa

SEQ ID NO: 307806 - DNA, 944 bp, Cannabis indica
atataagatttaaaagtttttcaattaaatatggttgatttaactttgcctattttttatggttttttttttagtttttttaagggtttaggtttgtcatattattgtaaatgtctctctaaatttcatatttaatgttttaaaacttatttctctttgtttgaagtataaatcagagaagccaaatatatcgtatatttgtattttagaaattgaatttttcattaaaaaattagttttgattatatagaagtaaaatttatatatgagttttttaaaaaaaaaatttataatatttcatcttatctataatgatttatcacatatgtttaatttttttttttaaaaaaaaaaaaatctatatctgatgcaattaagtttacatgttataatattaattttttttatatatatttttgtaaatagtctacttttaaaaataattataattatttttggacctagctcgcttataccaagatgaatgttgttttagagctcacattatttataacattataacttgtaaaaaaattcttactgttattttttcgttgaaattttttgatcccaagctattacagttacagatatacatttcgaaaacaattaggtaaattaactttaatttattatatctattaaaatcattaaaactagttcatttaactcaacttttttttttaaagaattcaacttttaatttaaaagcgattagttagtaaaataaataatgtgagattgtatattagtgataaaatgagagtttgtatagggttgtataggggtccatagcctcaaaagtttgtgtaataatgtttgtaaaaattacatgaaatatgggattttacaaaaaagttataaaaattatggcatttataaatttgctactcttttatgatatttttttacatttaagattttttatagtatttaatatgcca

SEQ ID NO: 307807 - DNA, 1792 bp, Cannabis indica
atatatatatatatcatgatatataatagtgctatatttatatttcgagcattaaacatgaacataatacgtggatataagccttaaaaattaaggaaaattataaacgtaaggaatttaataggtttctcacctcgatatgtgttacaattaatgatgtattttgtatcacgttgtatgataatatagctattaaataaagatggtaaaattttaagtacaatgattagtgagacaagtgataacaacatcataaattcctctcggacttgactgagatagacaaaacatatgtagaatatgaagggatgagctactgaaaagggtagataacgaattttttaagagctttcagttcattggtgcacatactcatgagcatgttaaaagactaagggatataagcaaaagatgatacatctcagaatactcataaacaaagtgagatgattgaccttaaggatcacaaaagattcaatcctaagtgttatcttatcaagacttttcttagacagaaaatgtaaagaaaataatctcaattagcgtctcgcatatataatacgcctgatcattcccaatattattgaaaaatgtgaggcatatcttgggtatgttatctcaacaaagaaactcctttcaagataaaaacaaaaaaagcaattgccagcagttaatttatttatctcacatgttgtaaaataaaaaaacgtgaggattgttcacgttttatcaatggttatctagataagataaaaaaggaatgactattattccaaagaattctataaataggagcagaacctgcgatgtaaaagacgggaaatttttgagagaaataactttgagaaattaagtgtagaaaaacccagagattattatttggtatcgaatatcttgtaatcataaataaatcaaaaactcgaatataatatagactcgtggactatataaaattaactacaaagtcacataaaattcatgtgttttatttatctcaattattaatagttatttttaagtttattcaaaatgtctcattattgttaacaaaattatatgcattgactactccaagctcaataaagaaatgaagaaagacctttttctcctcctattcattgatcagatgttagacagattagcagatcaggagtattattgtgttttgaatgattattctaggtatcatcaaatagccaatgcaccacaggaccagaagaaaataatatttacatgtccatatggcacatttatttttcgaagaatcttgtttggactatgcaatgcaccaacaatttttaaaaagtgtatgatgggtatcttttcaaacttcgttgaaaagtgcatacatattttcatggatgacttcttggtgtttggttcgtcgtttgattattttttgaggaacttgagctagttttgattcgatgtgaagaatccaatttagtgctcaattgggagaagtattatttcatggttagagattgattgttttaggacacaagatctcaaaagaaggaattgaggtgaacaaggtgtactattgagaatttgccccctccaattttagtaaaggggatttgtagctttttgggtcatgtcattttctaccaaagttttatcaaggatttttcaaaaaatttcaagtcattgtctaatttgcttcctaatagagtgtcttttgagtttagaatgcaatatatatatatatatatactagcaaaaagctacgtgcaagcacgtatactaaattttatgctagtttttttttctatgttagttgaaagtgata

SEQ ID NO: 307808 - DNA, 2317 bp, Cannabis indica
gataactaatcagattgtaaagagttttatttagggcataaaacccaacacttacatgcattattacttgcccagttgctaagctttgttgggatcgagttggtataggcacgggtgtgtagcaagagatgaattatttggcttggtgtgttgcaactttccaggcacttgatcaggagaaaaaatagttgttggtggtggtttcctgggctatttggaatgccaggaatgatcgggtttggcagaacaaaattcagagtgtggatagcatcatttcgtcagcaaaaggcttccttaaccaaaggcaaaatgctcaaactgctggttttgagctctcatcttctggtttgatacatggggacggaggtgagcattgggttccacaaaaagtagtgttaaggttaatgttgatgcagcggtgcttggtgaaacccgacaatttgggattggtttggtggctcgggatgcgcggggcttgcttatcgaaggccgcataaagattttttatgggcgttcctctccgtaattagccgaagctatgggggtacgtgaagcattaagttggatcaagccatgtcattggcgacaagtgttcccagaaaccgattgtctttcggttgttcaagcgttgcgaagctcaattgttatgatatccacgtttggtcaagtggttaatgattgtaaggctattcttaatgtttcataaaatatttttatttattttgttagacgatcagctaatatgatggttcataagtttgctggagcctctgtaatgttccctaattgtaatttcagtttagagtctgttccaattaatttgttacttagtttgatgactgagatagttgtctaataaaggatgatttatattaaaaaaactaaagatatgcgtgacaaattaaaaacaagatattacgtaaatttgtgataaataaaagtaatcaaacttttattaaaagttaaataatacaaaattagttggttttggagaaaaatctaactatgacttgattaattgaatgttatatatgtagttcaattgagttaataaaattgattgatatgaaattaggaaagattaatatgtaaggtatggtaagttttagtgtagtcgggtggggaacactgtaaagctacaagatcatacagcgcgtggggacattctttagtctaccaaagcaatttcatttgtattattattattgcggttagatacgaagaagaagaaggggctttaaagggaggcaactcgggtgacgtgtcaacatcttctactgcctctcattatagctattctggtagtttggtatcaaataaataaaattaaataaataaactcctctttagtgcttcttcttccgagataaaagatttgggctattttggtggagaaaaaaaaaaagaaaatataaaagtaataataaaaataataaaataatattcatatttttttttttaaaatacaaagataagtaaccaaagatagacaaagaacaacagttacaaatgatcttcacgattaggaactaagattgttcgagaccatctcttcgtccgttccaagagctactcttgcgagattgtgggcgatggtgttctcggttcttgggataaaaccgatggaggcacctagaaaagatgacaaagaggaagcaatagcagtgatgtaacccgagagagctgatcgatcaattgaattcttctgaagtcgacgaaccaaggtcatgcaatcagagacaatagaccatagaggaaagcgaacggcttgacaccagagcaaagcacggttgagggcttcagcttcagcaaagattggtgggaggcctgatgtggatggaaccgaaaaaccagcaacaatttgaccctgacaatcagtgactacagcgccatatccatgtttggtggagctaggagaaagggctacatccacactgagctgaaacttattgtttggggcctacaaattagaggtgactgattgaatgggaggggactgagagctgactagtaattgagcatccttgtattcctgcaagtaattactgacagaaacttccaaactgaaatcaagatgatgagtagggttgaaaatggctttatttcatcttttccatattgcccataacaaacccagaaaatatgcagacttttccttgtcaaaatgttcaaaaccacgaagcatgaattcctgaatgtcacaatgtttattggtaaaataaaactgagaaaaggaagagttcttccaatacttacctgctctagaacacataactagagaatgagtgttagtgtctattggaaattattttaccag

SEQ ID NO: 307809 - DNA, 958 bp, Cannabis indica
gggcataaaacccaacatccacttctaagaaccaacttaaggtcggtttagaatgaatcatttgcaacagtgaaaagtgttgtagctgtagtagcttttccccatgaaggaggcagagatcgatgttgcaattcttgaagtaaaatcacttctcaaatctctcatttggtgtttagaagagggattcccgctacatcaggttgaaacctaaggcagtctctgatgctattggtgtcaataaagaagatttctcactctttggagatcttatttcacaaattaagaaggttttgtctcacttccctaatgtctcggtcaatgatgtgaagcattccgctaacacgcttgctcataagctaacaaaattgattttggagttagacaaagtttcaatttgaattaaaaataacccttgcaatttcttcgtagggcaaacttcctctaaaataactattattgtaaaatgtgataataacctaatcaatagcttcatgtactatatatttttttgtcttgtcaattttgactccaatgacttttcctcaataggtccttataaccatgtgagttatttattctaatacccgtcctaatcagttttgggtgtatctaatctaaatgtatattgctttattttgtagatatatataaggagtaagtgtatgtctgccacatggttggtccaatgaacaaaagtttatatgaaaaataattatatactttaaattttctataattctacctttttttatatttataaaaaaaatacaataatttaattaattaatgcgaataaaaaaaaattatattgtcatattggggcttctttaatttctacacatgtatttttggggtaagtttcaaaattaattagaatgaaatagaataaaatttaaaaactagttatctttttattattattaagaaatgttacttttgtcagcatatttttgtgctg

SEQ ID NO: 307810 - DNA, 603 bp, Cannabis indica
atgtttattatttgctaatttcattatttaacttattttttttcattttactttttgaaaaaaaaaattggggatgctgacgtggagaaaacgacaaattgggtggcgtggaatgagaaagtagatgattactgtcaagctgccagctccagcctgtatacctggcgcgcggtaatatactaacggccataactccaccgacacgaggcggtcaccgaatgatattatcataaaagctaaaacgtcgccgtttagcttttaaacacgtcaaccggtacggatgttgacaaccgtgacaccctcctaattaattctgattatttgtttaattaattacctgatttctttttttttttaatataattaatacgtacttgtagatttgaaggatcattagtcattattttaataggtttttattaattagttaatggtttaactcaaaagataagcattaagtggtcggttgctgaatccaactaatgccttcttaactacgtaccatttcttttagaaacggcgtttttgctgcatatgaatcggaaagctgactaagattaaaggcatttgactctctactctcttcttttttttttttttact

SEQ ID NO: 307811 - DNA, 1286 bp, Cannabis indica
ctaaatgtggttgagggtattatagactatttaagagaagagaatgcctctactatctcaagcgttcactttaactttgcacagtttcccaaatttagcgaaatagactatgtgcgtctacatagtaggtttacataggtttaggtgagacaagtctttatcctttcttgattgatgtgataactcattatgtagtcgtcactttacatccttgattaacgcgtaatcgccaaagaatgggtttaatgcgtctgacatgtcttttcatattcgtctgtaacgtttcctccatgctgcatttaatgcttatgaatagttcatctctgggaccttgggcccggttaagctgggctttgtccagctccttgagatggatagaaggttgatcctttcggatcctgttatagctctatgaggagctctttgactatgtccacttaaattgtaaacctgtttaagatattcttgagcacctccgaatcttaagatataatttccacgtgtctagtcatagagttgccacgtatatcgggaaaaaagtagggcaacatttacccccaagtattattttaaaactttataaaatcagacttgtgttttaactctggtctcagggagtgacgtggggaatatcctgcgcgtgtgggctatttattgtttataatcattccgccttgtttttgatcgataggcaacgatttgattcctgcctatttgatgaaccccgtcattaatgtagttgtcagagaggtacttaagcatttcaatcgcccttttctttttatcttacgagtttatcctggccgtaaaatcactagaatttgggcggtatgaaccttcaccatccgatggtactcgagtagctttgacacttaccctgaagggcctataaaagcttataccctttgtgattgggatttttactcaccatgtttccatttccaggccttatgtcccttccgacaaaactccaaactccccagatttcctcctactcttcctccgtcgttgccagaggaactactactgtcgtgggactacttccattcctgcattgtcttcattgtgtaagtttatctttctcttgacttttctgtatagttgagcagattataatacttcgtagttcatcttttagagaaaaattttgtgtgcatgttctccctgggtaatgtctatggcaattttttcgtggggagtctgttgggttttgtgccttaaataaaatccatttcaatataatcagatttattagttagtaaagatcagaaataacaatttatgtt

SEQ ID NO: 307812 - DNA, 1510 bp, Cannabis indica
ataaaaagaaattggaagtccgtgttttatgcatatgtaatgttaatatatatattaaaacgaacttatcatggatttggcacacaatctatttaaagaaaaaggttgtcgcatgttgcatgcccaaataatcatgttcaaagaaattaggttcaaaagggtaacaaatttatatatatatatatatataaatattcttaattacattaaagagtagaaaaaataaaagaaacaataaataagaaggtggctgccgcaaacaaaaggtggtgggatggtagcggtggagccacaaaaccacccatcactttaagttttttttttttttttttttatttatattagagataataagaatgatgtaaatatatatttatatatataatggggtgtgattaaaatggtatatatatatataaggtgaaaagtgtaggtaatattcgtaacaaaacccccacgttgcaccattttaacggggatatgtcggcttggtgagggtcttcactcttggccctctcaaaacacatcctccacttgtttcatacttcttcactttaattttattacttttactcacaaaaacactatctttttctattatatatatttagtgatgatcaagagagaaggtgatgatttttttatattagtcgttttgactaaatatatatatatgaatatgaattattgtgagttggttccaaccaatgagatagagccgttcagatttgtcaaaccccatgaacatttttcatttttcatttttttttaatttttaattgtaagtgtaagaattttattttattttttatctttggtggcttagtggaagaggtaatcattagtgaaaggatttttacgccaactaataaactctttgccatgagcatcaaaattcggagcatgttccatcgttgctcctcacatgggacccaatattcaattctcttcttctttaatataattaaattatatattataatatataacgtatttattttgagttttcataagcataaacgtcgatctcttcttctttatttttttttctgttatatataagtgatcaagtgagtgttttctaggaagatgttggcttggaatattttgaaaaatacaagctaggattaaattgctacttatatttatatagcctaattaacttgattaatattattttgtttcttaaagactaattaaattgccattacttagattaaatgcatgaagttgtaactattcacttttgtactgaaaatgagaaaaagggctatatatataggtagacagattcttgattccatatctaatataggaatacatataagcactaccttcgacacttttcttattacatattttttgaagtccatactccatatatatattattaggtttacattaaatatatatgtagaattataaatattatatttactaagaagtaatttcgttattatataatattattttaaaatattattattattacattttgattttttttttt

SEQ ID NO: 307813 - DNA, 1178 bp, Cannabis indica
ttaataataaaccattttatttttaatataaataaaaatcattcatgaatttctcataaatcaagaattctgttatatatacaaactttatatagaatagaaataatttaaattaatatttttaaaaaataataatgatttaaattaaaaattaataaattttttaaattattaatattattttattttaaataatataacatcaaatattattatattgtataatattttaatacgtacaagcttagcaatcactgatagtaaattaccatagttgttctatatataattattttataaatattttttaaacttgggtaataaaggtgaaatcaagttagggtttgtttaggtttgcttatatatagacctgaaaaagaaaagaaaccaaagcagctataaggccgcatctcttcttctttaatttatttccatctgtattttcgacatctcttctttgagtttggggacggtgacgattttgatattaaggtctcgttcgtcgtaatgggctgtgttattatacatacagtccttgccgaccattctgacatatcaccacccatattctgagtccctaattttatttagtggccaatgattaaatatattaaattttgacaagcatatgtctgaaattattattatgttgaaaaactaatcttctctatgaggccttatttaattagattagagctatagttctttcttatgagtttctcaatctcagatctctgtttgcttaaatttgagtatgtatgtcgtatgatgctttgtgattttaaatacgtatagatacatttatcactttaaattctaagttgacgtgattcactcacaagcatatttttgtttttagttttacactcaagcatataccaccttcctaccgaggctattaagttttatttatttaacagttaactaaatttatggtcgaatgatgttttttttttattattattatttagaagaatctgtgtgattattattaaaacttcttcaacttttaatttactttgtaagaaaccattcaacttcaaatttatttttaaggtgctctcttcatcattaaatccttattttacttatatggcaataacaaatcacccaaaaattatcctactgccatattttttaaaattaaaaattatatgggttttttcatttttacactt

SEQ ID NO: 307814 - DNA, 1718 bp, Cannabis indica
aaaaaaaatattttgatgttatgcttcttttttattatttgttttattatttttatattgtttgtatgttattttatgtaatttattttgttattttcgtattatttttatatattataataaaaatataaaatatgtataaatgtaaagatataaatttctttctgtcaaaaataatattttgtgtaaatttgttatgaataatctcacagtatatgcatgtggcgatcaagtttgaaaaatatgtgttctatatttgcataattgcatatatgtagatgcgaatattaatggagtccttctagttaattccaatgcatgcaaaaattcaatcaccgtagaacttggtttagtcaaatgaaaacaacaaaaacattgaccaattcttcttcagtgtggccccatttgtaagctacatcaaaatatcttcctgcttatttgttcaaatttagtagtgttaattaaattatcaataaataataaaagttagattattctaaaacaactaaaagatataattattatatagtttaaataatgtgtcagaacaatatgaatttacatagaaaactagacaaacactcttgaatcttgattataaattagaatatataaggctgattaaatatttttatttctttttcttaaaaaaaacttaattaatttatgcatgtcggtactaaaattggataaattgatttgatttggaaaggtaagttgacttcaactaaaagggttttgtatgtatgcgtagaaacatgtatgtacaatgaagattcacattttggacgttttagtctaataacttttgggctttcacagtgggcctcaaatcgtctatattggacattcaaattttagaaaaatgggccgaacttttctgacattgcaatatatagctgactaatttaaactattcgaatattaccatatatttaagacattaggaaaagtactgtattgttgtaagggtaaatatgtcagaaaaatactattttatgataattttctttttaaaagtattatccaaattcaatgaagtttcaaggaaactaaacttttttttcgggtggaaagagtaataatcaagtttaaaatttttcaaaagaaatttaataataatagaaaaaaatagctgtaatatccaaagatgtcattttgtttctgaaataagaagtactagtggtgtctaacatcaccatgaagtgaaagctttacaaatagattgtaatattttacaaaaaattattacattaaattgtaagagatctaataattaattactaacaataatactttaagtgatgtctagtatttctcttaatatatatggttgtgattcaattgtaaagggtaatattacatagtaatatataatgtagggccgctatattcttcctctgaagaacttatttagaccaattaaaagtaaaaaaattaaaatgcacataaattattttgttatctataatagctgattcttttatcaaaaaatagagtgggaagttagtggtcctacactaacagtaaacacaaggcccaagtgtaagtgtatagcagtatatatattttaacaaaaataaataaatatattaaattattaaatatatataataatatttaatatatcgtatcattgaaaaattaatacaccgcaaaaataaaattatttaccacaaaaaattataacaatactaaattaatactcaaaaaatata

SEQ ID NO: 307815 - DNA, 662 bp, Cannabis indica
tttatatgaactaattaattttccataataaccgaactcatgtacgtcatcgatcgtttacttgaaattaaggtaaattgtagaaatttagtataagttgctgtgaaaacaatatactatatataaaatgaatatgatattttttattaattaatttggaaataagactgtaatttcaagattcatcatgatattagagtcgaattaaaaactcccattctcccttctaacttttatttgggacttgaaattctttcaaatatcactacattattaatacgtagaaatatataagatgaataaattatttttttcttttatcaattgaactatgcatcttactttaaattctaacaaaatgtttatctgtttgataagttttaaatatttgacttttcgaaccaagtatatatgtatatgtggaagttaactctacttaatcaattcaatgaataaaccaataattgacgttaattaattaatttgatacaatataaaagaaaatttgccccctcctactacatgcagtttaattttatatagataaaacctctctacgtacgtgactggtaattataattaaggcaaatatactataagtacgtactactatgccaactgcattaattccctttctctaatttgttatcaagtactataag

SEQ ID NO: 307816 - DNA, 1857 bp, Cannabis indica
ttttgttaattagtaaaatgggcttattaaatagtaaaatatatatataataatttgtttttaagaaattggagacgagaaaaatacaaccatatataaataattaaaattactcaaataataaagcggagataatctttgtcatcctaaagttactggtggactaggcttcaaaaaggttcatgaatggaataaagcggttattgaaaaatatatttgggccatctcaaacaaagaagacagcttatggatgaaatgggtctattgtgtatacatcccaaatgaagattgatgtcattacaagtctcctgaccaagggaggagttggtattgaaggaggcttgtaacactgaaagaacaattcaaagggctgattgcaggtcaggtaaatactattcaaccttactgtgttgctaaaggttacaagttgttgtggccgagccaagataaggtgaactggagccaacaagtttgggagcgattgaacacccccaaacacagttttataacctggattgtaatccaaaacaggctaaaaaccagagatcaatttcttcgaatgggaatttcaggggaagatcactgtgtgctatgctatcaatacaaagaaacctgctatcacttattttttgagtgtccagttgatgctggctgcttacaagccataaaagaatggctgcaatggcatgctgcagctacttctccgcctaggctcataaggtggatagggagagctaaaatgagcaagttcaagaagcaagttcttgctgcctccattgctggtttggtgtatacattgtggagagctcgcaactccaaaatctgggaagaaactcaagtggatattgatcgattaattcaacaagccaagctgactgtcaagcaacgaatcacactttgctggccgaagaaggttaaagacatggataaagagtggttccaaaagttgtaaaagttacaaataaaagtttaaagtgaatctgtaacatggaattactcaacatgagattgatgaatagtcagatatgggcctttattaggtgcctttagattgtaaatatgtttgtgagcaatacaaccatcctgattcataaaaaaaaattactcaaataataaatatattatttttatgagtaataatatttcatatcatatgtgcacacaaatactaaattctacgcttgttatttttatttttgcagatttaaaataaaacaataattgaaaaaatatcagaggaaaaaagataagaaaaataatataaaagatcacataaaaggataagagtgcagacagagcatgccttgcacgtgacgaagcctgccttgaagatgtgggaaaaggccacacgagccatggcccagcaaggagggtgtcgcggcccgcccccatcctgcagccaaaaacttatcttttctcaacgtgggcttgttggcttcctaattcaaagttgaatacgattttcagcatgtgcgtctttctatctttttagtccctcaatggctatataaagagtaaacttcagttgatttcgtcaagcaattcagaatgaaataaacagcagaatacggagtacaaattttagagatcaactgcaatattggaggcattcttcaaagggttttcaacattcttttcttctctattttcttcttttttcttaagttaatatgtgttattttgcttccataaacatgagtagctaaacacttgattaggatttagatggatattatttaacattgttttatagttttaatatgatttattttccctcagttcctatatattctatttcattcgtacttaattacttttaattgtttgagtcaccaattaactgtctatgattttgat

SEQ ID NO: 307817 - DNA, 1417 bp, Cannabis indica
tttttttaaaaaaaaaaaacattaagaataaaacaaaattgaaaatgttaaacttgcaaaagaaaaagacccataaaaagttatgtgagctttattatttgtcttgttttaaggattatgtttctcaaatcttgtattgttgcccattaattagtttgggtgaatataaaattagtgttggggcacatctttaacactctactagtctaggggccaaatagcacccaatttacatgcacctatattatgagaaaattgttattaattgttatatgttgttggtttaatttaatttcagttctttaattatttattttaatcgtaattacagaaaattgttaatcattttttttaaatcaaattttaatcatttataacatatcaccttaaacactatacaacactcatttttaaattggaaatatctaattgtaccctaaacacttataaaatttattctaataatttataatagttttttctataaaaaattattcatttctatattttttaaaaatatacctagataaaatgaattatatgttaaatattatgataaaaattatattaaaaaattttagaaaaaaaaatataaaaataaaataaataataaaactaagataaattaatgtttaaaaatattaaaagtaatttttaaattatattttttttaatattacgatttagtcatcatcatcattttttttttctggagtgttattaaaactctccaataaaatttatcacttattacaacaactatataacaccatgattcagcaaaaaataaaataaaaaaaatgaaataacattatgattgtaaaaagataacattttttctcaaaactggaaaacgatacttttcacaattttctctagaaaaacgaaaattttggcttttcttttaaaactgagtcaatgtcattattaatttaatttttctcttttccaacacctttcattaattttctcgctagtattttgatactaggtaatatagtcgttctatgggcagctaatttaatttttttaatattaaaataaatagttacttaaaaatatataattctagtaatgtatatagtaaaattataaatacagtagaacctttatctaaaaatacacttggagtcattataactaaatagagttacataagaaaaaaaataaaaaaattaaaaaaaacaatgtaacaataataacaataaataaacattaatactatatcataatagaaatattttaaagtaaatataatttcatacttgtattataatttaaaataaaattattaattttacatagataaatttacaaaatacatgtatatattttattaagatgtaattattcttatatagaggtatataattagaaaatatataactgattacaatttagaggttattcttattta

SEQ ID NO: 307818 - DNA, 1577 bp, Cannabis indica
acataattattaatatttataacacattgtatatttttaataaacattaattatttataaacttatttttagctatttttctcattgtacattagagtacaattacaaaaaataaactaaatatagctttgatatattttgagctaaatttaacttaaattatacaacttgcattaaagattgtctaaaaatataaaaatatcgtataatttttaaattaagcgtgttgatcaagatttgatacggaagttaaatgtgccatccaaatccatttaatttgtatcgttttcgaattgtgtcgtaaacttcaaaattgaaaggatatcctccaacctccatgatggtaatcttttataagaaaaatcttcacaattgtcacttggagctttgtagcattgtacacattacatacgtacaaaatggttatacatacataccgagtcagacctattatctctatcaatccttgggatactttcttcatcttgcaaaatcttgtttccttttgagactaaatctacttacttgaaaacaaagaaactcgtcaaggccatcgaatcccatcatcacttgtctcccacgatccttcaccgatctcattaaagagctgatcccaatcccagctcgagtaccccaagaaaaaccagtagtcggtgattgactgattccctgacttaatatcttcaatgttgttatacgtcgctagttgatcgagatagtacacacccggtaacacttgaggatgtttctcttccatagctgcacgagttaaagcaaccagaggcatgcctcgcactatgagtggtcccccaaagctcagaggtgcatctgttaacatctgcagcccatcttccagatcacttaaagcatcccatcgtatatgcttgttgataatcagaccttggaatccttactttgatcggccttgacaatcagattctcgatgtaccaaatggttctgtgtcgtcaagtttttcagtagcaattaggatggaaccaaccaccacttgcgaagctaatccatgcaaaccttttggtgtgtgagactcgagcttactgtgttcagtcacaccttctcgttccttgtttaccaatagaacttcatagagtccgtcatttgaagcagcagtttcaagattgatgtcggttgatgatactttgccagcagaattttgatttcttgcctctgttttaggtacagaccataagatccctatgaaaatagaattgaaaacaaataagactcaaaagttcatcctaatagaatcagaaaacatgaaatttttgtacttgacacatagtaagaaacattattatgaggatgtttgtctactctgatttcaatttgtcaaatttgagtttaagtctttatttgcgaaacctttcaccctacttgaattgtttatgaagtaccgtatgcataaacaattacctttctcaaggataagatgatgagagttacttccatgatcagcaataaatttgataacatcagcaactcccatctgcccttcataaggaatagcattcttcttttcagctggaaatagcatcagagcaggataagcttccatctg

SEQ ID NO: 307819 - DNA, 803 bp, Cannabis indica
acatgttcaaaaaaacttcacttaaagaatgaatatggaattttttttgtgtttttcttctttcagtttatgaatataattttgggttattatcttttttcttcataggaagtactaactttatcatacttgctgtattgactctggtggtcaagggctcatggcactttagacaggtattaatattttctttctttccaatgtacaaattatctgaattcatgaaacttaattatctattatgcttctcttgatttagacatagtaattgaattttaagtcattttcagttggtaaagttttattctttttcccctaataaagctttccttgaatttctttagcttcaattttgcatctgtaattaaaccctagtcctttgtgctgttggagctgattgaataaatattggcattgaaataataaataatagaaaagtaaagggaggtctctaaagttatagagaaccacttggagttcatttttttgagccttaactccttgtgtgagctgagaaatgtgtttatggagcatgattgttgatgttcttattgtgttgccttatttgacttgaacttgtgtgttcagattattgtgacaatgatatacacacttgtgctccaattcggttcttgaaagaactacgaaaaggtagttgattgataagagcgagaacaaatacaaaatcctaagttattcgagaaacttggtctttttgggccgagggtactgcttggttggcaagagacattctgctcggaatatcatactctctgtttttataggctaaactaacaaataat

SEQ ID NO: 307820 - DNA, 1420 bp, Cannabis indica
attccattccattcctattcccattcctattcctataattttattcctcccaaccaaacgccttagtgttgggttggaggcttttggtgaaaaaattacatcatatttcggtttttaaagtcccattgaagatagtcttagtctatattctattatattagcaaattgtttaaggacattaacaaaatttaatcgaaagtgaatatttataacaatttttataatttaaggagaatttcataacaaaaaagttcaactgacaaaattctataaaaaaaaattatatcccattatgctactatgaccagatacatttcactcttggcaaatattagaaaaagatgccacaatgcataaggtactcaaaatgaatatattactactagtatgatgactcaaaacattattgtatctgattaataaaaaattattgtggattttcaccttaataaaaaacaacccatgtaaaatattatagttttttattctaattgatgtaccaagaacattttaaattatttgtcttaattgtattggttgagacaataaaacacataaaaaaataatagtataatttgactacaagtggtgccgtttagtttttttttcttacataaattagtgatcttactatattccccattacctacaataatgtttaattaattttaattctatttttatgtaaaatgttaataaatatattgtgaattatggttttgctaagaatgttcttaggatttgaaataatttgtgtacatgcaaattgctatatcttcttgatattaacttattgttgtgatgctgatcattttgtaataaaaaaatgtaattgatatatttttatttatttttttttgttctaaaatctagtaaaataatgtttaaagatgaaaatatattccctatttatattgatgtaaagattattccattatagtaaaaaagtggcacctttgttattattcttgggatctcatctctcacaatcacatgcacaaaatttagacattattatttttaattgatttcactttatttccaaaagattagaaggggtgatagtaaaatctgattctcatgtgcatttttttatttttttattttgttaattaaaagttaagattgttgataaagttctttatagtaagatagagtgccaattagattgattgattgattaaatgataattgtttattaaaaagcataagcttttataattgtacctattattaattgcttttattttatgtgtttatattggaaattcttattatcgatcccaatgttattataataatttattatacaaataggaataatttccgaaaagaaaaaaaggaatagttagcaactcttcactttattattatttgccgcaacttcctaaactcaaaaataattagaaaaaaaaaaaaa

SEQ ID NO: 307821 - DNA, 1464 bp, Cannabis indica
aaatacatcaaatttacattctcggtatatttccaaaggcattaataggaacaaagtaccctatattcgatctcccacacaatatacaacacaataattataaataataatcatgatgaccatatcctacgaactagtgactgaattttaggggattatataataataataataataactaagcaaatttaccacaaaaaaaaataataattaagcaaaatttgatgtgtattattagtttggtgggatatatgtgatgtgaataatagaagaagaataatttatggggatcaccccgtcaaatggtgaactctctctcaactcaaacctacctataataatattaattactcaagtatatatagtagtaattaattaagtatatatatggatattaaatgtataaataggtaatctatattattagtgtataaatagctataataaatataaatataagccggcgtggggtttatattaattactctctctctcgtgacctagctaggtaggaactagcggtggcaattacaaacacacacatgcaccaacaaaatcacaacaaccatttatattttcaacattgctattagtggtgtttattagtaccatcaaaaagtgatattttataattgattaataatattttatgtataattattaaaataagttatatgagataagatatttaattttataaataataatattaaatatttaaagatattagacaccacatgtatcttttagtatttctcttatattttgaagaatgaattaatgtcacctattcatatggagagaatactaaaaaaacattagtaccattcaagttattatattattatgggtaaatattattttaaatcttgtgttttgtaaaagttactgataagaccttttattttgttaaatgataaaatagatcctgtattttccaaaatagtaaaaataggacattgagcttaatttttgaccattttttttaatataaccaacttgaagacaattcttaacacaaacagatatagaaaatgtaaatagttttatcataacacctttcaatcagattattattaaattttattttgacaaaaaatcagttcaggatcctatttgtaccattttggaaaatacaagattcattttgtcatttaacaaaacagagggtctaattggtaatttttataaaatacaggatccaaaattgtatttatcctattattattggttcaattaagtatcaggtctcacataatttaatttaatctttaatagaatatcgataatcactcataaagcgtcacctttaaataatacactacaagaaatgtcacttttaccagtacagttcgctactgcgctggtaaaagtaacttttaccagctcatttcgcaagctgcaccggcaaagaggtcaaagttttaccaacgtacatttgtagtggctaaaatttaactttta

SEQ ID NO: 307822 - DNA, 781 bp, Cannabis indica
atgattacaaacttcacagaacagtcatataacataaatacatcattttcaacgtaacagaaatcgaaaacaattccttaaataaaaaatgctattaaatcttgagatttgagatttaaaagctcaaacccaattctacttcaaaactacctcaaattcattaagtaagtattgaaatcaatctcgtatcaacctgaaaacaaaattatagagtcacagtatctcacaattcttctaaaatacaaagtcaacatataaaactcaaagttttcaacttaaaagaaattcaaactctttcctcaaaagcttttctctacaaaggttaccacctagctgctagcaaggtttaaaacaatagattcgggtgagaaattaaaaaaaaaatggtaatggtggcgataggtttcgtcgcacaaagaggagcagggagagagggttttattattaataataattttaataataatacggtaataataataacattaataataatataatagtaaaattttattctgaaagttattttgctattttttagccactgagaaattcctaatcatagggcattaggtcaagtcccaagtatctctaattatctcaataaacctaatatcaacttaccataacattcctatcaaaactgctagcgtaacaacctgttatgacattttggtctttgatcgagtctctaaacttaaaaatatttttattctataaacaaattattttatattcacacatgctatataaatctctgtagttaataaattatgcttat

SEQ ID NO: 307823 - DNA, 1165 bp, Cannabis indica
ttttttttttttaaatttattcacattttgatccatgagaattgagagttagctttcacacaaaacatgtttcctgaaaaaaaaaaattgctaagaactactagtaattagtacttttctcaatgttataatgttattgatgtgattaactataaaaaatattgctagataatatgtcatctttaagtggtgttaggcaccactatgccctaataataatgctatgataaacgtgcaagttcatggctattaatttgtacatttgcaattagttttatccttaattgagttaattatatgtgtaccagatacatatttattattataagtgccttggcaaagctataattatatggtatcaaataaaaattgttgtcttattgttggacattaattaattaattattaatatttccattatattattatttggatcacattgcacacaatatttgacagataataacattattttgcctttttttcttcctttcattaaactaattaaataattttaaataattaatacttaatttttctgttattcatgcacaagttgtgagcaacctataatagttgtatatattattgtgagagagccatttttttttaacaattaaaagagatagtagttgtacttctctatgatcgggaatgacattgcgtaatgcttagtttggtcgtatatacagttgcgtgcaagccagttttattactaaaatttaatcaaacatttggcgtaaacatttgattttctattttttttcttctttttctccgaaagagtgtcttagcatgtcattctgttcatatggtttgttctactgccctttaatacttaaattgggtcactatataaaactttactttcaataaccaaataatattaatatatgtattttaaaagttcgtatgaagtctctttgttgcatttgagaaatgcaaagtcccacttacacaataaaaaatttacttttatttacaacaaaccttgtggctaaaaataaaaaaattgtgactaacggtaaacaatgttaggtgtacaatcaaagtcccacattaattaaaaataaaaagaatctttgggtatataagtatgaacactacctctattggaattttttaggaaggtgcccaaaaacaaatccgtgagggcttaggccca

SEQ ID NO: 307824 - DNA, 1968 bp, Cannabis indica
acggcatagttttttttttataatttaattgatatttatatatatatttatattattgtatttgtaaaatcaagaattattttttggaaaattttacaatgcacatttttaaaagtgatgtacgaatttactcatatttgtttcggcaaccgacagacttttttagtttattttttttttatatatagtagtgtatattatagttatttaagacctcttgtaaaattttaaaaaatttaatacgctgaaaataatgcacttctttaaaagtagtgcactgatgtacttctacatgtttcggtatccgggagacttgtttactcttttttttatggtcgtgtacattatagttatttaatacattctgcaaaattttgaaaaatttaatacgctgaaaataaaatccaaactttatactgcgtgactcttttatttagatggatctattgttaattaatatgatattattttttttattttattaaaaattaatataataataaagaatatttttttagtataattttggtattgtggttggagttgaaaatactttttgacgttaaatttgatgatagtgtaacactaaatttagtgtttccttaaagatgctcttagttacacacatactagttagatcagcactttttgattttacattaaaatataatctcccacttttgcaatggagttcgaaatgatttaaatgttggtagttttttatataaaaaccccataatattcatatataatatatatgttagatgtttcaccaaatataattaagattaacatgtcagttaaattatatttatatatagttaattaatgacaaaagtaaacaaggatgtgatgtagaacatttagacatgtggatagcctattttttttggagacaactttatagcatagtacgtcatataccttacatgcatttatgatattgattatatatgtcctctttactttattgactatttttccaccaaaaacaacaaaggtgcttcaattctttgactaattaaattaattatctcaatattataattaatatgccatttttcgaatgtgtttcctaccaaattctacatccacttattatatatctttatattttattttatactacaatatatataacaattaatatgtagttatatataatcgacccagccagactgctatataagatgaaatagttattaatgttaattaatataaatacttttcctttataaatttcagtgagttgtctacttctttttcagaattattctttcttcctttttctttttgataattatctgtatttatatgtacatattaattatatatacagtaccatcacgtacctaaaaagaagatataaaaatcaagtatggctactgctcaagatctgcacattttattattaccttaactaataataataattatatatataagtcctatagctagaggaccttataattgtttttgcatgcatgaaacgggaaagaagattttcagtagtactttaactaataatgacaaccataaatatatatatatgagataagaaatattaataatattattattattattataatttgttcatcaacaattaaaattcatgatatatatgctaccccatacctctttaatgtttgaaaacgacccttgtattgtgttatagctcttaaatcttttctttctaaggtagtgaattaatgtacatgttactttgccatgttgtggtagacatgtattaattgccaaaaacatatgttggtgagaatgaatagtgtttgtattgtcttacttataaccacttgaagctagctcaagtggccataggggagtgtgtgtgtgttggaagttttgggttcgaatcctaaattatgcattgtaatatataaacgtttaattcaaaaaaaaaagtaattgtcttacttatttgtctgaccattcctatttctttttctt

SEQ ID NO: 307825 - DNA, 1384 bp, Cannabis indica
ctaaaaaacatttgtaaaaatatgtttgtacaatgcttaaaaatcccagaaggaaaacctaaatgtaaagtaagtaataagaagaagtcattgaagaaatagtgtagtgtagatatttttcaattaaagtagaataaatatcatttgttattttgtacttttgtaaataatgtactgattatgagattatgatatgatgcaaaagtttttatttttccttttttcaaaaaagaaagtccaaacaatgactaactttttgaagtgaatcaagtattattgtagtttataaaaacgtgatttatgcttagatatataaatatatatagaatattttttcgtgggtattataaataactactaagctattatgaatgaattcaaaaaaaaaaatagctattatgaatgaatataaataaaatgataaaaatgtcaagtttattatggaaaacacacttaaaaagttacagattcacatttaaaacctcataaaattgctattcaaataatgccaaaaattatagaaatttttatagactaaaaatttgataaaaagtacaaaaaaaatactttaacacgatttttttttattttaatctttttgaaccttttatttacaaaataatctttttaataaaactaataaaaccttttttttaatagtttatttataattatattataattatttggaagttattttctaattgttttttatttatttatagttaatttataattatcttgaggttgatttcttatttttttttagttgttttcttacttttcttagcaaaaaaatatatttttgtgattttagaacttttaaaaaaaaaattataaaaaatttaagttgtaaaattgtaaataaaatacaaaatcaaagtatttttgaaaatttcccaaaataatattaatttggtatttttttttaattaaaaaaacacattatgtatggaaacaccaatgaaaaaggaaaaaaataaataacaatatagaaaattgagaaagaaagaaaaaacttaataacaataaagaattttaaatatccttaaaactgaaaaattaggaatatcatatgttatttttattattatttataaggattattttagaattttcttagagataacttgaagaacacccttttttttgtgtaagttaactaaaatgacctgcaaattatattcatttacattttactacttttataagaaaattacccaatattccctcacatataccacaattgatatacacattaatttcttctattatatattctattaaacaaaatttacatagtactgacttttgtattttttataaaaaatctgccacacggtagaacttcttttttaaatgtgtatttttgtaatttttagta

SEQ ID NO: 307826 - DNA, 1257 bp, Cannabis indica
acaatcacatataaaataaaaaattataattataataggaaaccaaacagaagaaaatgttgatgataagggcaaaagttaatttgtaattacatccttatattataaaagtgttaaaacagattaattagtgtaatacaatggctttccctaatactggtttaggcataaaactttccatttgctgttatgctattttatcctgtactattatgttattgctttttacctttgatttcctctgctttctattgtaccctgccacctggcataatgccgttgtaatcattgtgcctataaatgcaatcattggcctcggtctcctttgagcttagatttattcattttcaccgtgtgtgagtattctcagttggtatcagagcaagatttgctctcaccatgtcgacaggaggaagtaagatccctcgtgcaggaggtcatcgtactggtgctgagcaacagggccagaactccggtcatcccagctccccacaggtcacgagtggagtctctcaatcgagctatcatcttggatttggaggtttcaacaattccccgtttggtaatactcttactcatcctttctctattaaactcgatctaaataattatactctttcgagaaatcttgttaccactattattaggggtcacagactcgaaagttttgtcaatggcacaagagtatgcccaccagagtttgttccagccattggagaacctggagaaaacacacccagttttagagttcaaccaaatccagattatgaacaatggatcatgtgtgatcagcttcttatgggatggttgtatgggtctatgacagagagcattgcaacagaagttatggggtgtacttcagctatatccctttgggttgcacttgaaaacttgtatggagcccattctcgtgcaaaaatggatgacactcgaaccaaaattcagactactcggaaaggaggcactaccatgaccgagttgttggaaatattttaccaggatctagatttactagcaagtatgtttcattaatatcccaatataaatttctaaaataatataataaacacatataaagtttaggaaaccttacattgggtgcagcggaatataattactccttccgttcagatctctagcccttgattcctttctatagcagaacattatcaagatctgaacctggatctctttctctccttccttgagcctgattctccttcttgttgattggattcttcacaatcttccacacta

SEQ ID NO: 307827 - DNA, 2477 bp, Cannabis indica
ttaaacaacatacttgtgagtagatctaagatcctggtaaaataaattccaacattaaatctgaaggtatcatcttcgaaattcaccccaatagagttataaaaatatgctttcagtaacccgcagcgagacctaccgggcaccaaaaattggccatcaccgccagaagctaattttcacttttagatcatcatcaacggtggaaaaattattatttttattttttccctaatttttttgggcctcttcaccaacaaaaagggaatccctagctcttgtttacattcaaaaaactaccacaaggtcagagcttctctatctagagtttagtttctgacacttgatctattgctgtaaaaccatctctgagaaataaaaattcaaagtagatgtatctctattactattgtgatataggggaagaactactataaatttattgtgtctctcttacaaatacttaactacttattgattctcaccaatctaccgagtgggtgtagtttaaaagtctatttaagatttctgagtcaacaaatttagttttaaatttctatttccttaatctagttattgcaacaatcattatgatattttttggagtattaatttaaattaacttttctctttaaaaggattacattatgagttacttttatgaaattaaattttatattttgtgacatatatacttatgccaatacaaaaattatatttattattatttgtttattatttttatttatttttatatttattataaatataatatttatggtatacatcttgttgatagtatttttttaacaaggtaatatctgcaaagatataacatcacatagacacttaaaccatacaatagtgcttatgaataattatcaatatttaagcaattattatgatattatttaataaaaaatcttgcgatttgataggaatagaaaaatatttgatatatgcaattcaaagaacttttacaatgaacttcagattatattcaaaacttactacctcagaatatctataacacatgttttgacaataattagatatagatgtaatcttctactcaaatctattagaaatgttaaaatgcttttttctgaatagattaagggtggaccatctcataactagaaaactagtagaatatatttatttgttcttgatcatgtaaatgttccattatctcctacaagagttatagatgatcccacaacttctgttgtctaacctcacgttgtaacaactaaaggatctataccgctaaagtacctggacatagaattacagtaccttatcatagtgagaggatttcaaggattccaccctattataatttagatgacattagtgatgacttacagtgatatgttcaagaaaattactttaaaataaaactaagaaaaattaatctaaccattcacatggatagttataatttatcaaaattatggcaataggatagaaaatcctggtatgtctatttaagcaaaattcttggtccatatgaattgttattttttcaacaaaaaagtttttgctatgactggtgattacttattcctaagcaactattctacactaatgaaatactaagatgttgtcttaatgacttagtctaaaggaattcattagacttctagtattaggcagaattcaacacttccgaaaaaaataaatgtcataataagatgtccccaagtaccaattgtgagaggttgaatgcgcacttgtgtatgcattaaacaagacacctagtgttgagtaagagccattaatgagtataacccagcaatggaatattgggagttattcaagaaagaatctctttagattaaaagtgatctatatgttagatgataggggtgatgttttgaacccttaaagtctacatcaactcaaatttaatattctatatatgagatggtgattactttgggggtggaaaaattattctggaggactgtaaaaactcatctataatatttaagttccaccaataaaactaaatgactatgttgcttttaagaggcactagaaagttacttaagatatacaaagttcaatactattttatccttatttcattttatggataatgtgaaagttgtatcttctatacattcatatgcacttatcatacaataaagaattcagtatcccaagaggagtgatacatatagaaaatgacatttcaaatgtcttgtgaacaccaaagaaagtaatagtggagaaggttattgcttgttataatcttacagatcctgttacttggataaattcaaacacactgcacttgatatgaacattgagataatgaattaattaaaatgcacttctaattttatattagtgcaagtaggagtttgttaggattttatgtcctaattaaataaaacccattttaatatgatcttatttattattgatagaagattagaaattatatgagtttatatgtagttttcatgatt

SEQ ID NO: 307828 - DNA, 2003 bp, Cannabis indica
tttttttttttgtaaatgaaacacacattttgcttctaaacacaactttgctgtacaccaataacagaaataactaacacctaaccgaaacctaatcaacattaaccaacttgatataatgtgtattgtacatcttaagggaaagtcttaaaaatagttaggattgttaatttattttgttatcactatttctatatatactgtaaagtcagcctttagcacttcacattttgacctattatcaataaaaacatttttttattctattattaacattagctttcaatatatatatatatatatagagagagaattggcgaaaccaaaaaatggtgtactattgatgcatatctgaaatttattctagcatatacatatctattctatatatataaaatatagctataaaattttacaaaatattttagattactacaatgtataaaactataaaaataaaattggattaaaaaattgtcctaaataccgaatcagataaagtgaatcgatggatttttttaagggtataccgtacaattttgtgaacttttatttatgttctatttatctaagaaaagaacaaacaaagaccacccttatagaatgggttgagtccagtaaaagcccaataggccgaagaagcaagagcttaacagaaaaatgacaatataattacaaactctaactaattactctataatatgaaactccccgtattacttgaaaaggcgtacttatttaaaaagattgagagtagaaatgtgtataaagcttcaataaattctttggaaagttataaatatgtgcctaaacttttacgaatgaaagttgtagatgcaaaattatgtacacaagcatcacttcacatgctaaatttctacattgttttttactctcgtagactagtattgtatcccacatgaaaattaaaataaagcatataaaaagaataaacaataaatagtttaaggtaagtgtagagcatattcctaaaaagaatgttatggttgatctttttttttagcataaaggagggtgtttttactttattttgttatcatgattatatccgttataattatttaggatcacttctaaatttttaaaagaatataaatagtttatatactaaaaataaaattttattgcacgcgactatttttttttacgaataataaataactatttgaacgttatttttaacattttaaactaagaattgtctaaaatttacagatggcttcaaatgactacaatgtatacaattatagaaaaaaaaaattagactaaacaactcttttaaataccgaatcagatatgaaaatttactaaaacaactctttaggaggtgtatcaacaaattttcttaatagtttctacttcttccatgtatgcttttctcgaaattatgagggtgaaaaatactaattacacatctagctatatgagaaaggataagatggatgacatacgttggatatgagaaaggataatgggttaaggctaatttagtatatggtaactataaggtaactagctgccctaaaatgataacatattatctcaatcgtatacattatctagctgtataactaagatatgcatgtataagtttaaaattaagtttgtgcaatcgattactagaacacaggtgattagttacctctaaaatagtaacaagctatcttaatggtacaatacattaacttgataggctaatatattatataaatatttatatatgtatagctaaattgatgtctctcgtaacaagttactaaaatataggtaattggtaacccctaattaggggtgggcatccgatccaatccaacttttttttcctcatccgatccaatccaattagtaattggatttgaaaaatcatcatccgatccaatccaattagaactcaaaatccaatccaatccaattactaattggattgtatcggttttatccaattacacacttaaatttcaatattagcttaaaaatataaa

SEQ ID NO: 307829 - DNA, 1174 bp, Cannabis indica
agaggtgaaaaatctactcagcatagtgaagtgatcattttatacctaatccacaccctgaggagctttacatatgcaatggttatcaagccagagattgcctgtgtagttacaaagtttctcaattcatgcacaaacctttagaagctcactggaagaggtagtcaaggaaattctgaggtatctaaaggggactctcgactatggtcttcaacaacaaaaatattcaacacgagttttaactggtttttgtgatgctgattgggcattagattcgatgatggtcgctcaacctcaagattttgcatttatcttggtccaaacttggtatatcctggactggagctccaagaagcataaaaccgtgtctcggcccagcattgaggatgagtatcccagccttgctaatgccaccagagaaatagtttggcttcagtcgttaactgaatttggtcttcgacatatgcatgttcataccatttggtgtgataaccaaagcaatgtgctaatgtccgcaaatactgttttacatagtcgcacaaaacacattaaacttgatctttactttgtttgagaacggatcatcaataatcagctctatgttaaacatacccctgctcatgataaaattatcgatgtccttgttaaggctttctcttccactatatttgatttattaagagacaaattaagtcttgtttctgtcccaactcaatttgcagggggtgctagacatgctctatatgttatattttagttaggataaattagttatttttgtttcacaagtctcgtgtatagttttactaacttattcagtgtggctctagtcttaagtgcctaactacatattgtatttatagagctttgaagctcataattcagtaatgaaaaattatacctctcgagatgtgagacacaaaaatccttatatcgagtatcaatagcactgagagaagggaaaaagcatggtcaccaacagagctttgacaaaaaaaaaactgagcaagagagcgggagggagcaggattgcatcagaaggtatgggttttaagggatggggatagtcgtctgtggtccaatgggcaattaaacagtggtctccattaaaggcgactagagtttggggatcgcgccaaaaatggagaacaacatacattctctctctctctct

SEQ ID NO: 307830 - DNA, 1782 bp, Cannabis indica
tcgattgaagcattgggaggcgtctcccactggagtcagtgaagcccatttgaagcagatctcaatgaatgaaaaaaacgaagaacacagaaacccaaagaaagagagagagagagagagaaaaagaaagcaaaaaagaaagtgaaagctgctttgcgtgaatggtaggagagaatctttcgagagagagagtatgggaaatggggctgaacagctatatgtattgtattacgattagaaatggaataatttaagctgatagaaagttgaaaaatggagggagggccccctaatgggtgtgtgggaggaataatacagaattttgatataataatatgtgaatgtttaaaatgttttgtgtttgtctgggaagaaaatatattttgcagagaaagaaacaatggggtcttctgtctgctcgttaaagattgaaggaaagagagttgatgacacaacacaaccacaaagttaagaaatctcatttacataatagtaataacatacattaaagaaaaacacacacaaacaaacctgctcaactttcgcttaaatttttagtataatatatagaatttcactcttctacatttactagaatacaaaaatagaaaagaagaaaggttttgttgggctaaacataatagaaagatacacgtagagctcatgctcataattatcaattaattaaaaaaacagatgaaagaaattgacgtggactgttcttttcactcttttttttttttttttggtataaaaaatgtgtgtttgaaagagaaagagaaagagaaagtaattagaaagaagctttcatggattactatgcgattatttttggatttataaaatgattaatcaacacccaaatcaatgcattattattatgtttttctaaataattgtaatgatgaagttaagcttgggaaaaaggtaaattaataatggagaaatgatgtctaaaatgggtttgtagtttggtgaccatccaactcctcccaacccccaacaacccctttttgacaccccaacttagccattgagtttgagatttcctcttcttataacttttttttttgaaagagtcctcgtcttataacttaattgcaacttattatcatcatcatcatcatcatttggtttctatttaaattgggattattgtgtatcatatcatatatatttgttgagctaataaaattgcttttataaataatttaattgaaaactaaatattggcgtatcctctaaattataaccaaattatttaaatatatgtatatataaaaagaaatagaccaatgattttatataaatatgtcaactcaacaaacaagttttccatttcaaatacctacgaacataacagcctctaccgatctgctcgacgtttaggacaataattgtgttcaaatacctttttattttcattaaatattaaaataataaaacaaaacagtttccattttgcaatattatataacaatgtgataatagaaatctcttttatctattttttttttctttttgcgaatttctttatattcattgaatgagcacggaaactgatgacaattattataatgtataatataatgtaattaacaatcagctttttgttataaaataatatagaatacatgagaataaagaagaagaggatgatgatgaagagagaaaaagagagtaaatgagaatttctcagttgtttattctaatacaaatacaagagtcaaatattaagaaactaaaaaaaaagaaaacaaagaaaaaaggaatattgattac

SEQ ID NO: 307831 - DNA, 4250 bp, Cannabis indica
cgatcgagaaacaattctaatgaattcgatcccgtttacttcaatcacaatatgtctattagactaaatgatcacaattttcttttgtagaaacagcaggttcttgttgcaaattcctggaaacatattgtaaatattgttcattcaagatcgtgctcctccacctcagtttctaaatgatgctgatcaagcttcgaacaatttcaatccagcttttcttaaatgagaggttcaagatcaactctttgtttcctggcttctctcttcaatgacagagagtctccttacacggatggttgggtgtaaaacagcgagacaaatctagagtgctctcgaaaaacacttcactctacaagtttcctccaagatcctggagtttcgaaccatattacagaaactttgaaaaggctctatgtcattgaatgactatctactgaaagttaagcaacatgtggatctccttgcctcagttggagaagttctgagcctcccagtcccaaccctcccaatgcccaagcaaatgttgctcaaacaacttaagtagatgacagcaactggtatccagattatgttgcatccaatcactatactcccaatgtccaaaaccttaacatcagcactgaatatgaaggagcagatcaactctatgttggagatggttaaggtctgtccatcaaactaatgaacaaagtaaaagtctatttgttaaaatcatcaaaacctctcatgtaaaactatttaatatcacatttatagttttaaaggtagaaatccacaaaagaagaatgtttccacacagacttagctctaggacagtggatgagagaatgagacacggtctcaaaaacattgtggcaaaagggacagtaaggaaaaggcaccaccctcttgttaaaaaggttaagactgaaagggaggatatggtgaaaagctttccaggtaaaatgttttatttggggaagagttttggcatgccagactgttttccaccgattcttaaaacagacattgttggaggaggggagagcttggttgtgatgagagttggccaagtgttaagcagaattgaccgtgaaacagccagaggagtgatgaccccaaataagagtatcattagaaacagggtcaatggaaattttaaaaatttcatgaatttgaaaagaaggcgtgaagtgtttaagtttagagagatcccaacaaccatcctaattgatgaaaaaaagatacatgctgatccacaggttaaaattattcagaaaagaaagcgaatggaggttgggaacccatcttgaatcaaggagagggatagacctaccattaccaactttccaaacaagtccctctttgaggagattcctgccccagagaaagctcttccaggtgttagaggggcaatggcccttaggagttgtactaaatggtatccaacatcatattgatatgacaaattgtgattgattagttatttttaatattatttattaaattaaattatatgtgattcgatattaatttacactaataatcttgtggtgcttcacaacgtaagataccccaaactcaaagcatttctctttaaacaaactcttaactttacagctaatatgtactatctctttagttttaacaaaaataagtaacaaaccaaattttgtgtggtatggaggaaagaaatcaaaagggaaaataaaattatggaacaaaagaaaattttcctatcttatttggtaataaggaggtaagaaaattttcctcacatgaaaattattattttcttcatatgttttttgttttaataaatttaaatgaggatagtttaattatttagtataacatccttttctcctccatttccactttcactattaggagattatgacttaactataagtatacaaattctacaaatcactcatacatgaacaatgtagtacaaaatacaccattttaattatatatatataacatatgtattgctgtattacataaaattttgaaattgtagctcaaatagacctaatatttcttttagcaatataagtacccaatgctagtaaaattatcttctcagttagttttgtgaggatacacgtaagataacttctaaattattaaattttaacaaaaacgtgtagtattaattatttctaaatcatctttcaataaatttaaaatctggttacaaatttagaaaatttacagaaataaacaaaaattacaattttaatataacatggaatgcttataaaaattattagatctatattatttacaaactccaaattttagatactcatacctcaaatatccctacatataattgtttacgtgattagaaataagtggtacgtagttggttactattactactagtacttgaaaataacatattagttaaatgcaggaggaggaggaggaggaggtttacgtagtggactttgtaatcctctgcattggacgtttcagcgaagtaccaaacatgcccgaattccctccccacaaaggccccaatgtatttcaaggccaggttatccactcaaacgattacaccgccatgaatcataaaaccgcagctcaatttgtaaaaggcaaaaaagttactgttgttggctttcagaaatacgccatcgacattgccaatgagtgttgcaacgcaaacggtcattattctcaccccctaaaccaaatcatacatgtacctaataataaactaacaaaactatataaataagttggttttggtttggcatgtaggggttgaaaatccatgcactgtgttatacaggaacgcgcgctggaccatgccagattacatgccatgggggttttctatagcttatttgtaccttaatcgcttctccgagttacttgttcacaagccaggcgaaggttttgtactttgcctcctcgcaaccatgctttctccactggtaaactatttttctctcttcctgcaatatttatgaaactgacacaggctttgtcgtaaaaaaaatttatgaagctataataatttgagaattaacagagatgggcattctcaaaatttgtggagagtcacataaaaaataagcttccattagaaaagcatggaatggtaccgaagcataggtttcatcaggaaatcaatgcatgtctaattgcaacagtgccggagaagttctatgagcgagttgaagagggaagtattattttgaagaaagctccaagttttggattctgtaaagaaggtattgtgattgatggggaagacactccaatgagcacagatttggtcatattggctactggattcaggggtgaccaaaagcttaaagacttgtttgtctctcccacctttaaggactacattgttggagaccccaactcagccctacctctctacaggtttgttagctctaaatagtctaggctgaaaatacaacaacaattaatcagtacatataactgttgttatggttatggagttgcactaattaaatatacttgtttcttttttatatcagggaatgcattcatccaagaatcccacagctagcagtgattggattctcagaaagtgtttcaaacttgtacacctcagagatgagatgcagatgggtatcggagcttctggctggtacttttaagctaccaagcatcaaagaaatggaggaagatgtggccaaatgggatgagttcaagaagcgttactctggtcagtactacaggagatcatgcatagctgccctccatgtatggtacaatgaccagctgtgtaaggacatgggtttgaacccgaagaggaagaagggattctttgctgaattattcgagccttacgggccaaccgattacgtttcccctaaggaataatgagccttgttcactctgctcttacttttacctgttatcagtaccagctattgcaaaatgtgattgaactttattataaatcacatatataaacaataaataaatgttattaacaatgaagttctgtcccagattggttttgaaatgataatgtatctttatctatatctaccaatattgttctcttccttctggtagcaattgaaagtggaattactgaaaaaaaaaaaaactaatgcaagaatgtgttatcacaaacttaaaatttacacctgaaacctctctaaaggttgagcatgttacttggtttgatgtctttgaactttcaatgaccttcagaatttgcacaactcaattggccagctgaaaagtagggtcaagcagctttaatctca

SEQ ID NO: 307832 - DNA, 3269 bp, Cannabis indica
ctagttagggtgttacacctgctcctcctcatcatcatcatcaccatcaccattctctccagactattattgtggaatttgcggcatttgcggatagtatggctgctgcgatacttctgacattggtagtgcggttgcgttgtacttgtggcatctgttgcattagtgtcatcggagacaactggtgcatcatcacaataatttttcgttatccaacttttatcgatcgccatctaagaaaatttttaaatgaagaagattattaaatttgtttaactcatattcaaattttcaattttaaaaaacttatgatgaattatcttttattattattattattattattattattatttgatgaatcaggaatttcattgcacaataaccttttatattacaacctatagctcatagaagaacaaccagttatacatttatctataaaacaaaaataaaaactaacagcctcgtataaatcttgaaaccattccaactctttttgatttatacattttggcattacactagaaattctgtttttgactagcttttttatttcctgcaccaatgtttgctgttgtgtggactcctgggaccatagtttttgattcctaacttgccatattttatacaccaaagcagcaatacatgttgtgtagcagcagacgttgaaattatcttttattattatgaattattatttacttacttaattattttaattattgagtttattcattatttttaattattatgaattcattttttacttaaattttttttttgtaaattattcaaaattataaaactttttaagttgattaataatatatcatatatttttctattttaaataaattataatgagtattatgatgaattattcatatacttaataattataaattaattttacatttaattatttataataatgatacttttaacaaaattaaattagtttgtatttcacatctgacgtttttttcattataaatataaatgataaattaggtttttagttaattaataactattcaccatactaattaaaatataaattatttattaattattatataatcttaaaaatactaacttaataaaattttgaattatctacttaaattttaatattttaattttttattaagtaaaaaatgaagtttaaaattaatttataatttatatttatttttctactacaatttagacaacataacaactataattggacattcttaaaaattttaaacagaaaaataacaattaaaacaacctaaaataataacaatcaaaacaaaataacacttcacaatgcagataatttcaatccatccgatcgcagtacatgtcacagaacagaacctatttcactatgaatgaatatgtaagatattcaaactcttgtaatatatatatccatattaataattaaaaaataaccaatacttatcttaaaatgcaagttattcccaaagatagcgaacactgaaaataaagactaacttctacaaagaaaattatctcaaaaataattagtaatatatttacacataaacattaagctcatgtatatatacaaattcatgtgcatggcaacatacatatatacacaaaatataatcaaattaacacaatttttcttgtaccttttaaataaacatcaaacacatatgcattcatacattcacatatatatatatatacacatttgtatagtgttagtaatatatttacacataaacattagcacatgtatatatacaaattcatatgtggcaacatacatatacacaaaatataatcaaactaatacaattttttttgtacctttaaataaacatcaaacacatatatatcatacattcacattcacatatatttgtatagtgtttgtatatatatttatacattcacattcataaactcatcaaataaacaagatatacaatcttaagaatctaatttgagagattgtataaaaaactacccaagatctcattctgaataactagtgcgacgaataaagtaataaatcattcttttcgcgagaagcatttgagaaatggaaacacatacttaacagtgtgatttgcgagcagctccaaaagaaaattagaacaacgactcgataaaataatcgttttcagataaagttaaaaaagcggttaccagcaatcaattcatttattccatatgttataaatacgaaacgtgaggattgtctacgtttcatgagcagttgtctagataagactaaagagaataactgtcattctgaaaaatcttataaataggaacagaacctaccagatgggaggaattttttgggagaggaatcaccctagagaataagtgttgattatctagtatttctcatatttgatattgattatcttgtattctttaaagatttataacttagaaataatatgaactcgtggaccatgtagatttaactataaaaccacgtaaaaattgttctttcacaattatcttgtgttaacgctactaaatacccaaagctcaataatagcggcaaaagtaccgaaaaccatatttctgttatgtccctaggtactctttttaacagaactgttaaatatttttaaaatgacacgtgttaatctataattgattttacttataaaacttatataaaaaacttttagaaaattaattttaaaaaatacataaaataaaaactttattttttttttaatttctttctctcgtactctcgctctcccctttctttctctctagctctatgttatcatcaaattataaattatataattaatttcatatatatataatttaaaacttcttaattatctgtgcgaaacgcgagttgtttactagtattataataaacctatacaaggtatatatatatatattttttgaaacaatatatatatatatatatattacttaagatgagtatgaaatttgtcattattttgtgtggaacaaaacatttttttttatatataaaaaacaatagtaataaatttttgccattagataggaggagtgaagattaattttagcaaaaaaaacttcaacattacacagtacatacatgcatacatatacaaataaagcttaattataatatatatatatatatatatatataatgtctaaacagattgtcccttcttgttgttgtctgttgtaattccagcggaaataactttgatgattcaatcataaaacctgcaataaaatcacaacttggacaataataatgaacataa

SEQ ID NO: 307833 - DNA, 2520 bp, Cannabis indica
agcttggtcttgaggtaattgaatctgtcagtcgataatggctttgttaggatatcggcaacttgatcaatagacggaacatatcgcacctcaagttgtttggccaaaatctgatctcggatgaagtgcaggtctatttcaatatgcttcgatcgggcatgaaataccgggttggcagcgagggaggcagcaccttggttatcgacccaaattatgggtgaagagggtaagtgaacattgagttcttgtagaacagaacacaaccatttaatctccgaggcagtgttggcaagagctcgaaattcactttcggtgcttgaacgagcaacaacttgttgctttttggcggaccaagatatcaagttaccaccaaagtagacagcataaccccccgtggaacgcctatcatcagggcagctagcccaatctgcatcagagtaggcttgcaaacaaagtctagctgctggtcggatgtgaagaccgtcatgtagtgtgccttttagataccgaaaaagtcttttacatgcctcccaatgagtggttgtaggtgcgtgaataaactgacttaaccgattgacaatgaaggccacatctggccgtgttaaagtcaagtattgtagcgcccctaaggtgctccgatatagactttgatcttcaaatggttctccacaggttaaggaaagcttttgagaagcactagtgggtgagggacttggtttagctccatcaagatgcaattttaccaagagatctgatatatatttggattgagagagatacatgccactgttatctcttactatttcaacccccagaaaataatgcagtgaaccaagatttttgacagcaaaaactctgttaaggtcagcaataaggttcagtattatcttctcatttggacctgttatcagtatatcatcaacgtacactaataacatcatgaagttggcaccagacccgtgaacgaacagagaggtatcggaccgggaagccttgaaaccagcagcatataaagtttgtttaagcttctcattccaagctcgcggagcttgtttgagaccgtatagagctttgtgtaatttacacacatgatgaggcttttcgggatcaataaaaccttgcggttgggtcatatatacggtctcttccaatgtgccattgagaaaggcattggagatgtccaattgagtgactttccaattattagatactgcaagagtaagcataacccgaacagtggcaggacgaacaactggactaaacgtgtcggtaaagtcaatacctggagtttgatgatagcctttagccaccagccgtgatttgtacttgtcaatggtgttgtcgggtcgaagtttgactttgtgcacccatttatttcccaccaagtgcatcgtaggatcaaacggaactaatgtccatgtgccattcttctttaaggcaaagatttcttcctccatagagttgaaccatttgggatcttttaaggcttgttgcaaggttttgggttctttaggtaaggtggtgatgggaagaggatatcgggttgcatggtaagctttaggtttataaatgccagctttggaacgagtgagcatagggtggttgttggctggtattggggtgggattagttgttggtggttcaatggatgcggctggggcagtatttgggtgattggcagcagctggtgtaggttgctgaggcaaaggagggctgtcatttggtgcattattctgtggcaatatggtgcgacatgttggaacagcttgctggtttgagtggctgctggtgtggtgaatggcactaggcaaagaaggagcagcaggagtagcctcggggtacaaaaacgaagtgtcagtggccataaaatcagtacaaaaagtagtagtgggagaaacaataggaggagaggacatcacctggttgttgttgttggacatagcagggaagtccaactcattaaaggccacatttcgtgcaatataagtccttcctgtgggatgttgacataagtatcctttatgagacattgaataaccaacaaaagtgcatttgtccgatcgaaaatccaacttgtgttgctggtaaggtcgtaaatggggataacaagcacacccaaagggcttaaggaagtcataatcaggtgccttgtgaaacaaacattcataggggcatagatcttggatgactggtgatggaagcctgttaataacaaatacagcatgctgaaaagctaaccaccaaaatgttagatcaagaccagattgtgcaagcaacgtgaggccagtttcagttatgtgtctatgttttctctccgccctaccattttgttcatgatcgtgaggacatggatgttggaactgaatcccatgctgagataagaacttagagaatgatctatactccccaccccaatcggattggactttctaatggtgagactaaatggttttcgtaccagttttttgaactcaagaaaggtggcataagcttgagacttaccgagagagggaaaatcca

SEQ ID NO: 307834 - DNA, 1392 bp, Cannabis indica
acttttctaattttaaaaacaaaaactgattaaaaaaatattaccaaacgccaccaaaatgtttggtaactatttcaatttttagtttttgaaataactttggcttttggaggtcactgtggaatttaaaaatttctccaaaagttaataatgtgttagctactaagttatagttttatgatagagttttgataattggataaaatgttatatttaatgtgatttttgtatatataaaaaaaaatatgtgaatgttttgttgacttatcaagtgtgtcgtggtggtgctaagaatattcttcatattatggttgaatgtatgtttgctaatttttgttggcagagatttgatgatttggttttacaatccctacaaccagatttttttggttggttctctaatgtggcgtgctcgtaatgatttggtttggcaaagcaaaaattttgttgctaatagagttgtttcatctgctctagcttatcttaatcaatagatgaatgctcaaaaacatggtacttgcataagggaatatacttcttcctctgttgtcggtagtgagcatttgatgatacctattgttaatatgacaaagttcaatgtggatgtttttggtgttactgggactggtagttttggggttgaatgagtagcgcgtgatcatggtggtaatgttattgaggcagagtcgaaatttgtgtctcgttatgtacagccgaatatgacaaaagcgataggtgtcaaggaagttcttagctggattaaacaaatgtcttcttcgtctggcttgattattttggattgtaaacgtctatttgctctttttatgcaatatttatattgtctttgttaagttatctgtgaataaggcaactaattgtttggtgtgttttacttgttctttagcatttatatactaataaaataatacttgtgagagatgcaaatttcagctataaaattgagcctttcatagaaagctgattgactagaaaaattactagaatcatacatcctcttaatcttgtttaccttttaatgtgatctaatagtcaaagtagttcatttgtacagaaaaaagttctttgaatatgtattaaagtattttattaattcggtgctacttttccttagtgtaatagattgcaattattggtacattttattaagtaaaaacaaaagcaaatgtgctttggaaatagttatagttaattcatttttcatttggtgtaatggatggtaattattgtatatttatctttgagaaatgctaaagggcaccactggtgcctagcaccctcctacgtgtcaatatcgctattggtgcaattaagtatcgggtctcatatagtttaatataataatttttatagagtatcgctagccaattgcaa

SEQ ID NO: 307835 - DNA, 2489 bp, Cannabis indica
agtttggctttaagatagtgaaaacgatctttgggaagacacttagtaaagatgtctgcaacttgatcaatagtagggacataacgcacatcaagttctttatttaacaactgatctcgaacgaagtgttgatctatttctatatgcttgcatctagcatgaaagatgggattcgcagccaatgaagcagccccttggttatctacccagatgacaggaacatcagcaagttggacatgaagctcactgagaagagaccggagccatttaatttcagcagccgtgttggcaagagcacgaaattctgattcagttgaggaacgagccacgacttgctgctttttagccgaccaggagatcagatttggtccaagaaaaatagcatagcccccagtggacctacggtcatcaatacaactggcccaatcggcatcggagtaggcagaaagagacagccgctgtactggtttgatgatgattccatccgagatggtaccttttaagtaacgaagaagccttttgcaagcctcccagtgaagatgagtaggtgcatgaataaattgggatagcttgttgatgatataagctacatccggcctagttaaggttaagtactgaagtgcccccaaagtacttctatataacgtagcatcttcaaaaggaactccttcatgtaaagacaattgctgggctgtagaagtgggactggcacaactctttgctccttctaagtgaactttaagtaaaagatctgttatatatttggtttgggacaggtataaaccttcagatgtgcgatgcatttctacccctaagaaatagtgaccttgtcctaaatctttaagggagaactgggcattcagatcagtaaccaacttctgaattagagaggtattcgggccagtaacaagaatgtcatccacgtacacaaggagaatgacagtgttcaaaccagtaccatgcacgaaaagggatgtatcagctttggatgcagtgaatccccagccaagaagagtggattttagcttgtcattccatgctcttggggcttgctttaagccatataaagccttgttgagtttgcacacatgagtagggaacttaggatcctcaaagccttgaggttgactcatgtataccgtttcttgaagatgaccattcaagaatgcatttgccacatcaagctgcctaatttcccacttatatgagattgcaagggtaagaacaagtcttacggtaaccggttttacaactggactaaatgtatcttcatagtcaattccaggcttttgaagataccccttagcaacaagacgagattttaatcgatcaagggtaccattggcattaagcttaacccgatgcacccacttgttcccaattaagtgcatatgtggttcatatgggacaagagtccatgtcccttgagagataagagccttgaactctgtattcatagatgcaaaccagccagggtgatggagagcagctttaagtgacttaggctcagtaggaaatagcgtttcaggaagtctgtgtcttgtggccagatatgctttaggtttgtatatacccctttgagaccgagtgaccatggagtgagttcgaacaggcacaacagaactagaaccagcagaagcacgaccaatagctgctgcagtagtgatatcaggaggcaaaccagttgatgtttgtggcaaatttgtgttctcagcagggagcataggggaagtgatggtggtggcatcaggcacagcagtagcacttagaaaatctgctgaattgggagcagcagcagtggcatttggtgcagcagccggaactggtgcagcatcaactgctggggcagatgcaaaaccacaggttgcagcatcagctgctggtgcagatgcagcatcagctgctggttcaggtatttgaatagggactgaggcagcattgtgagactcgggcaccacagagggagaatgagagacaatattaggtactgcagaattataagatgtggaaaattgagcagtaggaaaattgataggtgaagtgggtacctgagatgaacctgtgattcttgcagcagggtagtgaaactcattaaacaccacattgcgagcaataaacatcctgccattagagttttcacataggtatcccttgtgtttgggtgagtatcccaagaagatgcattcttctgacctgaactccaatttgtggtgattgtagggtctcaaatgaggaaagcatgcacacccaaaggccttgaggatgctgtagtcaggtgactgttgaaacaaacactcaaaggggcttacatggttcaaaacgggagttggcattctgtttatactgtaggtggcacattgaaaagcatgccaccaatatgacatgtcaaggcccgattgagctagaagagtaagaccggtttcagtgatgtgtcgatgtttcctttccactcttccattttgttcatgagtatgtggacaagagtgttg

SEQ ID NO: 307836 - DNA, 3275 bp, Cannabis indica
atgaacgttcagaactcagtaccatgttggacatggcagtagtggctcagtaccatgttggacatggcagtagcgggactcagtatcgtgttggacacggcagttagaattatgtatgagtattattatgcttttcttactgagtctgtcgactcacagttctacgtttatgtgtaggtaaaggcaaggctaaagctgatggaccgtgagcgagcttgtgaagattgtacatgtcggggcggttaggcctggagcgtacgatcatcgggacagcgaggctgatttttgtaactggtcgttagacgacctttattttatgtatcagttaaacagttaaatctttttgtaaatgattttataatcgggatcccgagtcttttgtaatattattttataagtttaattaaaaagcaaaattttaattaatcacgtttttccataaacctcgttgattagctcaagagtcgggcctaataaaatatataattatatattatgtattagtaacatacaatacatgtttgtttaaaattgtattagagttgttattacttaattataaatttaaataataatataaaaatttaaatctaatataagttaattatatttttaaaatatataaaatttaatctaattttatatttatttatttataagaaaatgtatctaactaatattttaataaataaattaaatttagatacttaaaattatttttttaaaaaaattaattgattaatttaatagtgttaattttaaccgttaactttaacagaaaaattataaaaaaaaatctgttaaactaataatttctattaaatatttataaaaaaatattatttagttagcgaaaaattcgttttgagaagatatatttttttaaacaagaaaaatatgtattaattctttaaattcatttataaatattaaattacttctaaatgagggtgtaatttttgtttttgactcactaaaaattaaaaccgattaaattccacaaaatttaatttaataaatattataaataaccgttaattaattacaatgtaatatattaatataatattaaatactttaagatacctaatagcaatactaattatataattattgaaaataattaaaataagagaaatgctaaagggcaccagtggtgcctagcaccttcctatgtatcaatatcgctattggtacaactaagtatcgggtcccatataatttaatataatagtttttagggtatcgctagccaatcgcaacgcgacatgtcgcaaaagtgctaggcaccactggtgcctaatagcaatgctcttaaaataaatatattcttttcctataaaatttattatctactctacttatatatgcatgcacccacgtggctgctatctaccatatgtaattcacttctttttcaacaaccttttattattaataataacatatatttaaaaaataataagaagaaaaagcatatctagtatccatataggtaagatctaatgatccaatttttttccccattaagaataaaaacaaagtactttttaatttcctttatgagtgattatgatttttagattaactaaagtatgtcgggtttacttttaattatttacttaaaacctaatcttgattgacaccgacaaatttaaaaataccaaaagatacagatcatgttttactttctaaataatcatatcatttaagtgtaattaaatattgagtcgcatataatttaatgaaataattttaaaagaatattgataataaattataaggcatcacttttaggtagtactaagtactaatagtgtctaataataatgctcataatttaaatatctttcacttattaccctagattttattgaataaagcattgttatattgtttgtagatacatgttgcatctatctaaaataattaggatttgtgaataattagcgatttttataattattaaattaaaatatataaaatttaatatttttttttatttgaatataagatgtgatacttaattacattaaaaaataatattcaatataccttgtgggtcttcgcattgagaaatgagattaataatcgcaggagattggtaggattaacactctcattccttttaaaattataaaatttaatttttaccgtcttttaattgtttttttattaaagaaattttttttaaaaaattcaaataaaactttaataaaaaatatttttgtaacttaaaataaattattctgattccaaagtaatgcaaacacattaatgggaatattacttattctgattttaattgagtgtgaatttgatttttaatcaatctaattctttatcattccaaatatacttgtaactaaacgcatcataatattaataagaaatctttgtggtactggatatgaccactagtgcctagggatgtacatttctcccatgaggatggggccttgcaaggacctgccccaggtttctccgtctaaatggagaacgaggattactttttgtctctaatgttaaatgagacgggaacggggattactttttatttccgaatgttaaatggggcgagaatgggatcatactccccgtcctgacagggactcgcttcgtgttttattttatatttctaataataatttacaatttatgtttgtattttgtttagtatattattatgttttttgtgaattttaagttatgttttggataataattagttaattgaataataattaatgtgtaacattttaatttgtatgttgtttaatattttttatatattaaattttttattataaactttatttttttattagaggattctccgccccgtctctgtccccattaagggattttccgccccatccctcatagaaaataaacgagaatggggattaaaattcttaacgggaatgaggacaggaaacactccccgtcaattccttgccccgtatgcatccctacctcccatcaaacacatttttttgaaagatttttactgctgttacccacagatttattttattattcttttaaaaaacaatggaagaaagtcacgtttaaagagagggttaaatatgttgggttatatatgttgacaaaaaaaagtgaagggttatattagaagtgtaacgcataatctacagcaattgcatgcctgccatattttaattttgcaggtgtaactccattttttttttgggttcagtaatcattagattcattacttattattatcccctttcaagaaaaaaagaaatcat

SEQ ID NO: 307837 - DNA, 819 bp, Cannabis indica
ggagttgggagtcttctcatgtttgtatcattcttcttttaaaatagtgtttacttaaaattttgactctgatgaaaaaaaggaagaaaaacaaataataatgtaggaatatataatctaagattgaaatgtcacaataaaatatgcttcttttttaatacaacttcaaataatatcaaaatcaaaagtttcattaatagttttttttttttttttttgaaaatagaactatggaaagttcattaaagtaaataagttggaatcacaaaaggggatccctccctatcgaaatattcatcaacataattccaattcctagccctcttagctaaggcatcacactccatattgtctttacgaatttaaaaacagaaactacaattaacaaaagtattggacacagagaacacctccaccgccatatgtctcagtttccacagcggcgggtatctcttttcatgaagagctctgattaaaaccatggcatctgaggcaataacaatcgacctgaacccttttactgcagccagttgcaacccccacaaaatcgccatcatctcagcttctgcagcagactctgctttgtctttcctggcaaaccagaaaactctgttttcgcgaatatggagcagtcccaccgctaaccctgcttccccgttcttccaagaggcatccgatacacataacacctccgttgcgacgttaatttttccaccagccccgcctgtatcttgggttttactcgctggcccatctgcctccacagccaccatagcttcggagaacttcctcaagatcgaggatctgacctctgtgatg

SEQ ID NO: 307838 - DNA, 801 bp, Cannabis indica
aactttatatacttatgccactatttacatttgttaaaatgatatgcacactttgcgttaaagccaaaataatattttgattaccttttgttattactatatatttggtttcctctcactttcttttaattttttttgtaaagtgcctttcacttcctttaagtatgagtagtatttttgtgtcgtgtgatatttggtttccttatattaaaacagtctaaggtgtaataataataagaaaataataaataaataaataaaagactcaaaactatgacaagtattatttgtgatgagtattgttgaatattattataaggggatcaccaaagggtcttgattgtgctctcaaaatcagaatcttaattaagataaaagattgatgtatgcatatttgaaagggttaattttagagtaattaccattttttgtccctttaattttttacactatcaaattgtgttatacggttcgttaataatacccctcgaaatatgacgtttataataacatagttattccattatattttattcaattttatcatgaaatgaataacgtaataaataataatttataaatgtatacaaagtaaatacctttcattttttttagtttaccgattaacataccactaaaaaaaatcacctttagtgataactttttagtcacaacaaattttttttgactaaatatgacttttagtcacaacaaaaaagttttttgtgactaaacatagtatttatatacaagttgtcactaatttagttttagtcacaacaagtattgtgactaaaaata

SEQ ID NO: 307839 - DNA, 991 bp, Cannabis indica
ataaataatgtttctcatgaattatttcttttcaaaaaaattaaaatatatcatgaaagaaaaaaggagaaaattcccagcgatatgtagattaatgtagtgtaatatgtgaataatgtcttaattaattatagtgtggtaacttcataactagaaaactagcacgtaaactcgcagtatattatatagctatatatgtatagatcctaactagtgcaaagccttccataatttttatatatttatatgtttttcttctgaatatgtccctatagctatatctttctttcttggaaaagctaggtgtaatgtcttgcaatagtctcatcgactttctgaagattaataaaaaaaaagaaaaagaaaaaagaaggaggatataataataagttcaacgctatggctaacatttgtagttatacatttcatctacaaactaatggcgaatggtccaaacaaagctagctattatagaatataagaacttataagaagtcaatcagtacagttacactctctctatacataataaatataaatggaccacactcatcatgaataattaaactaaagggatccatgtatgtggtaatattaaaatctatggtccaaaccaaggatatatatcggcatgcatgtgccgtaacacatccatatcctacaatttcaaaggtggaaacttataataccatatataaaaatacatgagcttatttgtcatttgattttaaaatgaaattaattttatgtgttttacaatatgcacaccctacctattctatcctattaaccatatacacttccaaattcttataattaaaaattacaactcatatattttaatttaataatatactaaatcatgatcaccaaaacgttatgtcgtgatggataataacttaattatgacaattatgttatattatatatatatattgatgagtcatgactgatcactccatctgtatagctatatatgtatatatatata

SEQ ID NO: 307840 - DNA, 1873 bp, Cannabis indica
ttttgcaaacttatatcttaaaattcttaaaaataaaatttttccacataaaaatgtagttaaattaaaagaaggatttttaattaccatcccacatgaaagtctcttgctctttgtgcagcataattatcagcctttgatctagtaagaggctcataccatgaaaagtctagtagaataccaattcttcccttttgatctgcctaaaaaataaaagaaaatggcaattatagtctaaccaatataagaatactaggttacaaatttcggttatttttacttgaaatttttggcgatatctttgaactgcggcggcatgagataagattaaattatgggcagcaatgtaaggctcagtagctgaattcccagctgtgcaattcccaaatggcttggaacaccttcctggagcatgaagcccattatcgtacccgagcgcagccacaactcggggctcgttgaatgtcatccagttctttactctgtctccaaatgtcttgaaacaaaactctgcataatcagcaaaatcttctctgcaaaaatatagtgtgaatatgtttaattattatagtgttttatataattttgggtgtttctgtatttgttttaatggtaatttggattctgttttaaacattcataaataaaataataaaataataataatatgtgcgcttaaaatataaatcaaaactttactcacattaatattaatatgaaagttatgatagaaaaaattaaaaaaaaatatataaatattaatgtgtgcacccaaaatattacacgcaatgatgttatattactgagttattgttttgatacgtatttgagttaataatttattcaaatttacaaaactgaaattcatgtttgtaagtgttagaaactaataatccaaattagctaaaaacaagaagagtattaccattaaatactagtgatatctaatactatcattaaggtagtattttatattcaaatagtaaattttaaaaataattattaatttaaaatatatgagattcaatactacattgcgttataacatctcaattctcaagtgttatttagtatcactggtgtcctttaacaattctttatgataacacaaaaagtgtaaacttgcacacttaaacttgttattagtatcggcggggtaggcctgtctttagggctcacctaacttaaaagctcaaaaacataagatctcaatttttttttactgattttaaaaaattctaaactttttttacataagatttcaaatttttttttcttatgatccactaaatttcagaaccggccctgtgtgttatttgtagatttgaatgggtaaaagtgtgttatatatacttacataacttgcttattcagccatcccaagtatttctcctcaagagtctcaggaagatcatagtgataaagatttgcatatggtgtaatgcctgttatatgaatttaaaataattgtcatttttctattatatttcttataagattaaataataaccactaatttgtgatataatcaacaaaattacctgatttaagcaagtaatcaatcaacctattgtagtaagcaactcctttccaattcacttttccagtgccatctgcaacaaaatttaattattcaaaaatttaaataaataataaaagataattattttattaaaattgtataaaaataaatacctggaaaaattctggaccatgaaattgaaaatctataagcatcgaagtttaattttttcatgatattgatgtcttcctgaaacacacattgtcaaaaaaaatttactaatattaaaaaattattaaaaggcacaattaaacttcgatgtattaatatcgctattagtctaattaaata

SEQ ID NO: 307841 - DNA, 1252 bp, Cannabis indica
gtactcatggacattatcgggccgacccggtaatgcatctagagatgttgctagatgtcagctgttacatttcatttagcttgtcggtatgtcgtttgcatggaacatggcctaaacctgcaagagatgttgtggtgcaccttggccatgggtctcaaaataaggtcagatgggtagtcattcatgagctagtttgcatacacacatgggatggattcaccatgctagaaaaagatagaggtttggcgtatgctactagttggtgacttatctcgatgagctattgacatatgtgaaggtatggtgccttgagaattggaccataaacgtatgggaggccttgggccaagagggagactatttgaacagtatcaattaggacatgactaaagttgttggcacgtcaacttggtgttagcatcttgccacacatgctaccttggtcatgagtgactaggtgagcgaaggtgttgtgatttgctttactatagtaagaatttatggacagtgtgcatatcttggctagagagcctccatgcatggatgcattcatagatgcttgcgagcacgactcgacatgagttgttcaagggaccaaagggtgcatgaggcacacggtcgcgagaaaaatgagctcattattactcagatggttgtaaagctgaccttgcctgaaaatgtgagcccgtgacacattgcactgtatagtattatttaatgtaatattatatttggtattgacttgtattattagtttgtgtaaaattatactatctttatgataaatctagaccttggccccgaacctcgactcaaacccccaacttagacccaaaatcgaacatgaacttggactccagactctggatctcggatcccaaaccccggaccacggatcttagactccggagcctggtcccaactcaaacctcagccctcaaccccagatccgtactcaaactctggactggacccgacctcggcctctaattatttctaaatattataatacaagctaatacatatcatttcttttgtattaaaataaaagatttgattgtattaaaatttatggttgttataattaatacaatagaaagttttatacagatatagtattccttatcagggttggcccaagcatttaagggccttgtgcaaattgggccctttactaaaaaaattgaggaaattgcactctataccctttttatattgtcctcttttatttttaccctcttttttaaagtct

SEQ ID NO: 307842 - DNA, 1071 bp, Cannabis indica
cttttaatagtaactatataaagtatagatttgactcagagaaccctatattatattcacttgtatcgttaggtggtgaactggtgataattaatcagaaaacattataatataatatattaagaactcaaagtgcaacaataaaatatacatatatatataagtatatatgataacaattaataaattaaatttgtgcaggcatacaatttgaagataatgttctctaggaatgcatttctagtggatattgtaggcacaagtgtgggacgagttcttcaactcgactcagttcgaggtgcaacattgtggaaaaacgtcgacgttttgatcttcaacacctggcactggtggcttcacactggcagaaaacagccgtacgcatttatttatttatttatacatgtatatatttttatacagttatatataattaatatatagagatgaaaattaattaatttttgagtgcagatgggatttgattcaagatgggcaagtattagtgaaagacatgaatagattggttgcgtacgagaaagctttgaacacatgggctaagtgggtcgacaccaatgtggatccagctaaaactagagtcttctttcaaggggtttcccccgaccataataagtaagtcatgactcataatcgtaattaattttcaattaattaattatgctaattacaagtcttaataatttatcccacactatttaattatagagaattgctaaaaaaaataatattagtgcctagcaccttcctcgttgtcgactaacactttcttcggtttcataccactatttaatcttgttgcacataatgtagccatgggcattggcgtctaatgtttgtgagttaatggaagttttgtaaaaagaaaataaaataaacacccaaatactcactacaaaaaactgctacttttagtgacaactttttagtcacaatataatttttttgtgactaaatgtgacttttagtcacaacaaaatattacttgtgactaaaagatagtatttagttacaagttgtcactcatttagttttagtcacaacaagtattgt

SEQ ID NO: 307843 - DNA, 1679 bp, Cannabis indica
ccataaaaagtcttaaatgtgaacaaatttcatagaagagtggcaaacctataaatatcatatttttgtaactttttcacaaaattccacatttcatgtaattttcactggaagcagtatctatttgagatatcatttagtagtgtttcactgaaaaaaaaaattaaaaaaatactaattttttttttcaacaaacaactttttttaattgatagtttacatacaaattaaatatgaaaaagttgagtattaaatgtaaatagtttcattaattattttctactataaatataaaaagtagtatatgattaataaaataatattaatttaaactaaaaaaaacgaagcaatatttgtcacaatcccactgaaaaaaataacgaaattattagagcagctcgaggggaggggaatttgagggtgtcagatcccagtctttaattaattatttaataaatatcaaaatttgatattaaaaataaaaaagagctgactgctctcactcaccgcacagtttcatataaatattttaagatgaaagcgtgattaaagccaagttctctctttttatttttctgagctctgaggtctgatcatatttgatctgaaacccagatgggatccattactttacctttatttagcttaattaatcaaatcataaatcatttctactttattaattattttatttcacctttcaaattctcctatataagcccctttcaaaaaaaaaaaaaaaaaattctcctatataaactatcttttattcacatttatctatttttttaagtaaatggcagaagaaaatatatttaattttttttttataaaaaactattgctgtcattttcaaataaagaatcgaaacttggaaggattccccagatttgaccacgattttcctgacaacttttgaattaatactatcaagaatttcagtcctatattaatagtttattaagcttaaccttagttgtgtgacaatttgacataaattgtagagttcacatttatgaaaaaaaaaaaaaatctactaataatttttttatgcaagtgaaaaaataattaattaatttttttgtcaccgtcaataaaattttgagtcaaaccataatgtaatactaagaataatggtgaataatggtattttatttatttttattcttatttgagttagcttccataacaatttcttataagggtacagtttgtagtaaaagacgccggatttattggagagagagaaaagaaaatagagtttaaaggtatgaactttacgaacaaggtaactttttcagtttggcttgtataagaaaccaaaacagagtaatcccaatttacaaaaagggaaaaaacatcaactgttttcataaatttctttctttttatataaatttttatcttactatatttctttcctatgaagctgttttagtcaaaaataccaatctcaagttttcacacagtgttgtttgtcgggtgagatttctctttcatatttttcatttctctctctagtggtgtccctaacttaccaatctgtcattttctgtgtttatttttacagaagaagcaaactgaagagagagaacccaaccccatctaattgtaagctccactccacactgccactttagagagagaaaggtttatttatatatatataaagagagaga

SEQ ID NO: 307844 - DNA, 2526 bp, Cannabis indica
gtgggtggaaggacccaatggaggcttgaagcggggacgttacacttttgtaaatatataattgttaagtgttaaagcaatggtgtggtagtttttgattggtctagtttattaaatttttattttttatttataaattaatttaaatatatcaataaaaaagaaatgttgatagcaaattgacactcaacggtcatttataatttaaaaatataatttaagtattgttaccgttaaaaattaaacttacatatttatttataactataagttaaatttggatccagacacgaaaattcttgaacctctcattagtagaaattgaagcttgttttatagcattgtaggtttaatcatcattgagagggactgtgaagttgttgttgaaggtttaagatgaaaaacatttatatgggagataacaaatgatatttatcattgaaatattttgagcaaaactattattttttgtaatttttataagatccataaaacttgtaatatcattacctataatgtggtttagtgggcattaatccataatatttttgtattttataaaagttaatgattagacttttgattttgtaaaatgacaaattagactttatattttttaaacgatacaaaatagtaccttgaccgaaatttttgataattttttttttaatataaccaatttaaaaataatttttaacatgaagatatcttggttttgtaaaataacgaattagaccctatatttttcaaatagtgcaaaatagcaccttaagctgaattttcgatattttttttaatataacaaacatgaagataatttttagcatgtagagatgcaaaaaatgtactcattttgtcataatatttctagatcgggttattattaatttttattttaacaaataattaatttaggtactattctataccattttagaatatataaagtccaatttgtcatttaacaaaacacatgatccaaaatagtatttaccatttgttaatatgatcaacaaaaatgaaatatatctctcataaatttagacaataaaatataatattaaaaaaaaaaacttatttttgtatgaaaggttgttattgatatttaatagtaaaaattaatggagaatctaaaaaagaataagagaaaaacacatcttaaacgtgaagttcgaattcgaggctgggctcagggttttagttcataggagggccatagttcgagtttagattcgagtctgggttcagggttcaggtttggatctaagtctggattcgaggtacatgttcgtggcaaggctagagttttgggtcgggtcgggtctggggcagggatctagagtcggtgtcaaggtgtggaataatgaatattttttttagtaaagaaatctaaaaatttttagaaaacattaatcaaacacgtctttttgaaaactacaaaaattattttttgttcttatttttgaaaactaaaaagagaaaacaatgtcaaacaccctaaaatattcgattttttttttgtgagagcaactaccaatataaatttgtagtttataaataagtaaaaaaattataaatactttgtctacttttattattaaaagattatatatatataatcatttttatcaattaaaagcaatcacttaaaagaatagatgacatcttagaggaagccaaagcctcctcgaaacgacgatcaaccagcaattgagagttcctagcaaaagaaagtgcaacttcgctgattgtttgacaaaatacaaagaaacaaaatttaaagaacccaacataattttgcgatcctcaaaaacaaaaccgaaagaagaatataaattcaaagaactctggatgacctcaataaccaccaagctattaaattccactttgacctgagcaaaacacccagtcttcaacaagttgagagccttcttcacgctgagagcctcgaccaccttaggattagctcttcccaccatattccaagccatggcaatcacaaacaccctgtaatcaacaccatattccaagccatggcaatcacaaacaccctgtaatcaacttactaaattaatccctaaaaaacccttactaattagttatgctccaaaataatttgttaagtgttttcttaatataattgttaaatgttgatggtgacaagctgtgttttagtactattaaatgcaattaaaattacacatattagtttttttatatagttattgtgtaaattaagactcctcaactactttaaagttgagtttagaaagctaagagaaaattgaaagtgaatatgattgaaaaaattacacaatcttatgtatttatttgatcatgtaattaaactagtcctagttacatgttaggttatttttagtattaaatttagattaattttagtatatttttaatttagtttaaatcgtgtttggagcattttcacgctttttatcttttatttttgtacatttaaaatagaagaagattagaaaatatcaaagaaataagatgaaaaaaaaaaga

SEQ ID NO: 307845 - DNA, 943 bp, Cannabis indica
  modified_base (4)..(4): a, c, t, g, unknown or other
  modified_base (7)..(7): a, c, t, g, unknown or other
  modified_base (10)..(10): a, c, t, g, unknown or other
tttnttnttntttttttgaaaattcacttattataaaggtttaaatttgtttttttttttggctagctatatattataaggtttaaacttaattcttgttaccttaccaaaaaaaaaaaaaacttaattattttttttaaggttgaaaattattttatatatacaagcgaatttcaaacaaaatcttatacatatatatattaacaattattatgagtacaaacattctatatacatagtaattaagacgagtatagaaagagcttaaaataattaactaaaaaaaattattaaaaaaataaaataaaaaaataacacaataaataatagcttaaaaatcacacaaattaatggggtatgagagtagggactctgtagtcactttaattaattaaatattatgtctaataaatcggtagaacattatcttatattcagccaacacttattattatagtattttttaaaacctaattgcattcagactctggactaaagcatgctaggctcgtgtctaaggcccactcaaactcaaagttcaaaatttttatatagtatactttttgtattgaaaaaaaaaatatatatttttgaaattattttataaaaggggctcaataatacttacatacactcaataaattgcttaagcttattagccctcattacaccaataataataatattaatcactatataattggtacctttcaatatttctcattttaatgtcaacaaaattagttaattaatgaaagtttgagtgttgtatacttctcttcaatatgaagtatattaaatttagttactgcacaacaaacatatatacgtacgtctattattaactagttagaaattacgtgccgaggcacgtaaatattaattttttttagattttagctctttgttgttttatttagatatatgatcatgcgaatgattt

SEQ ID NO: 307846 - DNA, 3237 bp, Cannabis indica
atttaaaaaacatatatttataataattttatagtgtaggaaaaaaaattcttttgaatttttataataaaaggaaaaaaaataaatagtgccataatcatccaaatttttatatttgtaaatgctatgaagtttatcaatttttttagaatataactattcatatttctaaaattgtaatttttttggtcaatataaaaaattagaattaactaatattacatgagagttaagacagactaatttaagaacattaaatatatataccactaaaaaaattattaaatttatactatttataaattcaaaatttttgaggcttctatttcctaaaaaaaatcaaaatataaaattctatgaaaattatagttcgaagaaaaaaaatcatataataattatccagctcttcgatttgtgatccagctctttggtttgtagaaaattaattatttcaattaacagcttgcaaatggaaaataattaaattatatagattaagtacacctaattgtcctaggtatatgaaaataagtatgatgtgtttgaattttgaaagtgggtactttagtttacacatttctttttggttgttttattttattatttttgttctgaaataatctgagccggtggattaatttagtaattttaaattaaaatactatttcttttgttgctaatgatgatgataagagtaactactattaattaagttgaatgttggtcatggatggtcataaataatataataaaccaattaatattatattaattaatatgtgtattttttcggtgaataaatcatattttctgttattttcttcctatgtatgacattttggtatcttttctttggaaaaaaacagaaattttctttccggccttgttcttattgttggtcattttggaactattgggcctagttcaagaggtcagcctagcccaaaattttgaaaaggcccaaattctagtgaacagaaccttacctttgcatccaaataggcataagttgttatcgactaaatctaagaaaatttaagttcaaatacttttttttttcacctttattatgaaattctataaaaataatatgaaaattacaaaaatactacataaaagtaatacaaaaacaatattaaaataataaaaaaaattaacaacaaaatagtaagagtataacatacaaaaaacataaaaaagaaaaaaaaaaaaaactgtattctctgtaaataaaatcttaaaaactgtaaaaatatgttaaaaaaattcattacaactatatttttattgtttttgtatatttatgaaataaccccttaaatctacttgtcttcttatactaagaacaccattaaaaaaaaaagttaaaaggctcaattgatacaataaatcaagtctaattttattttatatttttttttaaaaaaaaaaaaaggttacaatgatgaaatacaattggtttgtgttgtgtcactttttttttttcaccttttaatctttttgtatttgttaacgtttgtatcaacggtaactattataacgaatatggttttggttactttaattgtttagcctaatgattattatatatttacaagagttacacaccttttttctttattgaacataaaatagttgattaccaatggttactataattgtttaaactactagaacagcaatacataatttaatgatgatgtttatacccaattaattattgtattggaaattcctaactaaaataaactattagtgttctataatcaaatattcaatccatctaagaattatgtccatctttttttttttaccaagtaaagaaaggctttaaaaaaataaaataaaaagaagcttttttgaattaaagctcagctaacacaaagggggcaatgccaacttgtacaaagaaaaagcatacgtcttctttagctctcatgcaatatattgagccatatctattgagttttaaattataccattaattttaaagtaatttgcggcataacttcttttaagtagcaatatttttgcaactaacatctaattctaaaacgtttgtagtaaaacctcctaaacccaagttttgttagcacttagccctttccatctatttttgggtgttaagtgtcaggttggaatgtctacgtgtacacagtatacacgtggtacaatttaattaatccacgtaataaatatttaaaattaaaatatattattaaaattctatttttttttattttacaatataccttttaggcttttacattacatcatacattaatttctttaaaataaatcactaaaatctactttctttttttaaattttattgtatttatttatttcaaatatataatattaatatacaaaaataagataaatgctaaaaggcactactggtgcctagcaccatcttccgtgtcataccgctattagtgtaattaactatcaaatctcatataacttaagaaaatagcttttaaggaatatcgctaaccagtcgtaagacgtcacctataaaaagtattaggcactactggtgtgcaatagcattgctccgaaaataattattaaaacttgaaacaattaataaaatatgtttggaacaatgaatagtattatataaatgtagaacgtgaataataaatttttaaataaaactttaaaataaaaaagagtttagagcatttgttggtgtatgtttataggcgtatatttaattagattctttaaatttttaaattttcattttaaaaaaattattgtgaatactcttaaatttatcgctatacctatgagttaaaacccacttaaattattggcgtaaattattggtgtaagtcttgtctttgtgacatggtgcgattgttttatggtctgagtttgattcttggttattggtttgagattgttctgatttttgcccatgttttctagtttgagagtctaagttttctggtttgagtgactaagttttctaagttgagatgttttatggttatctggtttgagatggttgaaggcaggtttgggtgaggttgtgtggctcgcgactgccatggtaatatcgtggaggctttcaatcagggtcatgtagggagggtttaacctgaagttgctgagatggttggcatcaaagaagcattaagttggattgatcgttacaattggggacaagtctctatgtcattttcttttggtcttttagggtatgatgttcgtgcgttgctttta

SEQ ID NO: 307847 - DNA, 1811 bp, Cannabis indica
ttctgccatggatttgtgaaaaacagattaataaatcaatgtgtcaattttactaatccaatgagttcacctaggccagtctcttgattggcataattaaaacaactgctgtaattcggctcatatataggttgtaatatttgaaaattttgaattaatctgtcgtttgcaagctcacaaattggtactgactccactgcttaacatgcatttattaaggtgcatggccattttcttgaagtttacatagtttaagcaaccttaattagttggcagattaaaattactaattacattttctttcacatcatatcattaatatatgtgtatcaagttaataatgataatattggagagatacatttaaaggacattcttattattttctcttttgaaagcattataagtttcttagtgggactcaactcaatattgggtttataaagtatgaaaatggaaaatgaacactcgtgctcaatacaaatagatgaattatgacaagaatataatagtgcacaatttatgtgagctcctactgcaatatagtttccatttactttgtttaaattaaaaataatatagttagaaaaataaagtgttaaaactcaaaaccaactctgtgattaatgcaaaaatacagggaaaaaaaattatatatatatttaagtacaaagtgtgtacaattatgtacgtttgtgatggagctttaatgttgacctttattaaagtttggccaatggcttataggtctggccaagcaagagccacgccttcccctcttcattgaaagtaacagctttggctcatattcattgagtttctatggcttatccctaattctcactcacctaatcaataattactaattagaccctgcaacctccattattccctccacgaaattaataaaatataaataaaaaacagtctttttacaccatagcaataggacaaaaataagtccatttttatcataataataataaacaaaaaaggacaaaagaaagtcttcaagtgatcatgatgataattgataacaataataataagttttggattggtaaatgggaatcttaattccatctccctcccgccactatttattgggcaaataaaatttagttacaacttaaacacttaaagtttaacttttgagagtattaatacttaaattatatttttaaaatttttgtaagtacttagttgttatatgtcaagataaatacttaaattgaacttttgacagtattaattaaattatatttttaaaatttttgtaagtacctaattgttatatgtcaagtcattttatacgtatcattttcttattggtatacttaatttaattttcaaataaaaagtaaaatttaatgacaaggatagccaaaaacttttatatggatattgacttaacacttaacgccctgataactacaaatataacttagttattattaccgtaaaaaattaaatataagtatttatttaaagccaaaagttaaatataaatatttatgctacaaattacccactttagtaacattacttgtttagatgaaattggtagttcgaacttagtagcactacgtgagttattaaaaggcatgaaactttgcgggccattaatatgtatagcactctaaataaatgttctaataacttatttgtccattggactaaacctattctgattgttctaatgttacatacccgaatcctggtctaattccaggtgacggtgctgagcaatggcagccaccacatggagatagttttaaggttaatgttgacgctgctatatttgcaaacac

SEQ ID NO: 307848 - DNA, 922 bp, Cannabis indica
ccttctctctctgatgctggcatgaaagatcgcagttattttcatctccatctttgatccaactgatttatgaatttgctgaagaaaagaggacaaccccttgagaagatagccatacttttgtctagcaaccacttccttgtcaattagttcatgtttcataggctctgcttgtaacttcttttgtaaatcatacaactcttctttagcctatagaacaacttcttgaatatttgagtattccctcttattcagatctttgagagcttcttttagtattttcaatttggaaatgacctgaaacatcttggtgtcagagatctgttgaagccaaactcccttaactattcctgcatacctttgatgggaagtccacatacaaaaatacttgaatggtttttttttccaccaagcatttccgggtacacaaaataatagtaggagcatgatcgaataattcttttgctgaaaaaatagcttctgcattgggaaaatgatctaaccaagtctggtttgcgagtactctgtcgatcttagaacaaattctatcacttccttgccttttgttgttctatgtaaagatacatccactgaatttgatgtcttctaattggcagcaacctacacaatcaatgaagtcagttgttgcattgtattttatcctcttgccaattctttcttccttgctcaaaatttcattaaaatctcccaaaaccatccatgaatcttgagtagctattgtttttaaatctgaccagagtatcttcctccctttcatatcattgaaagcataaacaaaggtaacataaaacctatgcttaccatcaaaagttgagacaaatagatgaataagctggcttgtacaattgagaacacttacagtgaaactaaaagggttccaggccactattattcttcctcc

SEQ ID NO: 307849 - DNA, 2954 bp, Cannabis indica
tatttacagacaaatatactaaaaaaagaaaataattatcgtttatgaatataataaatttaggcactaaacaaagtgacaactataaatggacaatcaaacttattacaagtacatttcaaaaatatacatatatttaatttaaaatttgtacacaaatttgtccttgtacaaaaattatagtaattaaatgtaaaaaattggcattattatataatatgagacacgtgtcatcacttatgttgaacaagaactttagtaactaaatccaaaattcactatttaacatgagatttatatcaatttttataataagataatttttaaattaataaatttaaaattgcaaaattaaggtgcaattctaagtaggtacacacacaaaaaatgagactattgattttttttagttgagattttatttttgaaaataggattgatattattgtacattatatacattttatagaattaattataaatcttcaagaaacaaacacaaaaaatatgatagatttaataaaatataattgttttatagcccaaaagacttgaaataaatctatttttaaatttgttatattcaacttacttactttttaaattgcatttctagatgcttgtattattagtaataataaatctaaaaaggaaaaacaacaaaaattgagataataactttccttacatatattctttaaggtaaatgagttgtaatataatgattgttattttaaagggaatgataatgttgtttgatttggacaaatttatgataagcttaaattagaggtttttcaaaagatgaagttgcaaataatgtttaactaaaataaaatagtataaaatcattgaaaatataacccaaataaataaattgaattactttagaataactaattatagccaatgatttaattcaaaataatatataaatttgagaattaaaataacacaaaaaaaaaaataaccaagaagaaaaaatcttattaatcaccaacaattgcttgagaagctgaacaaaaacacaaattaatacaacttattaaataatctaaaataaccacatctcttctattcaacttcatattggctatattaagaattctagtttaagaacatttttaatcatacccataaagctcatgacaatagttgttacttttctgcgatccaatccaagttagccaaccttgaaactcgatagatcaagaagtacacccaaaccagccttgaacactctgaactacttcgagaaaaactatagtcaaagaataagcgtgaatgactcccaagaactagctcacaaatagggcataaagtcgaattcaaatggatgatgcaaagcagaagtttatctctaataaataaatgtttattcactacttgccaaaaaataaacatatgtttaaatatattgagtctccactaaacaaatttagtgtcacttatatgatctcgatgaataaggctttgataaaatttattagccttgaatttttcataaagaataacacaaaatttgtttgttatagtatcccaaataaaagaattgtatgaaaatatatattactccattgtcaaatgaagaaatatgagtaagatgatctagacatccaaaaataattgatttaagaaattaaattttttttttttttttttgaataataatgaaaacttcgttacttcaaatcatccaataccatagaagaaattacaaaaggtaaagaaaaacttattaatttttttttaaaactacatgtgtaaaaattaattaaattacaatcatatgatttatgattaaaaattaatatatattttgtatcacatgcattagatataaatattattattttatttaaataataatagttcaatctttataacataggtgtactattttattccttttaataattattaaagtttgattattgttgttatttatattattttcatttgaaaaaagtagccagctagaggtccaaatctaatatcaatcacactaataataatgataaagtaattttatgtatttatttaagaatttttccttgaaggtggtttacatgatgggactaattaaatgtcatttttcaagtttcaacaatataatctagacttataattaattattatttatggacaaaaagacaattatacatattgttttaagtggatttgtaaagtattagtggtgaacatcattattaatttattattataaggtattatattgttattagtacattttattaagtattaggtctaatatatttaaaattaataagtatgataaataattttaaattgattatctaatgggggctttaggctttaactcccaatgaacacaatggtgttgttgatttctttttttttatggtgaacaattatgatactcttttttcttttttttcttttttttttacatgcacctctatacacaaaagcaccactcaaaagtgtcacagtgtaattaaatatcagtatttatataatttaatataataatttttataaaatattattaactatttataagacgccacctcataattaagggcggagtcctttgaagcctaaataagacaatcgacttatctaaaattgtgatcaattctaaattatttggggtttataattaaatataaaaatttagtactttattcaaatactagtctagtcaaatataattaattaatgttgtttggtgtagtaataatgataatcttaaagttcaaggacacaagcttgtattttttatcatgagcattgctattgggcaccagtggtgcctagcaccttctagatgtgtcgacttgcaattggttagcaatactccataaaaattattatattaaactatatgggacccgatacttaattacaccaatagcgatattgacacgtaaaagggtgttaggcactagtggtgccctttagcatttctc

SEQ ID NO: 307850 - DNA, 2176 bp, Cannabis indica
aaaattggtacaatgattaaaaaagaggtaaaaatgatagactttaaaaaagagggtaaaaataaaagaagacaatataaaaagagtatagagtgtaatttcctccacaaaaaccgtcaatctgcaacacccgcccaacccaaccaataaaaacacacccgtattgaacccgcccattaataacccgtcaaaattgggttgggctggatttaacccattggcccaactcacaatataaacctaaaatataataaaaagacatcaaaaccctaaattttgcttctctctctctcacccacgtcgcttgtggttgtcttcctcttccccaccgggcgttcacaaccaccgtatcacccacgcgctacatcgtcttcgtctccactccaggtccttcctcataatctagggtttgacttaatcgtttcactcgatttcatcttgatttgactttctgcttctttttgtattttactaattttcaatttctagggtttcaattcgtatgtcaaatcttatttattcttgaatttatctcaagctctctcttaatttcatttcatttagactcctccaccttcaatttcaattccgtttttggttaggtcatttaccccttttcccccaaaaaaaatcatttttttttgtttaatttgacaatttgaaggggttttcgaggtatgtattgtctttgatgagataataacagtagaattgtaatatatggaggatgtttttcttgaactattcactatttttttgtgagattcttgatttgttttccaattactatatattttttctctgatttgtttaataattattagggaaagtaaaataatcactaaagatgccgaagaacaagggaaagggaggaaagaacaggaagagaggaaagaacgaagctgatgacgaaaagcgtgagcttgtgttcaaagaagatgggcaagaatatgcccaagtacttagaatgcttggtaatggaaggtgtgaggcaatgtgcatcgatgggacgaagaggctctgtcatattcgcggaaaaatgcacaagaaagtttggattgcagcaggagacattatactcgttggtctcagagattatcaggatgacaaagctgatgtgatcctcaagtacatgcccgatgaagctaggcttctcaaggcttatggcgagttgcctgagaatacccgacttaatgagggcattgctggtggccttgaggatgaagatgagggtgctggtgatgattacatcgagttcgaggatgaagatatcgacaagatatagtaaacaaattccaactttgtttgatttcaagttttagtatgttataaaaaaaaatgcattattatatctatcttggctttctggcattatgcatttcataaatgaagaaggaaggtttgaattttataggttgttctgcacaggccttgattgatgttaacaacatctttccttaactaatacatgaatatctatcctgtttgtacttcatttttctttctgtctttaatatggttttcttggttggttctttcactttcattttgactgtttcttttggtagtttttatatgttttatgctattttttttctgaattttgaaatggctattgattgtgttttgaaacaatatgttacttcctatattgatgattttctaacttaagtatttccttgaagagcatcacaaattcacaatgggatgagtgttttgttaaaatagcctttatgatattttttattagtaaaataactttaaataactgtgtatggtcgcacaaataattaagatttacactgcaagatcataacacaatcattatggtcgaaaaggttattttttaaattttagtattttacattgttagtttggcaaattcttgttatgagacatcaagctgtgtagtcctattatgaggtgacacacactatatttgattagtggtttttttataatggttcttaaaataaaataagtaagacttgataatgaattatactaatagtgatattactccagtcctcacaagaatcaacattatttgtgccttttagactttcaatgaaaaaccatttttttttgttactgatagcaaatcattttaatgggatttttgattcattaaaataagggtaattaagatttttaccccataaacattaacatgcat

SEQ ID NO: 307851 - DNA, 725 bp, Cannabis indica
ttatgtaaacagaaaaataaaagtagaactgaaagaatgtacatacataaaaattcaacatgaggacttggtgatcaaacacaccaatcctgcacaacactcaaaaactctcaaaaactttctgtttgcttaattggggtgaatgacaaatgagtcacccattatataacttttggaaagctggagatattccctaggaaaagaggagttgtcctacatgtaataaaattaactatcacttaattacaaaaagtaactggtaactaataactaaacaaaaatttaaggatatgggtatatatataaaaaaaagataaaagaatgaaggcttcattctcttatttctatttcagattgagagccaaaatgattgctaaacttaatgatggggcatcccatgtctgatcaaatgtatatataaaggaacccaattgtctctctcaaaaggtaacaaaaccaaagaccagaccaccactacaatgattttgttgtgccatcatcacagtagttggcatgacttggaagtaaggaatttaaaatatccaaatggttcatggttagtggtcttcttcaattcacatgtacttatttattcaactgtctactaaattttggcacaaactcaacagtatgaacattgatttcactttctttctttttaggggtaagttgaaaatgcctctttattcatcaataatcaatttacctctaattttatatttatt

SEQ ID NO: 307852 - DNA, 1111 bp, Cannabis indica
ataaatatagaatgagaaaagaagatcgacattgttttagaaagtgcatttggaatatttatcctatcttgaagaaaactattatctatcatttttgctgtgcttccatgagtgttaaatgggaaatgaatgttacagaattaacattattcaaagcaagtaacatcattattgtaacttattagagttgacaaagagtttttgggcttttttcatgtttgataagcaaatattgtaagaagccccgaaatttggcacataacgagtcacaagccttttcttatacaaaggaatacacccatagcagaatagaaggttcttgtaaagttttagtaaataagctaaaaaaaaaactaacaagattaaattaatttaatgtaatgtgatgattttggaattaagcagctaaatttaatcaaacatatgtctatggggaagtcattattgttatgattgaaaactgttatatatgtatcatttttttactttttttgcaataaaatctctataaaccaatctcataccaattttgttaatagagaagaatcataattaggacatgcaaaagttgttgatggcatgtctataatgattttggaatgggatttatgtttgttcctggtgtgggtttgcttacaacactaatttacctttcttgtatatattctttggtctacagagtgtttagtttatcaataatgttgatttatataaactttggaatacatccacataaataaatctgtatgcatggttttctattggggtataagttcatttgaagataatggttctagtagtggtaatttgtgttgtgttcgtgttatacagattaacatatttaattgatcaactctaattcaacccatatgtttcttgtcaagaaatctcaactctaatccaacccattgtgttctcgcgtcaacttattgtgttcacgtgtcaactatacttatgttacaatacatgtttaccaacatgattggtatcacatatttaatttttattaaaataatttatcataaataatgaataaaattcccaatatcaaatatacattatttatcttgtattcttatatgcaattttttttttaatttatttatatttt

SEQ ID NO: 307853 - DNA, 834 bp, Cannabis indica
taatatatactggtttttgacaattccgtataaaaaaacaaaataaaatggtaaaataaagaaaaaaagaaagtaaaaaaaaaaaaataactgttgggcgttgattcccctggtggggagtgggtcccaagaagagagaattgagttgaagtgggttagggtgagttaatctaggttgacactgctttcacagattcgaagaacccccgcgcatcgcgcgcgggctaacacccccaaaagatagaaaagcgtcactgtcaaccgtccgattgtgtctgctgactcaccaaaacgacactgattgattgtcgtttatatgtttgtttattttatttgttaaaagggagagtcttttctaacgtcacatgtctgtcttgtcactgatgaatcgacgttgagtgcgtcatccacgtaagctaacctaagctaaggtttatatctctgacttgttctgtctctcctccaccaccacccgttaccacagactcactttaaagtttctcaacaaatgttagacttttttattacacgtgttaattttacattggtataacatcatcgtataattatcagctccacattattatttaatgtattatttattttaattataaatattgagataaattataattttaaattttatacacttaaatacttaatgtttatttttagatgcaaaaatacctatttttacaattttcttacaccattactagcacttctgttaactcatatatatataggcatgtgaagagttcagatacattacaatttttaaaaaaacttaatattcttaatatcaaaaactaaatgctacttgttttaaaaaaa

SEQ ID NO: 307854 - DNA, 2174 bp, Cannabis indica
actctacattacttggttgatgaggacacactacaataatttataatttaaataatcacattaataatttattaaaactttaaattaccatttaaatttacatatacttacttttttcagatcttcatgttctttctcattaatgtgtcatatgcttccttgattgtttttagaatgataggacgatttgttataggtgcattaacatggtccaaataatatacgtcgtatgctaccgcacacccaatgcttctatgaaaaaataaattatatatattgaacatatattatattatcatgtttacaatatatatatacttattaattaagcttacccaagattctaaggtacaatcatgaattgttgttggttgacaagttaaaaaaaaaattccatcacgaaactaactcgatcatcatgcttagttgtcaaaattacaacttgatttggatttacaaacatccacaagtgttgtctattatattattgacaaagccaagtatataaataactatataagaaaataatatgaaaatatagtgagctaactttatttgtcaaatttaataaataaaacataaatagattaagtttgaactatgataccttaagtagcagcaaatcataccttgccttatttcatcctctgctagaaattcaaaatgatgagatacataattcgaagattgatgattaaacaagagaaagattgagaaaaaggggatactaccaaaaaataactttcaataataccaaaaaaacttatcaaaacataccataaaaccttatgaaggattaagaaaagtaatgctatcagaaatcatacaactttacacattttcattgttatgtatatgtatttttgtataaccaacaacaagactttagttgtcttatttgataaatagacaagtattcctacacattgtaaaaagattcatttaataattaagcacatcagacaaaactatgtcaatgccttacatgtttgcttcaaccaaagagacaccaagaggtacatctaaaaatcttctctcaatattgcctaaccaagtaaaatatcaactataacgacctgatgcccaatgatttttgaaatgaacttgaacaacaactattaaaggtctttagaggtcttacaacaacttgttcaactttttgaaactatttttaaaagacagaagctttccctttatctaaccattctacacaggaaaacataataaaatgttcttgttataatagctaaagaagttatttttaattagtcacaaattgccaaccataaacaaaataaggatattgttttcacattaagaaaaagggcaaaaaaaaaaaaaagtagtaatataaatatatatagataaataaaacaatactcatatcctcatcatcatcattgtattcaagacagtatatagactaattaaagaatgaaatcatgtatatatataaatatatatattataattttaatattcatagtacaataacgatataaacaaaatggaaaatgaatttgaaagaagaaggttcagtcagcgaaagtaaaatcaatgaaagggagaattagataatcgcacaaggtattcatgagagaaagatatagagaaacccaaataggagttcataggatttcattaaagaacccaaagagattgagaagcagagagaacccataatagctaccttgtattttttcttcatccaacgaaaaagcaagaacttacttgtagaaagaacatgaaatttgattcataaggcaaaagcgacaattcagttcttgtacaaaagagagagagaagatgtgcttagaaggaggggagggtgaagggggagaggtctattttgtctatgggaagaactgatcatattaggtgaaaggattttgtgttttgaaaaaaataaatttaccgcatactttttcatattagctttaattttaaaaaatatttaagtttccgccaattcaagggaatttttcttatagtgaaaggagaagaagttgtgacttggtcacttatggatttcgaagagggacaagaaggggggtgttattttgatcaacgcttagctggaagaattgaagttatatgggctcaacgtccatcaatgctatacattgaatcactctaaaaaaaaatctctccattcttaacatatcacgtcccac

SEQ ID NO: 307855 - DNA, 507 bp, Cannabis indica
tcattatcatcaccaacaacaacaagatcaccacctttgatcataccaatttggttcatccatggaaagaaagaaactttaccattatttgaccaatcatttgaagaagaagaagacaaacaattctcacacatatctctagactcagagagtttctgatgatttgagcaaaaacccaattcagaaatctcttcagcatgagttttacatacaagatctctataaagattcttgctttttttattattattattaccatgagactcaaaaacatgatcaagccttgaacaccaaagacaaggctttttaagaccaaagtaatcagcaaactttatgatcagataagaaaacagagaatttaataacagaagaacaatcagtatccattcaagaactgcatacaccaaaataagtgtgatcttattggtgtttctatgaaccatcgttgcaaacttgttggcagccattaatggtgctctgttttttttttttttttgggtatattta

SEQ ID NO: 307856 - DNA, 1786 bp, Cannabis indica
ttaaaaaattaaccatctatatatacaattttttttccttaaaatgctcaaattaattgatgggttataatgagattagtttaatacactgttaacagaagatcttgattcgcggcaatgacctcgaggagacattttggtggttttggggggtatgcaaatgatgtggcatatgcataagtctattactagtttgataggagttcgtatttgcacagacatttgtcctaaattcttaagtgttcatataacaattaatttgatttaatatattaccacatatttcttaaaaaaataaataaaattaaaaaaaaactataaaaatttatataaaattattatattcaaaatattttttttttgaaaaggtatattcaatatactttgattaacacattatcatttcaaccaatttatgtgctataaattccaaattataactaatttaataaagataaatatatatgattataaattataattctattgaaataaaccaattaatttatattattgatcactcttacgtcaacaatattcacaagtaaaatctgatgagcttccttatcaaaaaaaaaaaaaaaataaataaataaaatactgatgagcgaagctgatccatacttggcaggaccctcatcatctaattagatatgattactgcaggaacccaatttcagtttttcctctccatatagtcaacagtacaactatgacatgcacatttaatatagaagatattttatggtgtgataaatgtaattatggatgattaacgattttttatattatttattattaaattaaaatatataaaatttaagattaatttatactaataataatatgtaatattttatggtgtttgacacgatactgccttagcatttctcttaatatatatgtacgtacttctaatatatagtaaggaaataaattcacaagtcaatatgtatgactagaccatgtcggagggttaaaaagctttagcttagtgtggattcagtgtacacttaacaaatattacatcatttgttgtatatactttctgctacattaattaattacgtttatatatgtagaattaggtgagcacaatattttggctacagggaataaattatgtaaattatttttaatttttaattttttattatttttttatttgttatctaaacttttctaaatcacttttttatcctatatataaaagttaaaaactaaagcgaaacaagtatgcagaacgaaatttataaattattattattattattattattattttatattggaagagttattcaatattttacttaaaagaaagactctattagtatgaattaataatgtgccaacttaagtcaaatttactttgcttaaaaaaagaggttaagtaaaatttaaaacaagtgagggtaatctatgacgcgtgtgaggaatgctaattgggtattttaccctttaacctaactttgaatatggtgtaaatacataaatatagtatatattaagagtgtgctttccattaccaaaaaaaaaaaaaaatagtgtgcttccgaattggaaataaaaatataatttagatatgagtcatatgactaacttattttgtcattatatagttatagttaagtagcatgttaattgttccaggtataatattatttttagtctattttaatattaaattgtatattataattaatgtcagtggatataagttgcattatctcatctactcatttttttttacttatttctgtaattttttttatttaaattttat

SEQ ID NO: 307857 - DNA, 1368 bp, Cannabis indica
ggtacaactactctaagcaataatctctactcgctaacaacacaaataaatgagataattatcctcgcactattaatatcccaagaaaaattaaatactattttaatttggatattacagaaagccacgttacgtgagagaaaaagatgttcaatagattcattctctgtcccacaatgaggaaaagtaacattttcaataggaaaccttttacagatctcagttcgcattgggattgccttagacagaagacaccaccagagtgtcttcatcctttctgtgatcttacaattccaaagcctattccaaagtaaaggagcaacgtcacaagagggagccctatcaacagcttgggccaggtaggctgacttgcacaagaatttaccattattttccaaagtccaaatccatctattatctctctggccagacggattgcccccttttaggattgtagaaacagtctctctatcaaaaagattgtttaacttttagatatttcagccaccttatccactccagaaatagaggaaccattagcaccattagcacgatggctaaaatatttcttatgtcatcaagtattcttattaatacttgcaccaaagtgtaccttttagtatttttatagggtgcatggaaaatttccacttctaaaatacaatacgtacgtacacacattattattattattattttgcttaagtgtatacacattatctttattcgaaaaatgtaacatttcttcaatttctctcttttatttgtaaaagattttatataaagcgaaaatcattttctcttttacttcgtctaatccaatcgtggtgtagccccaagggaatcataataataataataataataataataataataataataataataataataataataataataataataacaatcagtcaactcgtgaccaaacaaaattttatttatatattaaaatacaataaaataatcattttactttattgacaaatactattgttctcattattatgttgggtggggaagtggggactgaactacttgagaggtttattttcaagtcgcaagtgacaactaattttgtgcctccacataaattgtacaaattaatcactacaaattaaaaataatatatcatgattgatacaaattattaaaacctcacatattttagttttataaatattaaaaaaaaggataaccactcatgtcacaaatggttgtggtaccttaagcctaatatcaatatattatcccatttctaaatagtacattattactttatgttaatatatagggaaatttgattttctgtacataaaaaatcttaaaaaaatttccctaaatgcatacttaataata

SEQ ID NO: 307858 - DNA, 1153 bp, Cannabis indica
caacacaaataaatgagttccggtaacacgtttaataatcctatcgtatttgtattggagttatagtttgagtttttaacatatttaataatcgtgtcgtcattgtctccaattgtatcatatcataactgtctcatcaagataaaacaaattaattgaaataggtttcatatttgtgttgtatcatggcacactgatcgtgttattgtattatatcgtattcatgtcatatgatttattaattaatcgtacatgttgtatttgtattcaaattttttacgcaaatataattatgtcgttttcatatttcccttaagtatataaattaaagaaaaaatattaagcttaaacaaacaaattggttaagtttgttaaataagtccatgtaaaatatacacatcaaacacataaataaaatttgaaatgtgcattctatagccgccatctacgccaccttcttcaagtcatttggaattcacaattgctttgctttggcttgtgccattttcctcctcaagagattgctattcgggtactcatttattcttctaccaaatctaaggagtttcaggtataggtattgaaagttggaaattttatttacaacattattatttttgttttgtttgtttggttttttttttttggtattatttcttaattttattgagtttgcatcatctctatacatttatatatgttgtatcaattagttcaataatattaaaagacaggattttatcaagaatgtttgttttttttattattttttatatttttactgtcatatttttttttttacatttttactgtattaagttttcaaaaatacagtcttaaagttttaaaattacaaaaatattttgttttagtaaataaaaagaaacaactaggattattacatacaaaatataaatatacactttatttacaaaaatacctccataaggtaaggacaacatttataccttttatgtgattttaattaccaaaataccacttacacaatcagacgatggttgcagggtggttgttgcgtgattgcgcggtggttgcatcaaacgaaggtttcaatcagacgatggttgcagggtggttgctgggtggttggccgaaggttgcatcaaacgaaggtttcaatcagacgaaagtt

SEQ ID NO: 307859 - DNA, 2286 bp, Cannabis indica
ttttatatcattagtcaataagtacttatcaaacatagaaaggggccagctagggaaaaatcaatatgcaacatcaaccatgttttaaaaactaagcaacttgattaattaatgataataggtataaattaatataaatgaaaacaaatgcaattgtttttcttttgaacgagatattcgcttctgcttatgccatatatatacgtacgtcgttgttgagtaataattcaactctctaaaactgataagcgataagttaaaaaatagatgagctacattcaaataggagcagttgcttttctaagtttttgttttttcttgcttttctttacagtttttaagtgtatttggactcaagtcttttggaagttttctctgtagaaagtgattacttgcttgcttgttttatcattgactttgttgtgtatatttaacaaaagagttatttaagaaatctcttggatggcatcaacttgatttcttcgatttcttctttatttttctttttctatatgtgatactatatatagaattaggaaaataatccaacttgcatgtagtaaatgttttcaagattaatcataatatattacaaaattttgtttgtttacgagagaagcaacatcattacgactctataatattattatgattttcatagaaagttctatgttacttttaaatattgttataatattattgtaacatcataattttaattttctaaaattgataaaagtattacttcttatacaaattaatgtatttctataaataagcataaatgcataagagagcgttgtattcttatgatgacttatgaggataagatcaattatacagtatgtatataagttgcttatcattaattctggaatgatcacatgtaaccaatataaaaatatatacatgaacatattaaattaatacgtttagaaactgctacaacttgtatatcaccttcatttcgactaataaaatcgaattaattaagttaacattttaattaggagatgtgtcacttgtcttcagttgtttgataattattattatatgagcttttttctatgtgtattattatagtatataaatggcatatgtatgattaatatccttaacagtaattgttagatatgaaactaaaatctcactaaaaataaaaaaagaaaatcataatatataaaaatgaatactgttctattaatacgaaatttttagagaatgtagagttaaatttaaagtgaacaatacaaatataaggttgtctttgtctatatttatgagtcttattcccaagtaaaaagaaaaagagcttacatgatcagtactagaattgatttataattacactttattgagatcgaggtataaaatagaataaaagttattgttttatcctgttatcctatattaagagtatagcaactaattgtgttttacaaaatatctctcaactaacatgatgtattaatcaaattcattcaaagtattacaaaaaagacatttatgttttgttagatatagctacagtgaaaactaatcaattaattaactttaaaaaattgacttgaaaagataagtaaacattttgacaacaatcaatcatatgtattcaatacttagtgaggtagttgacccgcacaatatgcttgtctattatatacctcttgttattaattaccatgaaactacaacatatataaaagttatatgttactattatttttaaattttttaatcataaaaataaaattacatattttgtttttaacattttatttttcaaaaataataatatgttttataactacttttgattttcaattttaaaaacagacaaaagtgtgttctataaaattcatttcattttcatttgttgattttatttaagttaggtccaggtccaggttcgtggccagagttcgggtttggatccgagtcgagtctagaatcaaggccgaggtttaggtctgagttagggatccaagttcgaggccgggtttgggtgtgggccgaggctagggtctaggtcttagtctaggatcgaggttcgggtacgagtccgaggccaaggtctagatctgggttcgggttttagtctaagtttgaggtccagaccaacattagggttcgggtggggtttgggtcccaaggttcaggttggattcagagtccaaaatattgattaagaaaataaaataataataaaaaaaatccgttttaaaaaattaaaagtaacttttttttttgttttcaaaacttaaattctcagttaaaaaattaaaa

SEQ ID NO: 307860 - DNA, 1210 bp, Cannabis indica
gtggcataccatgtaagcacatgcaatcttatttattcatggctccaacatgcttaaattaaataataggatgaccataacttttctacataacaactgaaactgtatattattattaatattttatccatttctacagattattttgtatcaaatttgataccacttttgattcatctttataaactgtttttatgtttatatgcttacaagctgatgcaaactacagccaactctggtttggaagccgaggcaaaagctgttgagttggccttgtccttgggcgtttcaaaacaattggagggatgttcatgtgctctttcagattcaaaagtggtggttcaagcattggatcatcgaagatgaatccctattggaaatttttaagtctgtctttgtcaattttaaacttaattaattgcttttattgttgtagttttttctttatcaagcaaagtttgcctatcttttgtggatggcttagcaaaaagcgctagaatttctaggtgtgttactagtactttttaagggaagggaattctcgttgtggttcccatcttttttaagtaattgaacacgatgttccttaaaaaaattgtttatatagttaagctagaacttaacatctcagaattaagatttattgacatacgatcaactaagtgatattaacttaaaaatataatattagtccagtcaaatgtatattctatacatctgatactaatatattttgctaatgtcttgaaaatgacatttcacttatacaagtgtaagtaaattttatcgctaattatcatgtcagtgtaaatctagtgcgctgataaattatgggactaaagactttgaaacatataatcacaattatgaatataactatatgttttggatttaacaaaaattgtatattaaaaccataaacatgaaaattacatgatttctaatcttctatggatagcaaatgacatattattgaaatgaattttatttatgggataaaatccttacaacccacacccaatccgagtccctggatctgagttagagattggggttgaccccaaatcctttgtaaatattataatacaagctaatacgaactatttgttatgtatgaaataatacaatttatattgtactaaatttttttattgtaataattaatataatatgttattttattcaaacataatattatttattatttaat

SEQ ID NO: 307861 - DNA, 1865 bp, Cannabis indica
aaaaagtaaaaaggtttttttttttttttgtttaaaaattgaacatttctgtaaatacatgttttattattttaataactctccgctataattctaagaaaattaaagttattaaaataatgaaacacgatttaaaataatataaaaatcttttaattagttttttactgtaaatacatattctgtaaatacatgtacatcgatcacggtggaggataggagatttaatggttgtagttggtggtcttggtagtgcgagaaagaagaagagagagtacagagcaaaaagttaaaaggaagagtattttaaatagaaattgaaaataataatattgtttaattgtataaattaattaaaggtctaaattttatttgtgtattttattaagcatgtaaagtgaatttgcccatatagcaggatatagtacaaagtttataaagcaacatttattaggggccatagcccctgcaaagatgaacatatatagttccgccactctacttccatatcaggatatattttctactccaggcaggcaggcatagctatagctcactatgtaattaatatatagatagattattcttactgtcacattgcatatctatataatttaattattatataaaggatctaactaacaatgaatgtactttactatatgttaatttattagtattcatataatgggacccctatatatatttcaccaatcaatatatatttatttaacacttaatattattcattattaatgtaatatgaatattgcgcacttaaatactgactactcttgtgatcgggtggaatatttaagtccattactactcttgtgataataataatgataatatattagagagtttagaattaagacaaaatagtttgttgatcagactaaactttaatttgtttaagtactcagtataaggcttcacttttagacaagtctcatttactgtacgttttagcagctgcaactagaatttataatctcatctaccattttaatttatcataacgctgaggagaaactctctagctagggagttcaagagaattaagctcaaattatttaagctgatctctttttgatgtgattatttttttttcttgctgagtgttaattttatccttgcttattactgcataccatgtcattgttgtgttttttaaaaataaaatcataacgagagaattacgtatattgtaaaaatttctaatctgtgaaaagattcgtggggtataaaaatcataagttaagcaatttctaattcttatatatctcatcatttcttatttctcaataaggagaagatcaaaacaaattaatgagtttgaaaaattatcaccatttttctctgaattttttgagttcctaatttgcttgcaactcaatactcaatgctgcatgtataattaacaacagtcacatattagataaagattgtaactaattgagaaaaattgcttattatataaaattttgataaatatcacaactgatcttccatagtagttgtgtgttgtttttttgtctattagtaaatattttatatgtggtataaatttaataatttttttagtaagtacttctgaaaaaatttattgagcttatatcagttataaacacaaaattttaattatgccgcaattaacttttttttgtactattaaaaaaaatgccacacacatctgaaaacaatcctatatataccgtatatatatattctaataataatacatatatataatagaagaaagttacgtgcgaagaacacttagttttatactaagtgctttctacgtaatttaaaaataatacaataaataattaaagaaaaaatattatgagttattgttt

SEQ ID NO: 307862 - DNA, 1107 bp, Cannabis indica
tactaataaaaaaatattatttttattagagaaaaaaatataaattttacgaagacaattaaatatatgagaattaatataaaaaaatatacaaataaaaatgagaaatataaatttataaaggtaaaatgaaaatatatggtgacaaaaaatattgtaagggcaaaaatgcaaatatccaaaaaattaatacaataattattaaaagttgagaagaatcatgtgctctttgcgctttataattgtgccctttttgagtgtgtatgtatctagtattagtcatttttaaaataaatttaattatactaaataaaatatttttgcaaatttaatcgcacataattaaagttatagttatataaatgaataattaatgtttattattaattattttcacgaatttttaataattgagatcatgatagaaagaagaatttatttttctcttattagggttaatagtaatgtttagagagttataatgttatttttgaataattagttatactctatcaacatattttgtgttacactaaaatgaccctttcttttctcagaagaataaatattatggtcttaaaatataagtgactctatttggacttaatattttaaaaaattattatatttctgttaaaaagtaaaaactaataaaaattatcatatattttgtgggataatgccaataaatatattcctaccactatactacatgatatgtgtttgtttcttcatatctataattcgcttcttaaaaagttattttggtacaatactctctatctatttcgacatctaaagaaaaaaaattattctaactttttttcataatcacgtgtagtttagttttttaagaatacatataaatttttagaaaattcctaataaacaatattttagttttagaggtataccaaaatgacctgtttagagggtttactatacaaggtcggctcaagggtggggtagcatgggctcatgtcatcccccatcttagcctaaaaaatccttttaaaaaggagtaagttgaaaaatgcctcttttattcatcaattaatcaaatttacctctaatttaatatttatttgaaacatacctctttttata

SEQ ID NO: 307863 - DNA, 825 bp, Cannabis indica
tctctctctctctctctcctggtgcttcgtgctcttttgtgttatggctaagatgacaggaaaaggaaaaggataggaaaaggaaaaagacaagcagtggatgtcgaaattttggctagggaaactctgtctatattgttggatcaggatgatgtggttggacaagagttcattaaaaagatggtgattggaagaatcatctattggagaggtatcttcaaggggctccttcgtaatgtgctttcccagaaatggcgtatgtccaatgtatggaacattacagaagagggacccaacatgtataccttaagattccaaaagaagaatgaaaaggagtcgttgggagatctgtggtggtcatcttattctcaaactgtcgtcggctgatggtagatggaagtctgtaaacatggatttagttcctatatgggtaagattctatgatattcctcctcatttttttactaacaaaaatgctactgctattgctaagaaattagggggagtgataagcattgatcggttatggaaaaatggcctccttgctaaggactataatcggttcagggtggaactcaacatgggaaagccaatcttggtgggactgtacctacttatggaggaaggagtaagtttatggtgttatttcaaacatgagaaattcccacgagtttgcttcagatgtggtatcatcggacatgatgaatcagtttgcaatagaaagagaaggcttattgatgaatttgaatgttcgattatgatgtatgtgttgccatttattttaccaggatctatatttactaacaagtatgtttcattaacatc

SEQ ID NO: 307864 - DNA, 1097 bp, Cannabis indica
attaatacatttaaataaaaattcctaccatatgggaaaaaatggataaaaatcgtcgggaaaagttgattattttgaataacttagatcctgtttggttgtgttttcagttttttagaattgtgtttttaaaagtgagaatagaaaacagatttttgtcactataaaaatttaatggtgtttggcacaagttttttaaaactatttttagattttttcttgctaaaaaatttatgacatgaactcatttgggttcgggtttggtcccgggtttaggatctgaatatgtgagcaaaaatataaaatataatatgttagaaaaaaaaaaaatttttgaaaattaaaaacaatattttgatgttttctgtttttaaatttttcaaaactcagtttttaaaaaattatttttaaaaaattttaccaaacgattctattagtttttttaatgtaagtttgacagaattttatcgcatgatatttctagaatacatttttagctgtcaaagaaaatatttgttttacatagaaaatgaattggtcaattgtaagcgaagatataaattttttcaggctaaataaaacaagtttaaaataaatacacactcatctgattcaataaaaaaaaaaaatatccgtacctataaatctgttgtgattgtataatagtacaatattttttttattgatttttatggatttagattgaatactccttaaacttttttatttaattagtatgataccatgttaaaatatgaaaatatataattgagaaagtataatatgagactctctaatattttttagtaattaattgttcaaaattaaaattacgcgttaattatatgaaagttaatgtaataacacaaataagttatatatatgtgtgttttttttaaaaataagcgtgaatgtgccattaataattagagttagacttcgcggtcattacataaaaggttctccggaaccgaagaaaccagaataatctcatacatcttgttaataagagcccaattagccacattataggctacaaaattacaacaagagaaggagggagaggacttaacacaaaatgagatataattgtcaat

SEQ ID NO: 307865 - DNA, 1339 bp, Cannabis indica
atcggaagctgcagagcttgaattgttgcagtgtggaccagccatagcctctgtaggatggccaaccacctagtcaaagccgtagccagtcacctcctcaataggtaggcatgccatctcctcatcaaactgccccaaggatgatccttctagctaaacggtggtctggtctgcttctaacctactctcaaaaaatactttcccatgagccaatgtgctctctaggaaagaagcatcccccatgtaagaaagatcagctctgaggctgggcagcttaaactcgtaaatgagtttcaaagataagccatcgtattcatctcttatggcttgctgaccatcgagggctgtgtcagcttctcctcacacctccttaggtcagtctccaacttgaagttgtcagtagcaagcaaggtgttttcctaattcttagtgtcaagcatgacctctaaaccagaaatcatgttctggttctgctggccaagagcctctatatcaaccaaagccttgcccctcgccaagagattagcctctagggtctctacctgctcccaaagagcattcaaggaccccctagagttgccatgtaaaaagctcagcttcaaaaaggcctaaaaacaaaacaaggtcaagatttgagccagaagacaacactggctggccagcccctaaatagtgcaacgaaggccggctagcatcttaaagacactacccatggccggccagcttcctacaacaatccctttggccgcccagcttgtaataacacagaaaagtgagcaaggttaaatgtgcaacttatcgaggccaactcttaaagactgacggaggagagcctcttttgctcaccatcacaaaactcctacagcttgttatttatagtaggataggttctataaagacgcctacaaaatacttccatggctctctgccccatagttgagtctgctccctgactaggtctctgggtgcccctgttcgaaggttgttccctcctcgctggagggtcatccatcattttcagcccagctggcgcaggccctaaagaaggaggaggaagtgatgaccccacgacatctccaacataggtggtttgggccaccttggctctcgaacgactcgaaggctcatttgaaggtccatcagttagacctttgaacctggaagacatattgcaagaagaaagtaacaaagtcaaaatacgaatcacacattatacatcctaagactaccatgcatgtaacaccctcactattaggcacgctacccaagacaattaagaaaaccctaatcccctaaacggataactaaaaagaaaagcgcgagaaatttaaactttaaa

SEQ ID NO: 307866 - DNA, 1165 bp, Cannabis indica
tcagcatgccacctgcatgcaccacaacatgccccaccacttgaccaccacttggccaacttgtgggcatcacttagcttgtaacgtgccatcatagactgcacgtaacacctagcttcactacctttcgcatctcctcaacaaccatatcagcgatctcctccttgactgccgaaggatcgcgacaactgtcacagttactgtagggctcgatgctttggtgattggcaataaacccatatttttggagatattccgtagtgactaatacattaacttgtagactaaggtttattaacacttaaatcatataaaaatcttcatctttattatttaactacttatttaatttcttaagctcttttttattttagtttctgaaaatctaggtaaacatagagaattttggaaatccatggatgaataaaagaaaatgtaaaaaaataatttggaaaataaattaaatttgtgagaggagaaataagagaaaatttgtgatagtaacatgattttgtagaaaaatgtcaaagatggtgtgaaagaagaatgaaaaatgaagagtatttatagaacacaaatattaaatgatttatttaattataaattaattttattaaaataacagttaatactattttttggtttgtaagtttttcttcatcaatacaagtaatcacaatgaaaataggtctcattagcgatttgtattgacgaaaaattagtcaaataatttttctattgtataatgaaatcagaagtttccatctgccctaaatctaaagttactactaaaggaaattaaggtcgagcattaattttttaaaaaattattagaccgaaattgagtttaaaatattaacttagcgtacattccaaaatattaaattggaattattatttaacaaaatacataattcaatcacatattcaccctacacacgcttaattattaaaaaaagaaaagaaattgacatgttttctttgattgattggacaaaataatgagaggatattttaatctcttatatacagttatagtagagtacaaatgtttctttagaatttattattgtttaaaatcaaaatcaaatgagaaatattaaaaaacacttaagtaagaataaaaaaacattggaagctgctgtcttgtctatattgacatggt

SEQ ID NO: 307867 - DNA, 1310 bp, Cannabis indica
aataatcttaccagggtcttattatgatcatgatgatcatcagaagaagaatcagttcgtacataaatggttgaaaccttagacttataattaatctccttattaggagagtaattataatagtactgattattaacttcatcagtagtaataatattattgctcttgtagtaatcttcatcttcttctccatctaataataactttcgtttccttggtgttaataaggatgaataatattgttcataattattattatgattatgatcaatattattgttgatcatcaactctctcactttggtttgcagcttgttataattctcccacataacacttaacatttcactaagcttcttattctctgagctcatcctatttacctcttcagccaataatatttcatcatcattcttattattataatgctcaacatcttcatcatcatcatcaccatcctaattaattaattaatttaaaaaaacattatgagaggttgatcattcaaaaaaattagcaaatttgattattatataatatacatgaatattattattaatatgagaaatgattaatattatttgtactcacagtaacttcggtgagatgctgaaatggtttaagattgagatctaaagaatttttcgtccactttgactccataaatatatatatatatatatatatgtatatatataattggatgatgaagatcgatccccacaaagaaaatttattaaaatcttttctttttcttttttattgaaaggaaaacacagaaaggattgtcatatttataggggaagagaatagataaatatgaattaaaaaggaaagtatgaggaaataacctaaaagtcattcaacacgtcattctcctaatttgtatctagtctttaattattatatatttataaaattaattttttaatctgtttttttgtactttggtataaggataaaagtaaccctagctagtcttaattctgttattattatattaattaatactctatataataaggtaattactttatttatttatattatttcatgcgtgattgaatttaaaattaattttttttattatttcttacaataattcaataattagggtcattaattatatttagtaccactgtatacttctaatgttttttttaaagaaataaatttactcataatgttttcctatatattatttcttataatttaaaattagttattgattatattaaaagtaataaaaaaattatcatacaacatgttatagtattagtagaaatttacaaaaatactagattttgagt

SEQ ID NO: 307868 - DNA, 2912 bp, Cannabis indica
atttaaatatcataattttaaaattaataatattcaatgtagtgataatcattgaaatttaaaagcataatagtgatttaaataaaaacaaaaattactattatactttgtaatagtaattaaaaaaaaattattattcgtcctaaatttatcttcgcaattaatgaaaatgctcatctggttaaactatcaaaacattcaaatttaatttaaaataatatttaaaatttaactaattctaaatatcaaaatttgaaaataatttttaataaaaaaataaacaatatgaacaaatttattattaattgcaacactttaggtggattaattatatttaggtttaactaactacatggatgctgaccctttacgtggcaacatctaataatttgttattttttttatttaaaaaaaagtcacccaataatttctcataaatcaagaattctgttatatagccacattttatatagaatagataataaaaatatatttttgttcaaaaaaaataacaaatatatagtaattaaaagtttagaaatgattactatttttattttttactaaatttatttgatttttttttttactttaatgtttaactaggagtgcaaatgatttttttttttttgttctactcttctttgttactatttttataatttaactaacaagtgttatcttttgaattatttattacaataattaggcctaatattattatcttaattatcaaaattatatcaatataataaaatagcttcactaatattttactcacagttgaataaaaattaaaaaataaattataatgtttaatttttattaaaattctttttgatcttattattaattcttttgctgcaactattaaattaatagtgtgtacttataattagagaaaaaaaaggaattatgcacccatctatttctaaattgtgtatacatcatttaatattactttagtactgagtcttgtccttgtgacatgttggtttaatcatattgtttaaggtttttccgcttctggtgtccattttttgttttgttctagttggtttttatggcttctagtagtatgagaattcaagatgtcaaagcaaggagctaatattactttggaggatgagaaagagtatgttttagccttctcagagactattcaaccgacaccaactattgacgatcgctggtgtttggtgggacggttcttagcccaacgaagtatcgattttgacaccatgcaacacttgatggcctcgttatggcaaccaggccgcagaatgtttgtcaaagaactagatgataatcggtatttgttccaattttatcatgaagtcgatatacggagggtgattgaaaaaagtccttggacatttaatggctttttactggtattccagcgactaaaactgggtgatgatccattggttgtccatctaaataatgtgggtatctaggttcaactacatgatctccgtccaagattcatgtccgaggctgtggtgaaaaatatgggtaattatattggaaactttgtggagtccaatcccaagaacttcatgggaattgtggagaatttatctacaagtgagggttacacttgatgtcaataagcctttgaaaaggaggaggagagttaaaaaggatgccacggaggaattctgttgcaatttcaaatatgaacatgtctcattgttttgcttcatatgtgggatattgggtcactcggagggatattgtccttctttgttcactacacctcttgagaaaatagtgaagccatatggatcgttcatgagagcacaaccacatcgtcgtaaccataagatcagagccaagtggctgggcagctactcggaatttattgacgccggcgaggagctgttgctaccagaggttgaggatgacttgactacgaacacagctgggatcacgtcagccatggagaagatcaggggagttaatgttggggccatggattttggggagattaatgttagagttgacccaactctttcggccaataaatcccataatcctggggattctcacacgctgactcacaaggattttaataaatccacaagccaatctcctttgccagctgtcacaagtaatatgcttgtggtaattgataataaacgtcaaatgactcaattgggcctgtcttatgggccggttagtatggaagaggaaatgaatgttggtaatataaataatgatattattgaggggtcaaaaaacaattttcatgcccaccgagaattatgaacctactcagttggaattgccatgggcttgaaacccgtgggccttacaattccttaaggatttggtaatccaaaagagacccaattttatctttttatgtgagactcttagtaaaagagattacatggagagagtttgtatttcgttgggctttgaaggcttatttatggttgatgtgcaaggacatagtggtggtttggctcttctttggagatttgatgatgaagctaatttactgggattttcaaactcacatattgatttgaaaatcacagtttctggtacaccctcgtggcagttgacggagatgtatggtgaacccaatcggcatctcagacgtaaaacttgggatttacttcatgatttgtcctctgaatcatcgttaccttgatgtattataggcgacctcaacaatgtttttagtcatgatgacaaacggggtggtaatccttatcccgactggcttctgtcggggtttcagcaggctattgatgactgccatttgcaagacttagagttggttgggtatgttggaagttattttaccaggaacttagatctactcacaagtatgttgatttaacaacctagatatgaacttctaaaacgatggaaaattaaacacataaaagtatcag

SEQ ID NO: 307869 - DNA, 861 bp, Cannabis indica
tacccacacaaaataaaaaaaaaaaaaaagaaacaagtgatagaattgttatcgttatcatatcttatttgtttgaagtcatcacgatatgcaaagtaattgttatcatatttcacttgtctttactattcttcttaataggtttgttctctacaataaaataaattaacatataagaagaaaaaagaggtttggtaattatatgtaatattatttttgaaattatgaagttaataagttagttaggatatttattttatataaaatgtggttatgtaagagaatttttggtttaacgatttttttaacgtttttttaaaataaaaactaacggagagttaactattagcgttagctattgagtatggaataaaaaaaattctaccattgaaagttttcaattctatttttaaacccaaaatatgctaaaattaaaataaagttataacgactggaagtttacaattccattcttaacgcaatttttttttcttttctacaattgagaacaattattgaaagttttgaattccattcaccattttttttctacgattgagaacctcccaatattcttaaacccgaagatcccatttttttttctaggattgagaacatctcaatccattttctggattggatttcataaaggaaggaaaatgtgtttgggatttcataaatctcgtggtatgtgaaacgagatgaaggcttcttacatgtaggggtgttcataaaaactgaaaaactgaaaccgaccatcaaaccgaccagaccgtaactgaattttcggttccacgtcatcacccaatttggcggtcggtttcggtttttaaaataaaaaaatagtttaaccaaaaaacc

SEQ ID NO: 307870 - DNA, 1175 bp, Cannabis indica
taacaacaataataataataataataataataataataataataataataataataataataataataataataataataataataataataaaacaaatccatgaagtgttgttttctcaatagttgacaaacaactaaaatatcataaatttatatttttataaaataatgtcaacatattttgtaattttcaaaataccaaaaacatttaaagagaaagttattccttgctatttcaaattgctatatattggaagttatgtcctacgtacaaaatggtgtaaactttcatttaaaagaattagaatattgcacttatgaatctatgataaaacccccaacacaaataagaagttcaaagctcgaatttttatcctataatatatatatatatatatatatattatatttatatatataaatcaaaagtgattgccaatgaatgactctatctaactcttattcaaatacatagtttggacacttaatcttgtgacatgcaaaatagtttatttatgcagataatttattaattttggtataatttatttaaatggaagaaagcaattgatgcttcattatgaatgatggataatataaaatttgacgtattagtcaatcaaaatttgttacgtgcaaaagataagagatatggaaatatagaatttgaagattttggcatcgaatatttgagattattcttattccaactgatctacatttaatttaataatcccatttataaaatattattgtttctacccagaaagtgatggagccatatttattttcttttttgtatttgcttctactctacccagaaagcataatacacgttgattactattttcagtttttatttattttttttaaaaaaagtaaaaataaaaatgaaatacgaaaaataaataaagtaggattttacgtacagaatttcacgaagacacggtaatatgcatttaaaaatagggaaatttgcggcaaaagtctccaaaaagttcacgttgatacagattagtccccaaggtccaaaaatagcggcaatagtcctcaaggtcacactttttatttgtccgttggtctccaagttaacagattcgttaaatccaattcaaatgccacgtgtcgaaatatcattggtgggtgttaattattttaatttaaaaaaataaa

SEQ ID NO: 307871 - DNA, 2864 bp, Cannabis indica
gttcttgctcaactaaaactctcagaaattgaattgcactaggttgatcaggcctaacatatatatatatatatatatatataataaaatagggtcgagatacatgagagacagtcaaacaataaataacagaaactggcttcttggagccttgtttataagcccagaaagttaggggcttgggatttacgaaaaaggtcctaaatggaacaaggcggctttagttaagtatttttggactattactacaaagcaagatgtgtttaaagtgaaatggatgaacaatttgtatataaaaaattaagagatttggtgcatgtttgacatcataactaaaaaactgttttttgtttttaaaaacagaaaattattttttgaaaacaatttgacttgtttgaccttgttttttaaaaatcactaaccaaacgtgacttgtgttttaaaaacttcaaaaattattttttgttctcaattctaaaataattttttgaaaacaaaaaacagaaaacaataccaaacatgcttttggtttcttgagttaaaggctaacgttagttggtattgtagaaaacttttgagatgaagaaagactttctctcgagatgatattatcaaagttggacttagtggtggattattgattgggcaagtttatgatcatctcatttcggataagaccagatataaatgtatgcaagcaatttgttttttaaatattcttactcttggagagttctatagaatgttaagcagtggctgggggaatttctttggccaagctcctttgaaaatctactataaattaaaaaatgtattaactaattaataattaaaagccaacaaaactactatattatttaaaagtatggactaaaaaaatcttccaaattatctcaaagttcgggaattaatttgtcaaaaattaaaatttagggaccaacttatcaaaattaatatatttagtaaccaatttgtcaataaaaaaagtttgaacgagaaattactaaaagtctttttaattacgagttttaaaagtgtaaaagtatatcacttgcactgcattttgtggtttgtcttgaggtcatagctcgtgcgatttggaaaatgactccaatcaaatcgcacatgcactggattctaattctaataaaatatcaacaaactgaaccattaatgtcaccatgaacatacaatacctcttctattagaacacaaatatacttaggcgttttattaatgggtcccactcacatttatatcattaaaaatagtctttaccttttttctaacatgtaacaagaagtattgtgtttaatgtttaggcaaaataggtgagaaaagcacataaaccgttgagtaataacataagataagtcaattaaaatcttgtaataattccttcactggtgctaaactgctggtaagtggtaacaacaaccaccaagtaaattcattacattaaaaatatggtgcatcattgcgcaattacataagcacatgacatcatgttgtttaagtcacgtgactccaacgacttccaacttccaacattttccactacctagaagaaaaaattcatcaagtctacaaccccaccataaaatagatatttaaaaaggaaaaaaaaaaactttacagtaaagtagaaaattataatatcaaaaataatttagtatatatattaagcattttcatgttatcttctcacctaaccactatataagagtgtatatatacataacatacccaactaaagataatccttcatcctaaaaaaactcgttataagaaaaacacaatgatagaagctatggtaggcgagtttaacaatccccaattgttatatcccaatttctcctcctcctcctcatcatcatcaacttctacctcaacttctacaataaccactgatctcatgtccccctgtcttacggaccagtggggagacttgccgttacaagttaacgattcagaggatatgatcgtctacaactcactccgcgacgccgttagtttcggatggtctccctcagatcattatttaacggcggcagcttccgttgtgaaatctgagccgtacgattatcagtatatttactcgtttaatcagagtagtcaactggctgggcctccaataaccgctgccgaatgttcattaatccctaataatattaatcagccgaggaattttcagatcaacggtcaggatcaaatcttcgataaatactcgggaatcatcgctcctaatgtgttattaaatattcaaaataatgataattttaatagcgaggaaaacaagtgtcgtaataatattattggttcgaaccggaaatcgtcggtggcgagagggaggcattacagaggtgtgagacagagaccatggggaaaattcgcggctgagattcgagatccggcgaggaatggcgccagagtttggcttggaacctacgagacgtctgaagaagcggctttggcttacgatcgagccgctttcaaaatgagaggttcgaaagctttgcttaattttccacaccgaataagctccggcgaaccgccgccggtaaggatcacgggtaaacgccgagagtctgagacaacaacgacgactgggtctggtggcggctcaccgaagaagatgaaggttgtcagaaattcggcggagaataatgacgtggcatcgaagaaggaattcgacacttttgagaaaggccccaccacaagttttctgccacttggtgaagagctattagttagttaaataagaaaaaagtctcattacttttttcttttgaaatgctaaacaaaaaaaatacttaaaaagtaggtgtcagtcaattaattttttattttattaaaaattaaaa

SEQ ID NO: 307872 - DNA, 2202 bp, Cannabis indica
atgtatggaacccactaaattaaccaaaccaacccacctaattaaaataaattctcattattttatagtataataattgtaattgttgtttttatttacattttttttccttagggtagaaaaatatacaactctaaaagttttgagacttttcttgtttgtacaaattcataagggtcttctctcgatcctttattttctatacaaattctcatttttttttctttttttgggaaagtaaatttaattctagaaataataaacttcaaaaatatatataatttattccttattttcttcacatttgacctagaacttttattcgaatgtgatgttatgttcgtgaaccatgtgaattagaaaaaattaaaaacattattaactattaattaaagtctaattaatctaattagtacaaagtagcatcaaaattaattaactaataattaaataaatagcttatatataaatatatataagcgatcaaattttgatatcatttatacatattttagaaaaattcagtcaaagtcaagacaagtttaattaattatacaaatcaagacaacatctttattgcttggtgctcttgatgttaacctttgtcaaagtttaagagtcaagaaagtatatataatctttgatttttaaacaaaattacaaaaaatataaataaaaaagtatatgtatacgtatatgtaaatataataatttatatatttatattgtcgacattctcaaccttcaattctttatggactagtggtagtgatcttgatcaataaccatttgaacaaaagaaaatgacaagactcgcactctataataaatattaatttaagtaaaataaaaaaaaaattgtaatacaaaatagttatatatatttacttatgtataaatactttgttgtattattatttttttatattaataatgtttgttgagattttccattatggagacacattatattgtgtttgtaaattgtatggcttcgattataaattcttaaaattaattcaaataggttatattgttaatttaatatgtgtccattatttcctaaagaaagtagcaacttataagttatcatgatgatcactttttaattataattttgtttttaatgataatgacatgatctatgttaattatttgtgaaaaaagaattaataaataaataatattccattttagattctaattaagtttatatatcattaatcattccttccatataacattaattagtcaaaatatttttatgagatttataagataaatagcaatgggttggagaatatgatatatatactgtatatttctatatatacataatatcacttatttaaattatatgttaattcattataataatattcgaggttgatcaactaataaaaataattcatgcaataatttaaactcatgtcttcttcattttatttatcatttccaaagtcaaaactactcatataattatttttcttgctttatttaatttgtttatatattttatatttctgtggtcaattaataatcttgaataaaagattagtatacattgattttattctaataattaatatttcatatcaaaatcagtttggtgtagatggaaatgagacaatgcttatttttgcattaacatgtacataattacacaaaataaataaataaaatttcaccaaccctagcataaaattaagaggttttattatttttaaatttcaaagtagttcttttaataattttatagaaatccacgtaacaatcaacataacaaccaacgaagtaatttaaatcacaattcaaatttacacagcaaaccaacataaaaactaccgaaacaggaccattcctacgttaaggtgggccgcacctaaggcccactcctatcaagggcccaaatgaataaaaaaaacttttaataattatagatatattttaataattttttaaaatgtcatttattttataaatagggttcaaaaatttattttttttaaggtccaaactaacttcgagccaaccttaactttatatcgaaacaacctaaacggtacaagtaaaaaaattacatatgaagagattccccaaaaataaattggaaaataattgttaccttaagttgaacaacacacgtgaacacattattaatgggaaatttgattttctatacttacatatacttaatatttt

SEQ ID NO: 307873 - DNA, 2567 bp, Cannabis indica
ataggttagcttctcaagtccaataaacactgtaaaataatagtgtgaacttcactatttatatacaataataataattaaaacattagataaaacaaaattaattaattaacaatccttcaatttcaccaaccctcaaatttactcgttaaatgacaaaaaaaaaaaaaacagctatttcaggctcaatgccgattcaggtcatgatgttaacattgtatttttgtacgcacaaaatgttaaaatttacgatcataatttataaatatttttcgtttttttaaaaataaaatataaaccttatccttatcttattaattaaaatgtagttgagacttgagaaagaggagaggaatgagatgaatgatccaacatcccacgtggcaggtacatgcacatgggcttggctcgtgcccaaaccagaaaacgatccatacacatgggcccactttgtcgtccagcaagggacccgctataagccggcccaaatccactcaattccaactcctatatagatcatcaaaaagagttttcacttttttatgcaaaaaatacagttatctgagtcagatcagcgtgaaatttctgaacccactttggttttatttcatttgggtattttttctttttcataacaaatggctttattatgtggtttttagtgggaaatgaataatgaagacatttttcttttatggtaaggtgctactaatgcttatctgggggcatagcatacaaatatgtcccatttttgttttgtttttccacttcaatttggaatcttacacgtatggtgggacccattttctactgactaaatcttattacactagcacaatagcatattgttaaaagaaactcaactgtcacattaagatgatctatctggaagggacgatcactctgtcccccataacattatataaatgagattattaattaaagatttcattgaagtgtggacatttttttttttgggtcacataggctccactatctaggggttgtggcttcccaaaataaagactgttaataagtttcgtttcagttagtgcatttttctgatattatgcttaaaaaaaaagattctctcttcttgattattgatgctcttctcaatgtactcaatttcaatgtttgaaatcttgtttattgagaaatcaatattcactttttaagatttaaagtggagacaacaaaggattgtttcaatgaaaaggcatactattcgatataagaactataattgtagtcggattaatttgaacaataccaaaatttatgagagtaattaatgctattaaggacactcagataaaacttacgagtactcaaagaattgacaacaaacaaacagaacagatagtgaaaaaataataaaaacacaaagaaagtatagtagttcaatcggaacttgatctgtttaatccgttgttgcaaagatttcaacttagtttatttgattcagatcactcctttatataaaaagtaagtattctttaaattttaataactgatcagttttaaaaccgttttacaataaataacagtattaaatcagaataaacgttaaagataagaatagtttaatctgtcattgctttaaatgtggtaacgtatgcgacttgcttggcgtgagttgtttgttcatattcttgcacaaactcgcaggcttttgatgcgctttgtattcgctaagtggctcatgggcctgtcgtttggatgtctacgttcaactaagattgtgtatacggacatttcgcgtgttgataacgtgggacatttgagtccctgatgagtcgttgaacacgatcagtcattcgaaccaatctttattaaagaagcgatctttactagtcataggagaggtctacctagtcgtcgcacatattttgacatatatgcgacttgtattaaatcatcttggtcctgcttgtctttgactatgcaaggcatatgctactagactctatcaagatcgcataatctcgctagttcagatcaagcgaggctaactctttgagagtcattaataaataggtcatcttttcctcgaggaatagatccacgtatcaattttatagtaggctgctcttgtatttctaggcgaaaaattcgcactataaaatttatgaaagagataaatatcattcaacaggaaattgaatgtcataaaatatataaataaataacaagtccgtaaaaagttatgtgaagataaaatcgcataatttttacaaggagacaataatagcaccctacgccgatacatgggagcgacccctaccaaaatgacctaatagccaatgtcacaatagattcagtgaaaaacaccaaaaacaaagcaacaaaaaggaaatacacagaaaacacaaaatcaacacaagacctacacaacagaaaaccacaactaaccatacataaagatctaaatagagcaccacaagatgggaccacccagtataagaaacaaaacaatgtaagggttcactgccctcgagtagggctgagcatcggttggtttggtcggtttattttctataataaaaattcaaaattcgtatttt

SEQ ID NO: 307874 - DNA, 1186 bp, Cannabis indica
gtcagtctattttctctcagctttgcaggccagtgatgggcattggccagctgagaatgcaggccccctattcttccttcctcctctggtaatttcatattcatcacttactttagcttttcttgactacacaaccaatttagtatatcataattttaaattttttactatttctactactttgtatattgtaatttttttaaaagcatcgtatatcgtaaattaattcaaaaaatttatgttttttttgtaaatataaatatatttatatatatttttacaatatattttatattcattctctcattttaagtaacatttttaacttctcaatcaaatagatgtcacaaactaacaattgaccaatttttgctatttatgtacgtaggtcatgtgtttatacattacaggacatcttaacaccatattcacagctgaataccgtaaagaaattcttcgctacatatactatcatcaggtatacttcataatatatatttatgtttaaataatagtgaagagatatttgcttttgtatcaatattattgtaccatatttatgctcatatactatactattttgtactatttagaacaaagatggcggatggggattacacatagaaggtcatagcaccatgttttgcacaagtctcaattatatttgtatgcgaatattaggagaagggccaaatggtggtgaagacaatgcttgtgaaagagcaagacaatggattcttgaccatggtggtataacatacataccctcttggggaaagacatggctttcggtatgaatccaaaattacaatgcttttgtgttatgtaaatacacaataacttaaatttgttgcattatatcttatataatattttggggttaatggtagatacttggtctttttgattgggctggaagtaatcccatgccccctgaattttggatgttgccctcctttcttcctatgtacccaggtattaaaaattttatatgttttagcttgaagaatattatatgcatagaaaaagatgtagaatataaatcaattttttatcctttttatgcagccaaaatgtggtgttattgtcgattggtgtatttgcccatgtcttatttatatggaaaagatttgttggtccaatcacacctctcattctacaattgagagaggaacttcatactcaa

SEQ ID NO: 307875 - DNA, 1119 bp, Cannabis indica
tttatttagttttttaaaaaaaaaaataaataaattattttaaattaaaattattatttggaccaataatttgtcaacacatagaattttgaattagtaaacaaatcagttaaaaattgaattaaaaaacttaagaaaattgtgacatttaagagtattaccgtcaatttttgaatttgcaaatataaagttttgaggagttatgctgtaatttttccatttattaattatcagagttacatatgaaaaaattaaaaaaaaaaagtcccatgcatcttatatttattggtttacatagatcatttttggtgttaattttaattaagagaaacaatggtatttcaagggagagttttgtttgagttttctttgatgtgagagttgaatggcaaatcgggaaagcgcatctgcattagttccttctcctgtgatcacttcttcatatatatctaccattttccaaatttacccttgaaattggcttctccaacaactttttcccaacctcaacaagtctcagcatattctcctcgcttgatatgtcaattgatgcctcatctccgatcaagttgtcatcctaataaatttcaaaatcataattaataagaattaacaagaattgtaagtaccagtttagcttataagtgtggtaaattactaaattagtgtagcatgatcaatttggaaacctaggttgctcatgtatttggcctatcaactattattttatacacgtgaaattagtacgttggtttgcctttgtttttactgagcagtggctgagtataaatattttgttagttcatctttctcattttaacaactcttacataaattacgtacgtacacagattgtatcgatctcttggtttatttttgttgtgatcagtttttgcaggtgcaagaaactcaaatttaaaagttgtttatccattataattcagggatactgataaaagaagtttatccaacaagatcgtaaggggtagtttttgcatcggaggtagttcgatcgatccttgaagttctagtgggatgtttgattgataatttccaagaaataattagaagattgaagatggtagagacattaaaatcaacaatatcagaagtagcatc

SEQ ID NO: 307876 - DNA, 1797 bp, Cannabis indica
ataaggacccaaaaataatttttaccctatagcccactacatttcagggccggccctggttgtgcatcaatgggctccccaagtgaccatcttgggttatgaagttgtgtgtggttttctcagccattgtggttggaactcagtgttggaatcacttagttatgttgtgcctataattggttggcctttgtctgcagatcagttttataatgtttataagtatttggaagaagagttgggagttggtgttgaggttgggagaggaaaaagcttctttgttggatatgaagaaagatgatttggttaagaatggtgggaaaagatgagaatgggtttaagggttcttctgttatatatagctatggtttgaagctcttttgaggtatcaagttcaatgctatttgataatgaaaagtttgagtaagctacattttaaattaggtactaatatgtttgtgtcaatatataattgtgttgtaatatataaataagttttgcattagttatggcttttcaagattctatctttttattggagaaacggtggtgagtgtagtagctctagctctagctctactcattttataataataagtcattcaaattaatcatttaaatcaaacatataaataattttaagagcattgttattgggtgttattgggcatcgttgatcagcaccttctataagtggtatttcacgattggttggtgatattctttataaaattactttcttatataagattcgatacttaattatattaatagttgtatgacacatgttagacaccaaatgtgtgttttagcaattctctaattttaaagctaatcaataatagagaatcattgttaggcaccaatagtgataatattttctataggtaacgtcccacaagtagtagcgatatttcttaaaaactttttttttaaattatatgagatttaatatttaattacactaataatatgacactcagaagagtactagacattaaaaatatttttcaacaaatctcttaataataacatttaaaaactcattcctcaacataaaaataaaaggtaggaatattgtctaagcacaaatgttgcttagattgtgtcaatgttgctaaatacttgctagacttgttcaacattatcatataatatatatagcctataacttattattcaagtcataatacatttcatgatccaatattgaagtaagagtccaattttatgtaagctaaaaattgaaagacaaaagcaactatagaaaatgtaccacactgtcaaactaggtcggcccaagcattgggcaacttaggccattacacaaggctcccattttttttaggtccaatttttttttttttaaaaaaagaaaagacctatttctttctctttttttttttcctattatatacacctaaataaaaaatttataattgaaaatttatgaataaatcttaaaaaaaaaagctaataatgaaattgtagttttaatgtacacgaattttttttttaaaaaaaaaaaaaaaaaacgaccaaatttaaaattttgcacgaggcccaaattttaaaattttgcacgaggcccccaaaatgtttggatcggccctgagaaatcactttaggctttgttgatttacacttaataaatactatatttgtttgtgttttaagttaactcttcaatttttcacataatcaattcaagagtcaacactcttatcaaactaccacacttatcaatgaagaaataccctatgttttctattatagtttaatcaaaactaagtaaaaaaa

SEQ ID NO: 307877 - DNA, 1190 bp, Cannabis indica
acacacaaaaaagtttaaaattatacatatagtcatatataaattaattatttattataaacagtttggtccggtttaaccgttaactatatattacgaaccacaactgaactattacgctgtaaacgatctagattgaccaaactaccaaaaacagtttctccagttacggtttaaagtggttcggattgttgtggtccggatttaaaccgcggttttccgatttatatcaacaaccctatttatatctatatatgtaatccacaaataaaacgtgcaaatatcaaggggtccattttgagatcattcaaacaaacatgggccactgattgattatggattagaaaagaagatatataatcttctcaattcatataaataatttgggcaacgaaaatgatttgttgggcattgaacggtagttaatatctgttgatttggtagtcatagtcttcatgcatgaagcttaattaaggtagctactcagaatggggaaaggcatttcggggaccattaattattgatcttaaaagctaggataatgcgaataattaaccttggttattgggctagagagagagagagagagttaaagcaagtatataatagcaagcaatatgggatttttgtggtgcatggaagaaagtttcttagagatatgattctgaatttgcttgcttcagaaacttgggactttatttttcttggaggagattgcgtaaagctaaatagaaaagctatagagatatatggttacagcgtttttcttttttatctaaagaggagacacaaaatatgtgaaatggtccccttgccctactaattaagatccccaaaatttatataaatatacacataaaagataaaactaaagcatgcatcaaatagagactaatacagtacacctaattaccaataattatatattatcagatgatctctcacacaaacacattaattatgtttatcaattgtaaatcatctgaacttaatcatgtgttaaaattactttgaagtaaatattatatataaacgtgaatactaagaacggtctcccatttctcaaatatacattaaaatatatgaatttaatgaatagttgcacatgtttactagtaagtgcaactgaataaggtgtatttttatgaggttacaaatttaaatattataatttataatcaacaaagaaa

SEQ ID NO: 307878 - DNA, 1918 bp, Cannabis indica
aaagagacatgatattgtcagagattagacgacccggaataaacacactttgagtatcagacacagcaacatccaactaccttttcattctattagcaatcaccttagtaattactttgaccaacacattacacaaagaaatagattgcaagttccctaacacagaagggttcttcttcttgggaatgagaaccacattagtttcattaataccctccaggagaacaccacgatcaaaaaaatctcaaaccatcttcaccatatcatgaccaactatctcccaatgttattggaaaaaagcagaagtcatgccatccgatcccgggctcttgtctgggtgcatttggaacaaagcatgcttcacttcttcttccaacacaggcttgagaaactccgaattatgagtaatcgaaacacactaaaccacctcccgccggttagtattagaagccgaaaataaattagaaaaataattcaccaccaacttctgcaggccattgtcccactttacccaatcaccttgatttgttttcaacttacgaatgtgattgatacggtttttttatacatacaacattaataataatattcttaaagaaataattaatttttttttaaaaaaaaaactgaataatttgtattttacaaataaaaaaataaaattaaaccacattcttatatacaaccaaacaagataattttaagattctgaagaatcttaataattatcatgcatacaccaaatagaataatgatgctttcctaagcttcaacattcccatcttcaatttccaaggaatcctaaatttattcccatcaacttaaaccttataccaaacactcccaaaaggggatagcaactatacaattcctcacttcttattttcatgtaatgtcaaaaaagacccatagttggggctgttttacatgatatatatttctgatagatcatcatttgagtgtcgtttagaatattggggaaaacaggggattatttaatgttgctcttatttttttttttttatttttttttgttcattataatattggtggattgtatctctttagtgaaaataaatagaagacggttgggtgattggaagggatggttgaagagagattaatgattcttcatgtgtttgttgagttgttcaaactgattagtgataacgatgcagcagcaacaaaccaattagtggcgacgacggtgtctgaatactgggaggcctgtctagagcaccgtcgactatcttacagactgctaatagaaatggagggaccacatcacttgctccagatatcaatattttgcattggtgtctagtgagcaacaaacccataaggtattagtttatcttttgttggtatcaacattgttcctccgctgatgaaagtctaactcattaatcagattactaaagcaagccaaataatatgttgccaactaaatctaccagcttgggggtttgatttgatctagttagttagtggtaagtgcagttcagagatctaagaggtagcttttgggggtgaaacaaataaaacaattttaaactacgaaaatgaacaacttacaaatgagcaaactagtagaagtcgacagacagcattgcaaaatctgtttacacttttaaatcatatcactatctgaaatacaaactgaaccatatggaaagaatcattagggaaccttcagcagctaccacaatgatcagagtagaaatatataaattgaatgagatcaaatctgagaagaaaatactggtttttttttttgtttgaaattttggccctggcagttcgacggagacacctcttaatggccccaaggcttttgagtctggggattcaaaccttggaacatagacttaccttgcactttccaacagtccttaccactagaccaccccttggggtt

SEQ ID NO: 307879 - DNA, 2862 bp, Cannabis indica
agagcctccaaaccctaattttaagaaatgaagggatgagaaaaacaatatgtttgagaagcttcaaatgctctgtatcatagccacttgcgatccgttgtgagcccaaagtgccaccggtccaaaaaagtcatttgtgatccgttgtgagccaatgtgttgccggtccaaaaaaatactttcgatgtctcccctttaacctccatttgggacctttcggccaatgtgtgccagtttccaatgttgggtctctgacctgtttcaaaattatacaaatttctcgacgtgtacactcacaaatttctcaatatttggccttgtgggattcttttcaatgtcacgttcgatcttgtggtctcttaaaggtcgttcattatacccacactatccaggcccaaacgtgagaagagtgtattagagttagtcccacattgcttatgtgtgaaaataaatttttatatataagatgaatgggctactattcccattgccaattcgttttgagatggaacctcattcatcttatcctaaattctaacaattacaaaaaaggttttcagggatggaggaaactggaatacaaccaaatctttggtgggtaatgggtaaacacccacttagccacattatgggcaacaaagttacagtttccactaatattagtgaaaatacaactaacaacgaatgagaggatctaatacaaaaagagacatagttctcaagcacccaatgggactccttcccattaagagcgttgataactaccctcaaatcactctctacaataataaacttggagccaagctccttcgcaatatccagagccttgcagcaagtcgccacttccccacataacgcatcagagaactccaatcaagttgtttgaacccaaatcaccctgccaagatgatcccttacaaccactgcagtacacatgctatccaaccccactctaacattaaaattcaacttcagccaatcttgagagggaggacaccagacatccaccaaacttcaagaagggaaagggaaaaaagaagcatgatgatctgcaaaagatatatgaatacagtcgatacactttttcacatcaaccgaaaaattattgtgtaccttatcattgcagatctgccacatggtgtcaactattgtcgaagcataaaaaaagaactcctctgcattgatacctttgtgtttaaggtaccaaataaattttacccaatcccacatccaaataccagcaccacagataagaaaaataccccaagtagaggaccgccacaagtgaaaaaccacattacatgagagaaacaggtgttcaagagattcatcctccgtcccacaaagggggaagctaacatcctcaattggaaatattttactgatctctaaatgaactaggattgctttggatacgatgcaccaccaaagaatcttctgtctctctaagattttattattccacaaccttttccaaagcgaaggtgcaacctcacaataaggcacccaatctaaagcttgggaaagatatgtcgatttgcacatgaaccgaccgttactttcatagtccaaacccatatatcttttccctagccagaaggattacctcctttcaagattgtagaaatagtcccttagtcgaacaaattgtttaacttgtggatattccagccaccactgtctaacggaagctcggaaactttgctcgcccaattagcagaggaaccattagaacgagggaagaaatatttcctatgagtgatccaagggtcctcctaaatactagtatcccttccatccaccaccaatttacaggttccttttcttaagataatgttggttcttaccatatttttccaaaatcacgaatctgaatctttagaggtacaatttaggaaagactttcctttaaggtacttagcttctaggatccgacagcaaagggattggtttccaatcaataggttccaatctcatttcgccagaaagtcctgattcatttctatagtttttcagaagcgaagaccgccaaaagatttaagaaggcataacttgtcccaagctattaggtggagaccatgattacccttgtcaaaaccctaccaaaaatcacgaaccataccatcaatcttggcaataaggagactcaagagcttagtcgtttacataacatacatgggcaaaaataaacccatagacttaataagggtggaacgacccgcttttgacaacgtctttgctttccaaccctgaagtttagacgtgaggttatccaaaacaaaattgaagttggcatcctttttcctaaatctgaacaacggtaaccccaagtatttgatattacctttaggggatcctattcctagcactaccctgattcctcttttcacgccattggatatttttactaaagaaggtagaggtttttagtttattgacttgctggccatactaagtgcaaaacctctcaaggcattgccagtagcctttaacttcttccatattagctttaccaaccaagattaggtcatccacaaagaaaatatgtgaaagaataggggccccctattgagcctaatactcttgatagtgcccttacactagccatcctccaaaagtcttgacaaaatttttgcaatccaaataaagcggtaatgagacagagggttgccctggcaaaggccacaagagggcgtaatctttctaaattgccctccatttagacaaatattgagcgagtggtagagatacattgagatatccaactccaaaatttctaaggagccccataacaagaatgcacatgatcaataaatctccaactcagtctatcataagctttcataaggtcaatttttatgg

SEQ ID NO: 307880 - DNA, 1323 bp, Cannabis indica
aaaaaaattaataaaagaaaaaaagatgaaagattaaaagaaaaataattttttaaactttttatggtagtgtttattatagttacaaattttttaaataatttagagtatcgaaaataagtttaaaattttttaaacatacacgcataatatatgtaaagtagaatataaaaaattatgttgtctatactgttaattattcataatattttaaaaatttacaaatttattaacattgtaactataacgaataacaatataaaaaaattattagatatatatttattttcatgtaaagattaaaaaaaagattaaaattggaggttgacagttgatcttagcattccaaaaaaaaaaaaagagaatgaataattttaaagtgtatagtagtgacaattaaatagtggtggaagcctcccaaaaatttggttggaaaaagatggtggggagagatctccatttatggcccaaaattttttgaatagaaattatcacctagtagcttttatttgtctcatcataaatatcatcattggaccaaaaattaaagaggaaggaatcaattttatctttctaatatatttatatattttttttatatatgtaatacatagatatcaatcctaaatttttatagtacttatagctaacatcactagtaatgttcaatatttttctttggtctttatcatattattaagtttttggaatattttttaagatagattgatatgtatcaactatcaacttgaccctctttttattgaaaggtcaattagtagaatatccttatgattgtgtcgaaagtcgaatcccttatttgaaaaagaccataacaacatattattagtagtttaattagtgcttaaaaaagcttcttcttctaatcacgagacctaatgatctaaagctttttcaaaatcattattgctaatgatatgataatccattactttttggaactattaaattaataccaaaatcttagtttaactatgataatttattcaatatataacaaaaagttttcacgtatttaattgcaaaaagttttgatttatttatgtgctgaatagactcttaattattattattattattattataaaatttagagaaaattgcataaattgataaaatatttacacttttatgtttaatatatattttttatatcttattaaaaacataaaaaaaaaacaataagattactacatgaagttttttttttcatagtaagagtagataaaattttaaaaactgtaaaaatattttgtacaaccgtattttttaatttttttttgttatttttgtgtttttatg

SEQ ID NO: 307881 - DNA, 980 bp, Cannabis indica
aattaaaataataaaaaaaaagaatctaagactttaaattttaaaaagagagagacaactctgtgcaacaaaagtgttttcacataagcagttatatacaattttcaccagctagataagggatgaaagaatccgggctaaaataaatctggggaaattcatctgctttagtcatgatgaaattattatagcatgaaatgaaaaggaagggattcatcatgcttgttaattaggccaaacaagaatgatttaattgctcgtggtagaatgaaaacaaatacaatatctatcacatttaaaaaaagttggaaaattaaaccatatatgatggcaacaagtgcaaacaaagttcataaaaactaagcaaacgtctgaacaaacaacagatcacatatacataaattaagtaaactaataattttatgttcttgctgtctacataaattaaacgaaacaaagcatatatacaataaaaacaaaagaaatctaattacttaattcataaagtttaagagacaaatcaattgccgaacaactagaaggacccgaataatataaacaatatatttaatttatattatttaacagaaaataaatttataaaaaataaaaaaaaatactgagagtttaaatttttaaaaaaatttaagattttttaatattttaattaatgatttaatatatatatatatataatatatataatatatttaaattgcgggttgaacccactcaaaatgttcagtcctaacatatagtactcattctattttacacatattaggacactctcatttggtcaaaaattcattaaatttgaaaaaaaatccaattattattctatatttttattgtgctattaattaggttaaggacttatcaattcaactttcaaaatgtagtaagttttggtctacctgttctgtagacagtagggaacaataagaggaatacttgagaagattttttttttttttttt

SEQ ID NO: 307882 - DNA, 845 bp, Cannabis indica
tattttttaatattaaaatatacaataataactttgtactttaaaatatgtcttacaaaataactatcatatattgtaatttaattataaaggacaatttagataatttaagcattctaattacgttttctaataaaataaacaaaataaatcattattattcctgttgatctcaaatttggccaactgatagcggaatcgtaattatgactgatatcaccacgtatacacaataagatcatgtaaataatgagccacaatatttttatagaagttcgacctccactactacaaaatacccaatttaatgcttgccataaaaactaaaggactttaggagaaaccgtcaaactccaagaaattttacacaaaaatacctcatcattacttgaaagaacataatccttataaaaatacttataagcttccttaattgaataaaaatactcccatgaatatcaaaagactagtaccagcggtctgcatcaactgaagggctaagataaatatagaagatgaattcttgatccctctcattaaacaaatctgcaatgatttccaaatcccaagctcttgaacccgccaccataagatctaaaactgagaaattatcaagaccaattaaagatgaggtaataaaaggaaaagaggcatcaagaagccattcatcccttagaatatttatatttgaaccagacccaaccgaccgcccaatgggctcaagctttaatcaagtcttgagttttaaaaatgctcttccaaataaagcttcctagagttgcattaaagaaggtgttatagtgagaatttctcacctagaaactcgagaccagactcctataaaa

SEQ ID NO: 307883 - DNA, 1030 bp, Cannabis indica
cctcgtcatccacactttcggctaggtcaaggctctgataccatttttaatgtccccgcttcaagcctccattgggcccttacacccacggactcatggctcttatacacgagtacgccactctagcttcttcgtggattgatgattgaccctacagaccaacacgagtgtttccaccatgctttgtcttcactcacacacttcttgggaaaacttcccaggaggtcacccatcctgaaattgccccaggtcaagcacccttaactgtggagttctttagtgatgggataccaaaaaataagatgcaccttgttgatataggtagtaccaattaatccatttaagctctcttcaactgtgtagtcccatacctacacagtctcagaatcgtcccacttgacattctccaagcgatgtgggattgaacaacttacctggtattttcccttacggatcacgggactgctgactgtcacaatttgggtcaggtgtcccctacagatacttttctgatgtaaatgtgaaaagttggctaatagagttggtgagttcatcatcgcgaataatgtccgtatcaatggggatatccaaagtgatttcatgaggttttgggttagcctaagcctttttaaacctattatgccaggattggtcttgacgataaggacggtaaaaaagtttgaagctacttcaaatatgaatttctccttctgttctattataaatgtggtttggttggccatacggaggagatgtgttcatactaaaaagataacgatgatcctcgatgattgacgtagtgttccattgtcgggtcccaaacttaaatttgggttttacctagaaaacaattttgttgtgctcgcaggggaggattaccaagagagaatccagatggagaatgaatgggttcctaattggtgttggtagtgcgccgatcaagacagttaagcaggtaggtcgtgtcatttagggggagataattcttttagtatcttaagtgcaggcccaacctgttgggttttatgcc

SEQ ID NO: 307884 - DNA, 2506 bp, Cannabis indica
atttttttttaaaggaaagtcattttcgtaagatgaaggttagaataaagaacccatcaacgacctttctgactcttctctctctcttattaccttccaacgcacgccttccaactctctttcactctctcatttgtaacctttttctcattttattacatacccaaaattaaattataaaatttaatttatttatttattatatatatagctatacatatatttttttttatctacctatctatatattccacaaacccatttaattaattttacacaagctcaatatctattcatcttcatcttcttcctctcctcctcttttctccgtaaccatgtcaagtaccgatctagaattacgccaaggcttatcgtcttcatcgaagatcaacctttctcctatcccaattcagacaccggaaccatccgaaccgcctctactcggaagaatcatccaaattcaaagactaaacgacggccaagacgatgaaaacaataacaagaataagatcaataacaagataaacgacaacaataacagtagtactgatcatcagaaagagatcaaagaaaacgataacgataaagaaaaagaaaacgacgatctttgcgtcacacctacatcagaaaggtacaaaatcccgaagatcgtatcgtgcccgccggcaccgagaaaaccggcgagacgagtcccgtcatgcaagagaaaattgacggagctacaattcttcgatgtgaagaatcgtgaagatgtggatgagtttctcagatcgatctcaacgaataatagtaatggttcgccttcttctacggcggcggcggccaaaagatgctgtccatgtaaatgaatcttaattttttttaacgctttttctttcatctaagtattcacacggattttttttcttttttaattttaaatttttggggtaatttgatatatatattatgtttttctcttttttttggggttataatacactgaatttcgttcattcacccaccattaccaaaaaaaaaaaagtatacatacatgtcttatgtgtgttgcttctctctctctcttcttttctcctcagactcagaatatgtaaaagtgaatgtatatatattctagtcagtcagaaaatcaaatatattggagatcgatcttctttcttacatatatatatatgtatatgtgtatgcagtaaaacataattcagataaatttggatcgatctgatcaaattatgtatgtatgaataaataaggtgtaattcagctgtttctttgatttgttttcttcttaaatgtacatatatgtattgaaatcaatggtatagatgattaaacatgaatatgtattatatatacacacatttgtattttgatctatctgggtttcataattcatgtatattatatatctatagaacagtagaagctagtcttttttttttgtacatgtaccaaagccaagagagagagtatattaattatagttgttaaattttgaattatatggattgataataataattaggatttttattttaggggcggtactataggtgttgttgggttggtagatggggtttggtaatttcttgtttgatcaataataataataataattatgataattagtttgaattgggaaattaaagattggttttttcacaactcaatgatcgtgaggtgaggtagtttagaattagattaattggtgatcagggtagggtgtggtggttaattattttatttattttatatatataaaaagaattgtaattatattactttttttttttatggttgttggttaaattagatcgatggttgatctgtctagtatttttgacatttctcacgtttgagtgatcgacacggcttggccatggataatcttgaatctctgtttagaaagagaaagggagagagagagggttaatttgtactctttgatgatcccaaaattgatgcaatgtggtatgtcataaaaaccacctcaattcaatgtgatagcgttttgtctattttgacattagatctatataaatatacaattaatcaaaaaaataaaatattagaagagttgtctattttgacaactttattttgtctgtttcttaccctttttttttcttaaattaataaacctacgttaacgataaaaaaaaaaaaaattgtggtactaattaagctttatataatatggccatctgttgtgttgagaaatgatcagatcagctggcaaaggttttaattaaatgtacatttatttggaactctttttatcttgcatttataaaattgcatgctgggccgtctctaggccgtccctagcttatatgggatttgaggtgaaattcaaaaaaataaacattttatttgagagaaataaaataaaaaaaataaataaataaacagttttttagcaaaattattttaggaatcgatcatggattaatcttgtttttaaactaaaaaaaaaaaagaaaaaaatttacacaatatacttaaa

SEQ ID NO: 307885 - DNA, 1475 bp, Cannabis indica
ttggtgagtacatggggactcacctcccagaagttcaaaaaaccgttacagttgtggtttaggccccatctagctagcatgtgagcaacttgattggaggtcctaggaacccagacagtaaaggcactaaccattcggattacatcacaggctttagcaaacagaaaagatagattccagtggggggagtgacctttagcaatggcagccataagagcttgacaatccgattgcaggttggcatcaactatccccatttgctgcatcacctgcgctccccaaagaacagccagaagttccccatggacgacagaggaatacgaaacttttgtcgcagaaagcgccataagatttccatcggagttccgcaccaccaccccaactgcacccacttcagacttgcaagcaaaatccacactaacttttattttaccttatctttgttacccccttatttttttagggtaaattcttgttatacaattcaacattagttcgctcgatttttttctttcccattaattaagtaacaagaatcttcattgtttaaaattgactattttaaactcttgctttattttttttttatattgggagagaagattcaaacttgaaattttctcttgtaaaaccacaaacctataattataatataaataagtataataagataaaaaaaaaattggatataaaattcaataatattaaattaaatttatatataatatttatatttaaataaatagtctccatctaaatccaaatcactagtcaaataactatttgtaagtcatccaactaactattaggtattctttaattttttgtttgaactataaaatttcaggtttgaatttatcgttcctgactttttcgtggccaaagaatcaataatttctagtgttggtgttggtgatgttgaacttgatgaggtaatatatattttcactttaatgttaaacctcaaatactcaaatgatgaaacatacatatgtaatattttttaatagtgtaatatatgtatcttcagtgacggattcagaatttttgatttgtggggcttaattattttataagagatttttactactattttgttgtataattatttaactaaatagaagatatttaattttttttaacactaacttttttttactagggctatagcccgtactctatcattagtgtgtccgtctctgtgtacccttaatcacgtacttactataaaagtttttcgaattcaacttttgtcatatgagtgtgtcactaaaacagtgatatgaactaattgtgataaagagaccaatatcgagaaacacttcacacaaataaatgattaattaatctcataacaatgagactcttattgaaaatataaagaaacataaaaacaacaaataaaagaaaaaatacagcagatctattgtaacaccctaactagtataagtgtgttaacgtaattttaaacgtac

SEQ ID NO: 307886 - DNA, 2467 bp, Cannabis indica
aacacttctctaatgcccgaaaagaacctaggatttttctactaaactatgttgtgaagacaccctaaaataaattacataacttggctctaattataaaccatattgtaaagctcgtcatacgctttaaaaaggtacatagaacatctaaaacggacacccaagtgaaaagttatggccaaatatgaaaattagcctttcccgatactgtcaaactggaattctggttggtatcgccctgaaccaaccaaaattcttgttgtctgggcagaattcacacaaaaattctcaatcttaaagtccccaaatcctactcaaatcatccccaatcacaaccaaactttctagaacacagtcatataacaaactaaacatcttccacagctcaaacacaacagttacaccaagaattacaaagtgccattgttgagaaagctttgagttcttgaactcaaacttgctcaaccacccaactagccctcaaattcaactcaagcaagctccaaacaacttaaaacatcaaaattcagttgcaaaaaataacccagaaactctaggttttgaacagaacccattcccaattaaaacatacatgagcctaaaataaagctttaaaaccaaaggagaagagtaaaagaatttaccttagattaattcctccaattaaagctagaaaacacacaaaaaattgatgaagaagcaatgtttccttctgttctttcttggccgaaatgagggttcaaagaaagagaggaacctttgtttttttttttttttggattttcaattaacttagaaaatgaaaaataataaaaataataaatgattttgattaattaaaacttaatataattcagcctaaaaccacctagaaagccctaggatataactaaaagacaaaatctcaacatatggcaaaattataatttttacttcaagcataagaaatctaatggcttaggggtaaagttgtccaataccataaccccgcctaataccgatattttaaatgtctaactaaatcatcctgctatttctataatactaaaccatatctaagtgactatataggtcatccatcgcattttctatcatccccaaacaaaattcataaaaattacatatttcatatttagcataaataatactcttagagtttaataaaatctttaaaatcagaaaattataactctaacatttattttctaaaaatgggacccataacataaatattcgaataaaactatataataaagacaataaatactaattaccctactaattcatattgtaatcatgcggtcattacaattatctctccattaaaataatttcgtcctcaaaatctaccctaaataactcttgatattgagccctcataccagactctaactcctaggtggcttcctccaccttattgttcttctagggtaccttttattgtctcctttgagaaacaagtaccttgaccataaccttctctatagtcttactagcttgcttaattgacctctgatctagatatttcctattctgagcttcaaaacaagaatgacactttatactttttagcatcttatagagaaccatccatatcacactttgataattgtttgtagtacaaaaacttaatcaaaaaagatatttgttccataagttcttgtatcacataagcttgtaatatgagtgttgaactagtggaataagatttaacaaagtttaatattatacttggaatgtattttctatccaagtattcagccagcattgactccaagcgaaaaatggtaacattccaactggagggtgaaaattcatttgtttatgttggatcggttcgaggttcttggatcccaaccattccagttttaaaagctaaagatttattaaacagtggatgtgtaggattcttagtggttgtaattgactccagcagacctgaaataattgggcctgaggatgtcagggtagtaagacaattccttaagtttttctcgaggagttattgggattaccatcgcagcgagaaatagatttatcattgacttggcacctcgggcagagcctattttaaaggcaccatataggatggctccagttgaacttaaggagctaaagatacaagttcaggggatgctggatctagggtttactcgacctaatgtatcgccctggggagctcctgtcctatttgtaaagaagaaagatggatctctctggatgtgtattgactaccgggaattgaataagctgacaatcaaaaataagtatccattgccgagaatagatgacttgtttgatcagctttagggtaagacagtgttctttaagatcgacatgcgtttaggttatcatcaactgagaattcgcaaggaacacatgtaacgtccccgctttaagcctccattgggcccttacacccacggactaatggcttttatacacgagtacgccactctggctgctt

SEQ ID NO: 307887 - DNA, 3149 bp, Cannabis indica
tccaaaatagtatttaccttttttttttttaattataatattaccattatttaaataataaaagaataaaaaataataattattctctcaataaaatattaaatgaccattaatataattaattattttttttctctatattttacattttgtgcattggagcacaattataaatacagtacaaactcattttttaatctttcattggaaatggtcagcatctccaataaagtgtcaaaaagatagtgtattggtatatgttagcacaagcattgctattaggcactagtagtgtctagcaccttctagcgtgttgtcttgtaattggctagcgatactctctaaaaattatcacattaaactatatgagacccgatatttagttggaccaataccgatattgacacgtagaagggtgctaggcaccactgatgctctttagcatttctcttttagcacacttgagaaaaactacatcatcaatataatcaattttttctatattttacatcttgtgtattggaatacaattataaatagtgaattaaatatatcacaaacttatttttttgtaccaaatttagcacaaattttaaatcttctattgaggataatggtccaagtaagatgtaaaaaattatgctatatttgatataagaaaataactttctaatgtatttacaataatttttagcattatgctctaatgtacaattacaaaatttgatgtaaattttaatatttttattaaaaataactttattattaatattaaaaaataactttctaatatatttccattttgagggtgaaaagttgtactaaatttcagcttcgcacccatggccttctaaagacttttctaaaacttagaagtaaacttctgatccctattcgagacgatggattttggacccccatggagacatactatctccttcacataaagctccacatattagtccactgtatatgttgttttcactggtagaaaatgtgctgacttggtaaatcaatttactactacccagatcgaatcgtacaaacacgcggtcctaggtaaaccaaccataaattccatagtgacatctttccacttccactcgagaagtgtcaaaggttgcaataaatctgtaggtctttgatgttcagtcttaatttgctgacaagtcaagtacttggacacataatccagtacatcccttttcaaaccacaccaccagtagtatggtttgaaatcctggtacatctttgtggtacctggatacaacgagtatggagtagtgtgagcttcatttagaatctctttcctaagctcaccactgctcaaaaaaaccagagccttataaataaacataccactatctgtttgagtctttagcccgaccagctaaaacttccttttgagacttaaccaacttaaggtgttctgtttgagcccttgcaaccagctaaaaacctgcccgagatctttctaactcaaggcatctgcaaccacgttggcttttccgggatgataaagaatctcatagtcgtagtccttaactaactctaactatagtctttgtctcatgttcaaatctttctgagtaaagaaatatttgaaactcttctggtcagtataaatctaacatctctctccattgagataatgctgccaaatttttaaaacaaaaaccactgcggcaagttttaggtcatgatttgggtagcactgttcataatccttcaactaacgagaagcataaacaatgaccctgtcaggttgcatccaaacgcaccctaaaccctgtctggaggcatcatagtaaactacgaacttttcctaatatgatggcaaagtcaacactggagctgaaatcaaccgctgctttagctcttggaaactagcttcacacttgttggtccacacaaaccgttgatttttcttagttaactctgttaaaggtgtggaaatcttagaaatccttccacaaaatgacgataatactccgctaaacccaaaaaacttttgacttttgtaattgtcttcagtcttggccaatccctaatttattcaattttcctcgcatctaccatgattccatctttactgacaatatgccttaaaaacgatacttgtgatgacaagaactcacatttcttgaatttagcataaagcttgtgttcccgtagttgttgtagaactatctgtggttgttgctcatgctccatttcgactgggagtacacaaggatgtcactgataaatactataacacaaatatcgaggaaatccttgaaacccggttcatgagatccatgaaagctatcagagcattggtcagtctgaaagacagtaaccaaaaattcataatgctcgtacctagtatgaaatgcagccttcgaaatttgtaaatagaagtgaagctaagagagtaattgctacacaaaaaatctcaaagagttaactgcataaaattaattttacttatgcttacaaatttgaagcaccagtaaaaatctcactaataaatatcaactagattattactttggacatctgtgtatatatgacatatttttattagctttgaagttttagtgtaacgtgtatattaataatcaaagttaacatttaatggtgaaacaaaattatataagaaaaaaagtgaagttaaaggagtactattaccacaaaaaaaaaaaaaaaatcaaaaaattaagtgtataaaacttaaaaggtttgtcatcatttaccctaaattaaatatatatatatatatatatagttatacatgtattacacaaattttcaacctcatactatatcttaatcgacatgaagaatatatgctaataataagttgagtgtagtgtagagacacttgcatttatatagagattagaagaatatttaacaagatttgaactaagaactagttttgacgttttgcttcttcacatgaactagttgacttgcaaataataattcattggtggagaataattaacaattgagatatatacatgacatgaacctccaacaaagcacaaacctatataaataatcataaaaggaaaaaataaacctatatacagtagaacctctatccaagaatacagggaccaactaaattatattctaattgggaggttataactaaatag

SEQ ID NO: 307888 - DNA, 1479 bp, Cannabis indica
cgtatattgggcgattttaggagcaacagaatcaaataaatgagatgaagatggagatatttacgtggttcgagtattgatgaacgttattccacgagtcaattgcattaggctaaatagccttgaaatattaatcaatgttcttgacaagcttaagaatcctagctttttgctatagtatttgagtcttgaatttctccccctttacatgaaggtataatttggcatttataggtcaggatccgggtatggatatacccgagacccactacaatttacgtgtaaacgtgactcactaatggggtaaatacattgactttggggtcatagactgaggcccaatccgtggggttgttatcttctgtgcgaaggggggccactggatgtcgacaggtgacatgtgtgtgttgcatctgcgtactatagctgtcagagtagtggtcgtgtatgctccatttggttgtgtgcgcactctttatggactcacgcaagggataaagccctcacattgtggaattcaatgtcagaggatcgccacatcagctttggctttcgggacgtctcttggaatgcccctctgtaagtatccctatggctcatccggagggtctctgttaattcttcttttctgcgagtgatgctttcacgggactaaggaggtccaaattggaatgtaggcggtctgtattccaaatggacttgcagcccgtcccttcgcgtggatccagcttgttactccaattaggcctgtgattgggcttcaattgattatctctgatttggatatgacatgtgtcctccttccagaaacacagataccaggaaaataattgcattaagtattcaaaatttcaactttgtacgcgacataaatgttaagtttatttttgtgtgctttaaattctattttaagggtatttttagtagtttttatttgttaggctaattaggatttccgccccatgaactttgacatgaaccaaatcatgccccctgaacttttaaggtcgttaaaaatgcctcataaactattgagattgttagatttaaggacttttgtctaattttatttaattttactatttcagcgattgtttatgtactaaactatgctccacagacttcgatatctaccaaatcatgcccctcgaactttgacatgtactaaattatgcctcataaactttcatccatattagacttttttactaaaattgaaaaaaagtccttaaatccaacaatctcaatagttgaggggcatttttgatgacattaaaagttcaatggacatgatttggtacatgtcaaagttcagggggcaaaaattctaattagcctatttgttattgttcaagtttacacttattttcttcttgttttaagttttaatggttgagtacgtcatatggttgaaatgaaaaaaaacatgctaaataagataaattttatggatttagcatgaattttggagttgtaaga

SEQ ID NO: 307889 - DNA, 1477 bp, Cannabis indica
ggcacaaaacccaacaaagcctacttgtcaactcttctctcgaccaggacactatgcatctaaatgttaccaaagatttaatccatgctttcctggttttggagctggtcctagtaacaatactcataatcttccaacagctatggttgccactgctgacacggtctatgaagatgcctgatatcctaactcaggagccactcatcactgcacttcaaatgagagtagtctttcttagaaaaatgactttaattgtcaagattatttaaatctacataggcaatgatactaggttaaacattgaaaacattggtaagaaacacttcctttctactgacaaatccaagattttaactcttatcaatctttttccatgtccctaagataatcaagaacctaatcagtatctcacaatttgcttttgataataacatattttttgagtttcaccctaacttttgtcttgccaaggattgggagacacacaaagtgctgctggacgctactcttgaagctaacttgtatctatttccttctttccagcctaccttcaattctcaacagacttttgcttcaacatcaaaatctttttcaaaaatttattgtaataatgttcaatctattagaacaaacactacaaataactctttgtttcatttgtggccctctcgtcttggccatcatgctgttaaaattgttcaacatgtaatgcacaagtgtaatgtctcaaataacaataaaaatgtttttgatttcttttcctagatctgacactgaatacactaagcctcttcaattgattccctctgacctatggggtcctttcccaatggtctcctctaatggttatcactattatgttcattttacagatgccttctccaggtttacctgggtttattatctcaaaaataaatcagatgccatttaaacatttattaactttaaaattcttgttgagaaagatttcaatttacccatcaagatgctacaatctaactggggaggtgaatctcaagcattcttcccatatcttactgaacatggcatatatcacaggctttattgccccaccacacatgaacaaaatacagacatctcattgagactacccttactctacttgcccatgcttctcttcctttatccttttgggatgaagctatcaaagcttttgctctttcaattaacagacttccctcttctgtgctcaaaggagacactcctcttcataaattatttaacactgaacctaattactctccattcctatcctaacactcgaccatataacagacaaaaactggcttttcaatttgaggaatgcacattccttggctatagtttaaagtacaatgaatacaagtgtctatctgcctctggtagaatttttatttcttgagatgtcatctttaatgagtaccaattcccttatgccaaaactgttgggttttgtgccctaaataaaacccattac

SEQ ID NO: 307890 - DNA, 2777 bp, Cannabis indica
acactcccatctcttcaaccaaacccaacccgatgtcaaagtccatctttaagagtacattggatttccttcacacatctccaaataaaattagaattcgaaccccaactcataatgcaagaaatcacaagaaaatggcaagctctaaaaactttcgtaaccaaagatgagccaaccttattctcaagcacaacaaattaaaatcatgaaaagactaaaaccctagtgtttatgagctcattccgtcccaattttaaaatcaactgcacaagatctgtacacatccccacagaaagtaaaaagacactcatcgcgtatgatggtaaagattgaaccacgctcttctagaatttatcaagtcccttcaccaggtttgcggacaggtgggatttgattttccagttaaccttgggacttagacattagcttttccagcaggttgcttatttgtcaatgccaggagttacctttcaatggtgccggaacaaggtaccctctgatttgttgggtgtctcattcaccattgcatgaactactttgttttgattttacttggtcaactttgcttagtgttatcttaaataattgttgaatttatgttcacatattattaatctcaaatataatgttcattacttgtatgttatatttgattttatatctatcgatgatctttctaaaagctgtccaaaatgaatgaaactattcggttacattagtaatgtcataaaagaacagcaataattaaaataaaatatataataactaaaggtcatcaattactaatccaacacttatcttcaatccaatttcaaaacatcaccattaatcaaatacgatttcttagtccttatttatttgaaagaatttctttacccaatctaaaaacataacactaaatcgtaacataattaagtcattgaagagtaaacactcgtaatttcagcaataatcgtctaacacaattcaaaactcagtggtttacaaacaatttaaacacacaaaacgcaacaacttctatgaatagattgagaagcaaaaccaatgcatattggagactccattgagaaattacgacattattcttagtcgatttagcacattatcaagtacgataactcaagttagacagattttggaaacaatacacctagcatcagcttaattggaattagaataccaaaatatttataaagctaacaaaaattaagttatatcttaattagaatagtagaaaagaaacccatgaagcaatggaaagataatatatcaaggattcattcatctatgagaaatagtggaaaattaaaatatgatccaagaaaggcaattacctaacaagaatcattaaatgatgcaatataatctgtcaattcctgttagacaaaagaaaaacgactacataacaatgagaaggcaaaataccacttataagaacttaaaaagaataatcacatgaaatacatggaaatgaaaatatttaaatggtaaacttcgaaccattgcccattgagtaatgaaaagcaaactactcgttcataaacaatccacactaattaagtaacacaaagctcaagcacagaatcaagcaaaacaaaaaggcaatagggaacaaagtgttaacaatttcaactaggtatcagttggtaatcggcacacagacaattaaatacacaataacatagatatatttcattcaggcagcacaaaattgagagcaaattctttaaaccctcaagagcataagaaaccatgatttaaaattgaaataaaatctttccatttgtctcaatagtatctcaaacaaaacgtcgaaacctaataataattaaaaacaacagtaacccaaaacagagaagatagatctaaaaattataagattcttaaaccaaaaacggataacaaaaaaaactattactccccatttaatcgacgttctgcatgatatcctcggcggtgaacttggtacccttgtccttgtccgcggcggcacgacccttagccttgcgatcgagaagtgacttcctgtccttatcaagtctaagcttggtgataacaaccttagatgggttgataccaacgttcacggtggagccattgaccttctcccttgtgatgcgctcgatgtggatgacccatttccggcgatacacctgaacgacctttccctcgcgacccttgtaggtaccacggacgacctgaacctcgtcgtctttgcggacgggcatagacctaacattgtacttggaacggagatcggatgagagcggtgcgctcataagcacacgcctcacgctggagggtgctgtgaaatgagccttcctgttcttgcggcgggagctggtgaccctcgggttgtacttcatctttgctcctagggtttttctctctctggggttcgggtgacggcaaatgacagaggaagctgatggttaagggtttctagggcttttataaacatgcgtttttcacttaaacgctgtcgtttcaaaccgtgttgctgtgtggtacgcgagtgaactagggtttcttctcttttcttatttcttagttttctcttaaatgaatcaatcatacacgggcttcataaaatgaggcccaagtctctagtattgtgggccaagtatttgtaaccatccattaatgggccgtatttcaaactgggtttcggtcgaggtgaagcataagctgggctttaggggtaagttgaaaaataccacttttattaattaattaattaaatttactcctaattttatatttaattgaaacatacc

SEQ ID NO: 307891 - DNA, 2041 bp, Cannabis indica
cataattatctaattaggattttactaatccatttttcaattctagggtattacacgaacagctcttgagacatgtgtaacaagagctttaaactatctttccaatgcacttgtaattatctcgttaatcgaagttgtattgagtgagatatgaacaatttactgcatatagtttggtagcctacgacaaggttgacattcctgcaattgagaagttgtctgatgtcaacctagacgctagctacttgggaaatcatgtcgaaatcatatttttcaaagtctatgtgatattatcacatcacatacctaatttcttgatatcgatgaagttgttcactagttctcggagattatgctcatttgtgtattgggtgtcgatttgtgactagtttgccgatattcaatcttgtcgtaatgtgaaatacaaagtatgaatttgacttaccacaagttttacatcttattcgtgatggaaaactagctcgatgcctaagacaaaactaaaattggacaagcagaaccatgtgcaccaggttgagtgtcaacctaggggctaggagctgttctcaggccctttgggtgccattttgatacttcaatcatattttcgtctaaaaacaagggctcctccttagtttgcaacaaaaatacgaagaatgcctaaaaaatggcatttgagtaatgaaaacacatgcacaaggttgaatgtcaacttgagcactaactactgtttttggccactagatcgtcttgtttgctatttcaaagcacttgtatcttcgttcttgataaaaaacagacaaattcccagaatatttctttggaaaactcatcggaagcaccctaacatgtcaacctgggtagctgaagttggggcttgtcaacttgggcccatgggtccaggttgaaagtgttttgatctcatatttttgatggttttacttctttctagtggaaagtagtcatgtaaattcagtttcgtcaaattcttgtgagcgttactcaggaaaattgagcttgtgacttggtgcccgagtgacacaccatgtcaacctcggcgttgttctcatgatttgcacctcctgggcacggtttgtaaaacctcaagtcatagcttcattccttgtttgatttgaggaataaaggtccaaagaatttccccaaaatataaacccaacagttgtgatatgtccaagttaactaaaaatgtcaacttgggcaccaggtgcttgagcactccagattggaaacattccaatgttggtttctaggcttgtagctttcctgtggtatgtcactcatgtgttttagtgcaatgaatgagaaattttcatggagataatgacttcggggactgaaacttatgcattctaggaaacaaaattgttaacttcgacgctaggtaaggcctttggcaccatgtagacttccaagatgttgagttgacatcctcatctttgaggtcaatgacttagattattcttttcttgttagcttacactattgaaagacgatacattgaaacgattcgtgggatccaaatacctacccagatgtccctttatatcaatctggggactaggctagggctcagctctctagtcgaatgccctatcttgaacttggggattttttttcttcttaccacatacaaaaaatgatgtccacatcataagggtaatttctgggtaaacattttcccccaagtcagtttcgcgctcgtgcaatgttgactgcatggcgcaaactctacccgttttatgcgaaactatcaattgctcatcatttttagacattcagcaattatcttagcctggttttcctagctcaatgtgccttcaattacttatagatgttgtcatccttctctcctaggttgcacccatggaggtctttagcatcccctccagctgtcttcacaatggaggaggtcttattcatctccctggccttgctcacatcggaggaggtcttcttcctctcttcgactgtgttcgcagtggatgtaacaccctaactaacataggcgtattacgtgatt

SEQ ID NO: 307892 - DNA, 1053 bp, Cannabis indica
aaaatttatattgcattgaataatttacgtttacaatatgcaattccaatttaatataaaagtacaaacttatttttattctatgaatatatataccattatacatttgattacataggcattctaagtagagcaaaatgttagagagagaaatactattcatcttctagctatacaaattttctcataagctaaaagttgttcaaatttttttgtcttttttgaatcaagatccactcaatttgtgaaagaaacacctgcaaggaataaaaataaattatattatcattatttttaaaaaagcaaacattaataatatagcacaaattcatcaaatatatataacattatacctacttaagttattgtactgatcaaattcttgacaaattattttgcatgccgaacaccctcaacacctatttttgcaacatgattgcatatgaaaaatcaaaattattagaagaaggtgaaactttgattaaaattgaaattaaaacaaaaaaagaaaaatatgtagataccttatgtgaaccaaaatgtaaattttacaaattgtttatgctcatcctatctcaaacataatgcaatcatttgattatttaaaaagtaatatttaataatttcttgctatcaatggtagatttctagagaggaagctattgtaatttttttatggagttcttttatagaagatatgggtagttaaaattgaaagaagttattgtccactaccactatgattgatacgattaataattattttttttattaaaaacaagaaaaaatcatttaatttataattatatgtggcaacatttatattgagagtgttaccttttattatttattatgagtattgacaacgtttatcaaaaagtgttgctattagttattattctccatttttaaaaattaattattcaaaaatatgagtttattagcaacactttttctattagtgtgtgtaattctaaaaatatataagttaacaacactttttattcaagtgttattgattaagtgttgctaaatatattttttgtagtagtg

SEQ ID NO: 307893 - DNA, 1532 bp, Cannabis indica
gggtcccgagtccgggtccgggtacggtctgggttcagtcgagtcaggtcgggtccggatccgggtttgggtccaagtccggtctgggttcgggtcgggtccgggtccgatcctggtcccgggtctgggtccggcttggagattggtgtcccaaatcctttgtaaatattataatacaagctaatacttattatgtattaaataatacaacatacattatattaaaaaatttagtcataataattaatacaatacattgctttatccaaacatagtattatttattatttaatacaatacgacccttatacggcgtaccaaacgaaccctaatatatgtattttagcatgtattattttttctttgtgtgtgtgtttttttatttttgttagtgtgtgtaatatagagtttggatatagcggtggttggtcgaaaaatctacgtgattgttggaaaatcggatggcgctcggaaatttggtggtgttaaacggtggtaattaaaaaatagtgttgttcaaggattttgattttagggttttctgggtttgggactcggagacggtggtgttaaacggtggcttcgatttatggtataaatatcaattttttattttaaaaacctatatatatatgtcttcagttatcatgaaataaccaaatatatagatcccacgtatgtcttcggtgttttcgagacctacatctcgccttaatactattttgtaccaagatttttttaactgaagatagactagtgaaaaaaccaaatataaaactcctttttgtgtagtaaacctcctattattacaatctcctaatcaattcctgtgcctaaaattacatgttgaaatataatattattcgttatagtatgaatatcatccctataatcttttaaaaataaataatttacagtaccgaaaatagattctaatattccagtttaccacgtgcgtgttcaaaaaatttcaaacttattttcgacactctaacctatttgaaatgtttcaaaaatttatgaaaatgatgttgtaactagaacgaacattgtcatgaaaaaaattatatatttcgtcatgtatttttaaatacgcaaaaattgactaagaggttgttatagaaggttgagataacactcccctagttaaaatatattttggtaaaaaataaatttaaagaccaagtttaatatattttccaaacactttacaagatgcaaaacttatttttaaatttttatgaaagtacaaaatccaaacaaatagtggtacaatacacatctactataaagtcttatcttaatgatttagacgtcaattaatgattggatgaatgtaataaaaccaataattacacactcacaaaatatatcattaattatattaattaatgattagtaattaatacattggattagggtgatgttttgagtgatgatagctggcttttctatacaattaattaagggaaatttacacagtttactgtgttttcccattttctttcttttatactgttacactccaaaaa

SEQ ID NO: 307894 - DNA, 1890 bp, Cannabis indica
agtcatgatctcctcttgatgatcacaaataggataaattccatcattcaaaagaccatgactaattaaattatattttgtaggaatccaattattagagatttgccaagtgaacacttttacattaggagggatgttgagactctagattttcttccaccatcctaagaaaccctctaggcaaagctctacccaagcttgaattctcgatagcaagccagtagccactcttaacagaatagtaactcgaacctcaacatgtctcgagatggcaagacgatcaaggaaaagacaaaatgtcgcttcatcaggagaaaataacccacaaattaattatgtatcccaactacccaattcaaatctcagctgagccaccttactacccacaccaagtaaattaggtgacaacgaaggcatatattatataaatgtcacaaccatccccaatcctccaaatagcactactagggtcaaacaattctttacccatatgatatacttccaaacaaaacttcgttaataattaaaattacccaaaattgtaagagttcaaaatctaattagagaagtcacgtcaataaataatactattggccaccttaatatatttttctagagaataatctacaacattaattagagaaacacttcataagtattgctttgtgagcacaaatcctaagagtgagtccatagaaacaaaattaaacttgacaaagtgaactttgtaaaaccaaaatatttaattattttttaataaattgatattatcattagtaaattagctaacttaatcaaggcattttcttcaatcgaggtatatgaattttcataataaattaaatgttgcaactacttcgtttgtgaactattaacaagtaactagcctatataattcactttgtatgttgaattaaaaaaaaaacacttgtatatgtgaccgacttagttccattaaccaagtcaacgtggcagaatgaaatgccacgtgttaggttttaagtggtggaagacatttttgtttttatgtattatttatattaagcatggattacctcaaaacaagctttacgattagtcatgttatcatagaaattagaaaaaagcaaattgaatccaataaataagtgacctttgtgtgcaaactacattagtggttataggaagatataaataatttttttcagaaaccaatgagtctaaataaaaataagccactggttttatttctttaattgcattgatttttggtcctattataaattatgaactgatgaaactcataatttaacatcaagtaattaaactcataattgccatgaattaaagtcaggaacattaatttatttggttttaatagctagtaaaacattgttactacaataaaaatgtacaactcagaatcagaatccatcagtttaagccaatctctatttatgaacccactttaaattaattacatatagaacaaaattgtaatttttttctttcaataactttagcctaacacactaacacttacatggttttaatgtgagcaaagttcgtaattcattttggttagaaaataggaaaataaccacatacactaatttactgcataaatacttaagtttaacttctataaatacttaagtttaacttctatttgtaaataaattccaaagtttaattttagaacttatataggtacttggttaagtaaatagccacgtggcaattcctgatttgtccaagtcattaaatttttattatttaaaaagaatagttcaaatataccaataaaaaaataacacgtagatttaatgacttaatatttaacgggtaggtacctaccgttacagaaatatatatatgagtaatttgcggcaaaactccctcaactatcaa

SEQ ID NO: 307895 - DNA, 993 bp, Cannabis indica
cttaatacgaacagatacaaaaaatgtaaacagttttgtcatagcacttttagatcggattataattaaactttattttgacaaaaaatcaattaagggtcctatttgtactattttagaaaatacagggtccattttgtcatttaacaaaacacatggtccaattagtaacttttgtaaaacagagggtccaaaatggtatttacccttaaattaatttaattaattctattcctcttcttcttatttttatattttcattcattccatcgaactaaagatattaggagaaagaattgtatcgatggtactatgcattataaatagcacacacctcaccatgtaatgggacttttgacctcttagaattctcgacctaattagacttactcaagaacgacactactaggagaacataactttggtaacaattcttgagcattgatcgattaataaaaattgagcgattaactttgtgcacgtgttatttttctttagttaatttttatatgtttttttttaaaaaaatcttaaaatcttatgttcaatcgcttctaagatcttcttaaaaatattgacaaaaaaataaccttcacactttaatttacaccatataaaaattagcttataatttctcctagtgcaaaaatttgagacatgatattaaagatcaaaatattataattactataaatttttctatataacagtctcaaaatttattaaattactatctacacaattacttttcatctagactctcaaattataataaattaaaacaaaaagtgatttagtcagaagtagctaccgcacagtcaatctgacgaagaagcacataagcaagataatttctctttttataaaccttgaatgcaagtatgatggtattgagctatgcagttcttttacgcggattatgtcgggttttgtgccttaaagaaaacctattttaatataatcagatttactaattaatataagatcagaaat

SEQ ID NO: 307896 - DNA, 1253 bp, Cannabis indica
agctaactaacataaagtaaaaaagaacacaaataacacaaaattataagtggtatcaacaatcttctcaaattgctactaatctagtcatgcctaaagaatgaaatttattagaagaatttaaaatttattacaaaatcgaattaactcatgtgcataaagactacctttctaaattttttgcaactattgtaatccaaactcctaattaaatttttgaagtgttaagattttaaactcaattcaaatcgtaacacttgcactctccctcctgaaaagtgtctcacttgcactattcctcctgaaaaagtatctacgagaagctcttctcccgaagcttgatgaacgatgtctaagtatgttcaacctgcataatttccataaagaaacaaatacaaaaataatatagtactaaaatattaaaaacttgttggactcaagttcctcgtataacaaaaacactctttgaaaataatttagagcaaaatacatcaagagggctaataaaaaccagagacctaaggatacctttaaaccatttaaaaactctttagattgtggaaaaagaatcaagaaacaatctgctaataaatggaaaaaaaatcaaaaataaaaattagaatttatgcaaacacattgtgaatccgtccaaacagattgactggacaaatattcttaacaaagtttctttatataaatatggaacaaaaaaaaattaaagataatttcttgaaaaaaaaaatcaaatagaataaaataaaataaatattaatactttcctttataatgaaaagtcaaaataagataattaaaataaagaaattacatatttatttaactaaatataattttaaaatatttttcactacaaagataaaaatattaattttaaaaatcacataaacaatttcaaaagtaattttataattattttattaaatatgtgaataaatttttttattgatttatttatagataatttacatgtatgcacaatttttgatatttaatatcattattaacatggtttttttaaatattaatattattgtatttttcttaccgttttctatttttattattgattgtgtattgaacacaatgttttaatgtcatattgacttctcacgtcatgatatgggagagagtgagcacctaatgaaaagttttataattttaaatattgattttctttttaaaagtttattcggacccaaaataaaaagggtgaatttaatagtttataatttgta

SEQ ID NO: 307897 - DNA, 890 bp, Cannabis indica
gatgccttctagactttgttttatgaaagtactacaataaatccattcgagctactaaggctgaagaattgatacagttcactcaagacaacatgatactgacagagaatgccaccaagtttgattgattggcaaagttttcctttaatgaggtggtcactaaggctgctagatacgccaagtttattcagggattggaagaacatattgcccgagatgtgaacatagctgctaaataattagtgtttgttcgaacctatgctcaagtagttgagctggcccttgttgctgagaatgtggaggatcaaattcgaaagagaagcaatatggggagagatttgtgcaaacaattgcccagtgttaacctaatgatcactggaaaagacctaattacccatcagctatgggtcataacaagaggttccaaggtaatcaagatttttgatgtggtggaaatgaaaattggataacctattcagagtgcccaaggtgcaaaagatgtcatcatggcgagtgccaagctagagtgaccatctgaaaagtaaatgttcagctacagtgaccagaacagaagaaagatgacactctagttttttctctaacccaggcctgatgctcgtccttctaccgtgacaagtcatatttctatcgatgttacctttgttgattgttttaattaattttggtgcaatgcattcctatgtgttgagtatagtgattggaaatttgcataaacctagacatattttacctagaggttttgctacctcactacgtactagagagttagttatccccaaataagttggttaggttccttctagtgtttgtggagggaagggaattgtcggttgattcaattatctaatgactatgggatggtccacccc

SEQ ID NO: 307898 - DNA, 1950 bp, Cannabis indica
gctccgccctatctattcatctcttttttttcaaatggatatttagggatctcttgttcatagatcttgaaaccagatcaatatccatttctcaatatatctatctatcgatagaaagatatagatctctatctggatctatctccatatctaagctaaggaagaaccaacacttaaagggcgtaaccaacggaaggttctcaccctgtccccgacattgttctccgacgatgccccctgggcgaaaggggccatcattctctttctttcttcaatcgttccgatcaggataagtgggttggtttgtttcgtccttctatctacgcaattctctgtcttcgttcgtgatcatgttgggcgaaaggtagttgtagaggagcggctgtgaaacggcgattcccccctttccattgaagtagggagggcccccttccccaccattccggcctattattgatagggattttaccgatgctgaaggtagcttgcttaccaagccacccacttgagaagctagtcgccagaaagaagcgacgaggaagcgaagctgtcgtagaagctttgctcccccccctgtagtcgtagtactcggctcgtcgctactttgattcaaaaggtaaccgacggttcccgactttctccggtttccgcaaccgtaaccatttgtcactccgattacttcatccataaacctttttttattatttcaatagctctaaaaaaaagtcaaggataagcttgcattccagaagcggtagcttcccgcctccttcattcctactgcctccttcggtggtctctcgagccttttctaaaatgcctgattggtctgcctcagcaaatgtacaaagtggaccgctgtttggctgatcctcttcttcccattcgggttgggttgagccagaagtaaagtaagaaggaatggaacccactggagagtcagtcgtctgcagttcacacttgggcaaagatgactgactttagaagcggaacacgaaccgatttacgctattccgggttcttattgagcgtagcgaaagccaggtttatgataaagtcagcgaagtttctatggtgttctacctttgcgtagtctcggtccacagtggaaggctccgcacctgagcctcgttagactcagcggaagtgtaaggtgtaagtgaagagatgaagtccgttccttagcctagtctatatctacagctgacgcaactccgtaccgacgcctcactactacaacattttaattaattaacggctaagggatttcataacctgagctttccttacttcgtaatcttagcctccctttctttatagagagactaagttacttcttaaccttaacgtactttcttacttaagcataggccttcgccacttgggcgcttcgcccctattttcttttttgaattagaaagaacggggccttacttattctgttcaggggggatgaaagacaaagaaagggatcagggggctttatgatcggagaaaggggaggggggacgacccgccgaattcacatcagaaatcgacaacatgaacacaaacgaaatcttgaattgcgtatagaaacaaaacgaaccacttctattctcggagctgaggtatatgaagaatggctttttggtccctttcgtccagtggttaggacatcgtcttttcatgtcgaagacacgggttcgattcccgtaagggataggtactcattcccggccgctttcagttagtgttcattgctgagtgatcgctcgctatttggctggaaaaggtggtccggaagcttcctctctcccagcaagcaagacgagatcaccacttctctcagtaatggacttccttgaattcttccttagccttagatgtcctttcatagattctcgaacctccgatagacagaatctccatgcatgcgttctttctcccctcagccatacatctcttttt

SEQ ID NO: 307899 - DNA, 1833 bp, Cannabis indica
atgcaacataaaatgatttctgatctttattagttagtaaatctaattatattgaaatgagttttatttagggcacaaaactcaacagactgggaggtgagtagtgaacacacattgtctctagagcctaaggtcgaacaccaccattaccctaataaaatacatggagaagggtacaggcgtttcatctgggaatcgaagaaaagttggaagtgctatcttctggctcctgggtgtatagggtacaacccgaagttgctaaaactctgcccgaagcccgcccaactctgtctcctaagggagctgctgttactgagtttttgtgactgttataagaaacactactgaattaaagcctatgcccacatgtagaatgatggtgcaaacaaatcaaacaatgaggaaagtttagaaactgatcaacactttgctcagctgtttgctgcagctagtgtggagcaagatagacctccaattgaggaaggaaaaattgttgaaggggactttgaagtctaggaagtggaggaccagggtcagtttcgtccagctaatcctcccaaggctgagggagactgagaaaaggaagaagaggaagtctgggtatttccctttggtggtttcaatgaggacgaagaacctgtctatgagaatggtgatgtcttggtggctagtcgagactatgttgaagaatacaccaaggcccaatctatgttgaagaagaatacattaaactagaattcgtcaaatgtatttaaacctaaaaagaccaatccacgtgaaaaggatggatggtccgcgatctaacctccagaaacacaagtttcatctaatagttggggagttcaacaatctgcgcacatctccacaattaatgctccccaaaattgaggcataaatcaatgatgaagatgctattttttaatttttgcgccaaaaaagtgaacaactgttaaaatataaccgtttctagaacacaactcctcaatggtcgtgcccttccaccatcatgtgattgacatgtggatgtactacaattaaagatggaagtcaccttccgcgatcgagtaacacccaaaaagccatgatattatcgctcatcctccacatgcccatattgaagtagtggaacaagcttctgccatacccatcattcagaaagtatgggagtaaatattatttgcatttccggtagtgaacacgtggaatccatgttgacatcaaatgcacattagtaggacctagaaagaaaataaagcgggccaagcccatttggacaggttcttccaggaacgtattccagctccttaactatagagccttccgccattgacaacacatgcccggaagcaagtcctctacgatgaagccataagggtgaaacaacgtgttcctggaagactgatccaattttttattcttacacacaaataaggaaacaatagctgccagatctcaacagaggatcatattatgataaatggggaaacttcctaaaatagacatcaagcaattaattcacagttaattgcccacagtccaagtacacagtgttgaccaaattcgatctgcctagtcagtaaatcttcttcttcgtgggctagacttcatgaagtagcccaagtgtattattcactgtaagctccccaataaacaacaaaaaaaactaaatgtaattctcaaaatattataaatacctgtcgaattctatggattaaaggttaaattatcttgcaaaacttgctcaggaaaacttgagaatatatattcattatactcctaaaagtttttcaagttaaagaattactgaataatactgactcatggactaagact

SEQ ID NO: 307900 - DNA, 2037 bp, Cannabis indica
agagtgtacacataggcagtccatagtgacagttaaccgaatgacaccttaaatttactactagttcagtagtttggagggtgtttctgccaaactttgaacttggagggtttaatgtaagtaaaacgacagctggaaaggttttgtcgtaaaaaactcaaaaaaaattatgtttttaggtgtattatgcaaatttcacctttttttatagcatattttctaattcttttaagttatggacttttagcaatcttaaccattttatgagttagcttatgccatatttttgtataaaaaatttgaaataccatattttatagtttttctcttttttatttaccaaaattatttttaaaagcctttgttattttcttcttcttcctcgataggtcaccccgaactcgcctgcaaccaccattgctacccctctccaactagcctcacaaattttttcaacaatcacgatttgcatgattattatcatcttcatcttcaccattgatctcagacaagcaagcaaccatgatgaaatgaaaacttcaagaaagaaataagaagagaaagaagtaagctagttatagagaagaaggaatgaatggatgaaggtgggagacaaaatagagttacagcaaccaacctaaattgcctccattaacggatcaattcgtgggtacgactcacttcaccatcttcttgtcaccaatctcaaatctcatctattttaggtctctcaccattttccattttatcatttttgtaatttcaattttggattgccaattaatgtggtcgatttattcttttttcatgtgttgacctcattttgtagctgacgacgtggagtcacggcaattgtaagtgtttaaatatgaaagtgacaagaactataaacgacacaaaaagattatagaagttcggcccctgaatcggtaatgacttgctccttttttagttgtatttcttcaagaaacagcaggattacatgaacctggtcaagtgagtttgttactatctctgaatattatagatattttggcagcctaatagctcttttaagaatccagaattacgtccttgaataatgaatatgatccactatttataggaaaaaagatgtagaatatttacatttaattatagaataaagtatttaatatttgaatgattcaatcccacaaaatcctctcatttctcttgattcttgcaatctctcaattataggggtgttgattgacctatttgcaaaatactgaatttggacatttcctatcacgaactcgctggtcggacactttctgtgagatgaatccttagttgctgaaactactggttggtataccccgtttaacatatgcctgatgctagacgactccatttggtttatacaaaagaccaacgccttttggagaatctcatataaggtcccttgcccactcaacctcttctatgtttgccacgtatcacatcgttctatgccacgtcattagggtgatttttagaataacatttgccccacaagtctgtgtagggacttttggttgcatggggactctttagcttctctctttacacggtcaaatgatatgtggccttactcggatggtccgtctagcctgggcgccatacatacctgaagaaaatcttctccttgtcttttcaaatcttttatcatgattacttcccttgaaactgcacattggggatcgtgtttgacgattacacgtttttctaggtggtttttaatgcaaaataaagcttttggatttttgagggggaaaagcaatcatttcaaatttaattccctaaaatccttcccacattttcattttttctatatatacttaagacaaaagatcatttggaacttttgcatttttgaaatttcatagtaaaaaggagagttcttcgagttcttgagctacttctctcaaattgattgttgtgcgaattaattcttcaagaatccccaaaatctaaattaagttctgtaaaagcctaaatttattagtttttaatctactttctagaaaaaatact

SEQ ID NO: 307901 - DNA, 1668 bp, Cannabis indica
tttttttttttgtcaaaaacatgcatgttttttaatgatagtgctccaatggtcctttatttcatttctcaaaaagcattttttttttctctaaaaccaaaccaaaactctctatctatgtctctcacacacacaagtgatggacttttgcggcttaagatggccctctcttcatcacatcgtcaccgtttttttttggaatattaataaaatgaatatttggagtaaagaacttgaattcatcaagacatgctctctccttttctctctctctctcaaaacttcttgattaaaaaattagtttgtttcctctaaatttgttgacccgtgtcattccattcaaaatgttgtctttttcttttagcattgatatagtattatagtgcactttaacgatgtctattactattttgaagaaatccaatcttgagattgggtggacatttggaaaaaaaaaatactgtttattaaaaaattgtgtggtattaaaaaacccattaaaaaatgtatattttaaaaatgaaaatatttttttgactcctcaattgagtgggtactgaggcagaagttaacattaaggggtacaaaaaataaaaaaaaaattaaggggagccaaatacataagtttttttttaaaaaaaaaaaaaaattaatttaaaattgtgttataaattttttttgtccaaaattttgagaggagttggagttaaagtggctccgtccttggttctaggaagagagtctaaactcatgccctgcacgaagtaacaacagactttattaaatataatttaatattagatattatattttttttaataaaaatatcatatattttgatttaataattataaattttttaatatatttatatatagtagtattaagtattaaccattattgatactaataactaatggtaatttattttttcctctataaagaatgtgcataaatattattatatattagctagctagggtacaaatatgtttggattataaatcagtgcgcgcatgtgatcatagtacgtatctaaatattccattcgaaataatttgatgttatacaataagataatttaaattagcgtaagtggagatcataggattaattgtaggaaatgattgatttaaatacccataaaatattaaattaactaatgattaaatattattaatatataatgatcttatgacaaccaagtttttacaaagaaactatatatataattagatttaataaatattgttggttggcctgtctaatcaagggtttttgaaaacattgtaataatagaatgatacatgatctcatatcttttataagctcgtagaaattattaaaaagataatttttttcttcgtttataaacggggtaccaagatatatataattataattatagatagtatcttaattactacgaacccgcccctctctacatgaaagtactaatgataagaatatagctaggttaaactcaaatatcatatagactcatatatcgatctatatatataagtatataaatgcatatagctagctaggccaaacaattttttaacctacttagatgaaatctcaatcaagtggtcctatcatcatcttcataatcaatattgaaacgggagaaaaaaaattgggtgttttttttttattattttt

SEQ ID NO: 307902 - DNA, 1362 bp, Cannabis indica
  modified_base (1314)..(1314): a, c, t, g, unknown or other
ttgaagggttaaccaatatgaagattaaggagacattgttctactttctggctgagtattttcacacgtgtggccggttcaggagatcagaattgggccgaccatttctcaagtgtaacgattgtggggcccggtttattgaggcccaatgtgataagaccattgatgagtggcttcagatggacaataaggcccatatgaataagcttcttgtttctcagcaagttattgggcctgaactctctttctctccactagttttttttcaggtaagttttgttttttaatagaattatatcattttttattgttctattctttttctttttttaatgttgttattgaattattggtttaaatatttcaaataaaaaacactcaatttgtaaataaatttgtaaatatatggaaaagtcgtattccgagtgaggtggcaacacaagattagtcaagctttaaagtttttcttaataaatttagccgcagacataatatttatttaattactaaaattctattgtcatattaatatttggtagctataagtgtaataagattgcttatattataagactaagcattactataaggcacataattaccaagaagtaatgttttgcgattagttatcgatattttaaaaaattattactttaaattatatgaaacctaattcttaattatactaatgaacgataaaattatattagaaaatggtagacattggttggaaggtgtcttgttctcaaaatatatattatgagggaccaaataaccaaattaatattgacccttcaaattgttaaagatggtttcattaatgaaggggatttgttaggcatgttctaatgtcataatttatctaagctctattaattagttaaacatttattatcactaggtttgttgagaaaattttaatcatattaacattaataattcgttaatcgaaatcataacaaattaataaaatataaaataactcgatttattattttattatgttatttaacaacccaataaaaaaatatttatttgtttatttaactagaaaagtaaccaaaaattttaattttaataaattgtcatttctaaaaaagttaattattttggatttttcataggcatatttgtcttttttttttttaaattttaattaatataaaatctatgaaaatttttacacttttcctttttccttaattttatgttggtacaccctactctattctaataaggtatatttcaaagaaaaaataaacacaaaactaacaaaaaaataatacaaaaataatgtgtatgaaatttgaaatnttttaaccaattataagatttattactataaaaatcaagttctttaaa

SEQ ID NO: 307903 - DNA, 4200 bp, Cannabis indica
aagtagttcatctacttcttcatataaataatgacacaaacataatttttctaaattagtagattatgttgtaacatttctttttttgtttttttttttttttttgctaaaagaaattatgttgaacactatgtacaactttatgtgaaaatttaataatagaccataattatggtgatattaatttgattattaaacatgtaattgtagcttttttttaagccctttaggtccatttgttaaatatgagtcaatcatttcattaaaaacgaactggcccttttagagccagcacgagtccaacccaacacgaataatctgtacttatgagccgggctgaacttactttgaaaatatgggtcaagcccgacccctattttataaaataagtcggaccgaactcacataaaaaaaataggcttctataaaaacgagtcaagccagataggaagctcgaatgtacagctttacttgtaacataaattatacatacgtatatctaacaaaaattacaaatgtaattcagctattatcagaaaatacaaagctcaacatcaaatgcaagtgtagcaaataagtaaatatgtcagattttgtattaaattgaactcaaaatgtcctgtggcgctataacatttgtgaataaaatttatttgatgtaaaaaaaatttgctcaatggccatcttctacaatgttatgggcaaggcaatgatcctagactacaactcaagagtatagagaggggaaaaaacaatgtcagagaagaaaatggtagtagatgtatgtttagagagataccctgcctgctgctgcatagagccttggaaaccaaatcacaagaactttcttccatcaaaagcagccgtgtagtcgaattcgacgggacaaaaattggtttgccccatatttttcggtttgcataaggttaccaaaaaaaaaaaaagacccagatctgagatgtacagtaaatctgaaaaatctggatcgtatttacagagttaagagcagccatgaacaggtagattctggaacctgaggaggctgaactgtaaccaaatcatcttggacgattgttaatctcttcattaagcagtcgagtcatcaagccaatactagctgtgttttgattatcgtttagcattttatacagtgagtttagttcttctaggttagccttcttcaaaagtccctcaactatggtatccattccaataggcaagaggtgattaccagggggtactccttgatcacttccttgctcttgcattcttccactagcatctttggatctacaagcttgtggaatctgtatttgaggccgtgagtagggtcgagaatcccaatactcagaacagactcgattccgatccattgcctctatcacctattgtatttagtaaatgatcatttggttataagtattttccatagattacagagagagaaacaaagctttaaagaaggaaaaaacgattttatctcacagaaagaaaaaactcaatttctttccataatcaagacaaccatttcactcatatttatatgacaaagctcgtgaactaatcaaaattttcagcacaacaactaaataaagaaatggggctctaaatttgaaaatccatagaccaaaagcttccagaccagttgaagattgaaaaaaataaaaggggaaagcaaaagtatactgtctaaaataaaggaaactcagaccaatcgtgaaaaccaagtgaaaaatatgcaaacaatttgaatagcctctctagaattttacctgcacgatagctggagaagtaaacccaaacatttcaaagccatcaagactcccaggaggctgtatgggaggaaggttcaatcttcccattttatgctgtctagtgatctcttgattgactctatctcttaccaattcccaacacctgacaactgaaccatggatgaacatctcacttggagaattctccaaggaaacctaaggcaatacataaagaattttctacaattagtggcacaaaattaacctaacttttgatcaacatcaaatctcttgtagaattgctacaaaatatgagacaaatatgcaggctatgaatcttagaaagtcacccccagctattatatatctactattcagaatcattttgccctaccccatgaaagaatagaatcttattttcttccctgatatgaacacataatataagaattttaaaactcatgtccaatagatcttctgaacgccaccatagaagttttattttatcagatattgtttcattaaagggtgcaatatcaaaattcactgaaagccacaaccaactctaatatgccaggtaattcttggtgaaaaagttatcaacatagaaagcctaggagaaacagccaaaccttaaaaaaaatatatgcaagagataattttcagttgacacataataacacaaataaaaatggcagtataactagattgtgcaaaaaaactaaaaaaaacaaatcaaataccatgaatagaggtccatcccgcccagcatcaagcacttctgagatgtaatgacacatatttgatggatctaacacacttatgtacttaaccctgctcctaaaccctgaatcaagaagaatatgtataaatgacacattcaagagttcttatttatttaacacagtaattgcatatatttcttttcaacatagagtattgatatggtcgcataccctttggaaaaatggcctggctgttacaccaggactttccagagagcacagcaccatattccagaggctcaaccatacagttgatccttcgcactactttcgctattcgaggacctttctgacggtagtgtctgtccaaattgttttggctggatgatgcgtttccgttgaaagatcttgcaatttctgcagagcttgtcacaccatcggattttgcactgctagtaggcaaagggttctgagaatgattcctcacaattgtgatgttatgagctttactttcacaaatatttgaaggagccaaaatactcccacattctgggcccaaagaacctatatctaaattcagtcggctagatttcactaggtcactatttccttggggttcatccttcccctggatagagcaagatgaaaaattgctcccttttccatgaggtaatgaacagtccactttttcaacctttacaactgcatcagttactggtgtagatagttttggatcattacttaaatcacaagagttcattttcattttctcatcagcaacaatcaatccctcaaaatgttttggatgcttagtagcacaagtctctttttctctatctgaactaggcttttttacatcgtcacattcatcatcactaagaagtataacaccgtcatgtttcaaaaccaaattcttcttcactgatgatttcccttcaacaaggtgtgtggcatatgacgtgtcttcttgagacagctgacaaacagaagtttttccattagatgtcaaatcaatagttacttctttctttagccgagaactactattacttggcaacgtaatttcatgtgcagaactagaaactgtggatgacaactgtgtatcttttgaaggctttgaaggcaatgtggctccttttactatcttattcctatcacttgaaatatggctcattacaggcattgccagtatgatctgtcgatctttaagggaaacgactggtcgctgtgaatttaatacttcaagaacagctccaccatcagaattagatttactaacctgcatgttgtccttgttgacagcagaactcaaggccagtccaagatctagtctggcccatctgtatattgcacttaattttccctccaaagcctcaactaggatatttaattcactgatgtcatagcgaaaaagaaaaaaatttatcaccccaagcacagggacataactgtttcgtgtgattcaagcatgcatatttatctggtgaacaatgacaacctgctgcagagagatgcaaatcaaaaaagcaaatactgcattccctctcactgtcagcatcaaaactactctccattttcactgcttgtgaagaactgcatagaaactccctcctcatacgttccatttcaactcgtgtctattcaagaaagataaaatgtcaaaagtcaaataacttaaaagtaatacgaacatgaataccagtgtaatggaaagttgtata

SEQ ID NO: 307904 - DNA, 1761 bp, Cannabis indica
ttttttaatttattatttatttcagctgatggtacaattccaacccataacaaaaaagagatttttaacttagataaataaattaaacataaaaaaacaaattttcctaataataccctttaagagtgcactcgtatatatatatatatacatatactgaaattgagattgctcgtgcccacctcctggtaattgtcatccctcaatcactaccttttccactaagtgattccttagggaccttagcgtacctgttgtgatcattggttcacatagaaaccatgtcttaggtgcattaaaaaacactttttgggaagtgtaaggagactatggctcaatgaaacttctttgccttcgagttttctaattcaaaatttacttagatatttttttaaagcaatttctcttactagtagaaattagagagtttttttaggggagagtgacccagcaattacaaagaacaagggcagaggtcacttctagaccaactccaagtgtcaactaacccaatagacacttgggcaagattgtgcgcaattgtattcctttttcgactaacgtgtgaaaggaaaacaatggggaaggaagctaacacttctttaagagcatcaataagagctccatattttgataagatgttgtcttgagatttgatgtctttgacaaggttcaaacagtcggtctccacatggtgaattaaaatgtgattattttaacaccagagtaggccttgcaatgcttttgcactttttgattgcatcattccatgattgcttttggcaaaagcagctatgatccgtcctaccaagttacaaaccagagcacctgcatttgttttctcatcttttgctgaaaccgccccatccacatttagctgaaactaacttgcttcagggggtccaagtgatgacaatggtgtcttcctgggcatgtttaggctgaatgctttgtgcctgcttatatgaatgaagatagtctgaagccttttgataggttgtaaatagttgtccttgcaagtgtctaaacacaaaagagttcctgctattccaaattttctagagcatacagagaaatgcttcgaattcattgttagttaactgacttattattaatcaaagtatcaataacatttctctttttttatgtttttactatagagaagtgaaaggtgtacctatccaagccttttggatacccctacattcaaataaagcatgttgaggagtttcatacatcaagggcataagggagtggggctacttttcctaaagtgcaaattttgcgtgtgttggaagagtgttattacagagtttgtgagtgaaatgcttaatttttaaggggagattaaggttacaaaggaacttccaccagcttgcatttgagtcaggattggaggttgctggtttactagctctctttagtctctgtgctaaatggttgcttaggttgacagtatagtgccctgagttagtaaattgccaaaagaggcaataaggtctttgaatgttaggggatgataaggagagaatgtcatgtgcaatgtccttagtaaataggtggttgattatgtcgacattctagtttttagagtcaaggatgaggctggagacacaagtctgattagagtattgggaaggggaataaagtggtagttcgggatctaagtgtcatagtagattcaaacaatttccctgattagtggtcaaaaatatcattttattgatgttaaagtttaaattaaattaagttttgattaat

SEQ ID NO: 307905 - DNA, 1402 bp, Cannabis indica
cgcgtgtaccctatgccgtcggttattctataacaaccaatgccatagagtttacctacaaaaccctatgtcgtttgattccaaaccgcctctaaagggtatactccaattttatacctacgctttttataaaaaaaattacctctaaaggtaaattttcaatcggcaggtattttcagaccctttagcttccttttttataaaatgggttcaaaaaagggaagctaaaggcttgttttgtagtagtgtctgttagctgtgaaccagatgagagtgtttgattagctgttttagaagccaaccaataacttgatttcaccgtgtatgaaccaaaaaattcatgatgctaaatcaattgatcttgatgtggaaagattgataagggaatactctgtattttcgcaatgtcaatatccaagaaataattctgaagtaaagaggagtcccaacatcgagtatcagtgatcaatgtagaaacattcagatttgtgtcaacacctttgaaagccagaggtttaaaatatgagtgacttggaagccacgggtctgttgcacatttgatgttcatttatttccaaccttccaacaaatacctttttgaagcagttctttacccccaaataatacctctccatgtcatggaaggatatgagcctgagctagcattcctgaaagttgaatttttaaagtatcgatgtttcaataatctgctaaggagtgacgatgggttagacagtacacgccaaccttgctttgctagtaaagcttggttgtaatgaataaggcttttgaaccccatcccaccctctcctttagatttgcaaagtgcattccaagttttccaatgaatacccgtgccagtagcattcgaaccccaccaaaacttattcatcattttctcaatttgatcaatggtctttttagtgagacgaaaacaactcatcgcatatgtgagaattgattgtgctactgatttaagtagtatttcttttcctcctgccgagaacaacttctcttgccatgctgagaggagattccacagcttatccttaatttcatcaaaaagaatttttttgtctcttcctgaataagaaggcaacctgagatacctttcatggcacggttttgttggcatgttaagtacttgctgaaacacatctttcttagtttaaactgtgtttggtgagaaggaaagaactgatttatcttcgtttaaactttggcctgaatcatgacagtagcaagttagagagcgtttaattgcaattgaaaagcttcggtttgctttacacatatcaagctgtcatccgcgaaaaataaatgcgaaactgatggagctcccctagcaatctgtaaaccgtgtaaggaacctatgttttcctcatgttgtagtaatctcgat

SEQ ID NO: 307906 - DNA, 997 bp, Cannabis indica
atattttcactttttcactttttcaattttaaaaacagaaaactgattgaaaaacgttaccaaacgtgtataggatctgtgcggaataaacaaaataattttaattataaagaaaccagaaaattataaagaagaatatttctcaaagttatagaaatgattataaaagatcaatgtcaaaatgatgtcttgcacctaaaaaaactcacttggattataatgtagttaatacccttaacaaaatgatcatgtgttactttgtataaattccagcccagaaagacactaatcttatggccataacgaatatgtggcactagaaattaagaatatgggtgacaataggtatatatacaaaatatatacttacattaatcttatgtactttattcttttcttacttagcaaataaagtttattccaattttcccatcacaaaataaaatatcacaatatgacaataaaattagtttacactaaagtagtagaagagtaaagagtgatttctactttattattgcataaaataaataagagtttgttttttcaactaggattcttgtagagttttgctctttgatttttcttttgttattaaattttttcttgcattatacaaatcgttgtaaatttttgtctcaactttactttttgttctattcaatttatattatattatttaactatttatacatactaaattaaagagcacgtatggtttatttttttaagtttaaaataattcttcaattctaaaactggctaaacatggcatccacggtctccatgtcgagatggacactacaagaaaagttacttttattagcacagttcgctactgcgctggtaaaagttacttttacccgcgcatttcgcaaacagtagcgctggtaaaaaaaagttttaccagcgtacatttacagtggctaaaattttacttttaccaggcattttacgcgctgaaaaaaattatttttaccaacacttttcattttgt

SEQ ID NO: 307907 - DNA, 2362 bp, Cannabis indica
tcaaatctaaaagtatcatatttttgcaacaaaatattaaaaaaccatattgaatataatttcctcatagaactttcaatctttagctacgtgaaatccaactcaatacaaagagaactcgtagatagactaggaaaaaaaactcatttgataagtgcaatacttattgaggtatctacactttctcaataattttctcaaaattacttctatactgtttaaaaattttcagatgaaagaactcaaggctattctcaatgagcacttgtctcacatttcacctccactgttgcctagcactggtagtgagaacaatgtatctccaattacgactcaagcaatggtcagatgctaaaatggattgtcgtgatgttaatacaaattctcaagacaatgagagttaaggtactaagatttgatggcaatgaggtggatgattgaatttataagatcaatttttttgatcttcatcgagtcgatacgacactgtgcctcttggtggtgccttttctttttgatggaacacaatcaacatggtttcagtggatggagatgtgaggcaaaattgcggattgggaatctttaatttgtgctctacatatgcgatttggagcttcagtttatgatgatcccttgggatatatagctaagctcacttagataggtcgcatacctcaattcagagccaaatttgaggaacttatgatagaaactaatagagtctcagagcaaatgtatctaaatttctttatgtggggtctgatgcttgagatctgtcatgaattactcatttctaggccctatgatttagctgatgccatggtcaaagctcaattgtttgaggattagaacgatgatatggtgagtcgtttgcgtgtgagcaacacttgcactagttgggtgcctaaacaaggccagagtttgggatcacctatcaatggatctggttttgtcgctaatacagggtcccatatcaatggcccaacgttgtttagggctaagcaatgtactgcaccactacctattaaacggttgactccatcaaagatgcgagataaagagaacgtgtcatttgcttcacttgtgatgagaaatacagttttgggcataaatgtgagaatcaagtctttgttttatgtggtactgatgaggataacgatgacttactttcactagaggggtggagacaccagatgcagaagataacattgttgatgaggttagcttggatgccttgttgaattcatcaaatcctcaaattttttaatccatgaaaatttggtggggaaattctcaaatttttgattgacatcgaaagtaacaaattttttattcaagagtccttggctactcagttacacttgccttgggagaaaactaaatgatttaaggtctacatgggtaacgataattttttaatatgctcgaaactttgtcaagatgttaagttggttttatagggtcatcattttgttgttgatttatacatcatgtcgatctacggtctcaatgtggttctaggcatgcaatggtcgtgaacttttgggcctttgtatacatgatcataaagccttaacaatggagttttcttggcaaggtagtgtggtaaaggtggctagttctagagatgtgtctcttcacctattgtcatatactcagttcacaactctcttgcatgatgaagaggtcagtgggctattgttgggttttgtgccttaaataaaacttatttcaatataatcagatttactaattaataaaatatcaaaaatcattttatggttcatggttcacatgatttatttcatgattatatgtttaatgtataaagtctattaagtccaaaacatatattaattcatgattatagcgttctcaacacactggaatataatcatgattatatgttcaaaagtttaagtcccatgatttgtcagcacacaagatttagactgacgtgataaatcagcgataaggtatacttacaccttgaataagtgttatgtcctttccagaacagtggcaaagtatgctagtattgaatgtatggagtgtacattggattggactgatattgaacttggataagatatcataaacttaccatttatatctttctaagtcaatatcactagttgatcttaggtctatggatcttaatcctaagacggttaggttcgatcttaattgtattatttatgttcttagagttgttcgttgaagctcgtactactgaacacatacatcttgggaacatgatagttcaattgagtgggatcgctaatcatagatatcagatttataatttctataagtatataaaagtgaaacgataatttttttcgagcttggcttaatagag

SEQ ID NO: 307908 - DNA, 1431 bp, Cannabis indica
gaggggcactttagattttcgttatcaccgatgaatattactttgaaaattaattgcaatgactttatcttctaaccaagaaccagtagctatcattgattcctatttgaacaagaatgccattatagagtactagatttggctttgacattgttgtaagttttgtatgctactgatgcttagaaaagtaatcataactcaaatttatagtttgacttgatttctttcttggtacaaagtactctaattgagacccttgaacctttctggtaatcttttttttctttttctttcttaatgattttatagactaggaagcttttgaaatgcattaaacattttgttatgttcttttttcttctattatgcttaataatccttttaagtttataattcaacaattgaaaaagtatcccttggctttatatttaaccaatcaggatatcgctgcccccaaggtgttggcaatagaggacaagaaaccagaggtagaggaggcacgctcaccatcaccatcaccatcaccgcccccaccaccacctccagcagaaccagaaaaagtagaagctcctgtagctgagccaccagatctgctggtaaaatcaaatgtttgtttgtcctttctaatagttctattctatcacggtaacttcgcaatttgttgaagttctttgtaaaggtgcttaattttttcttcttctgttactaggggttgaatgatcctgtaccagatactaaagaattagatgagaagaatgctatggctttggccattgtgccagtcagtaagtcttcttaactaacttttttattttttatgaaatgtgtatagattaatgcttgcatttgttggtaactccagtccttttcaagtaaacttgtacttgttctattccacaaaaggatgtttttataattgctttcattgaatcttgtaaaactaaagacgtcgtgataatatttgcagctgatcaacaaccatcaactgctccaacttatgcaaatggaacttcaggctgggaattggctcttgttacggctccaagctccaatgaaactgccacagctgctagcaaactggtacgtattccaacatttctgttgagttgtagcttgttataaaattatgcaataggctcgtatatatagatatatagatatatagatatatagatatatataaaaggtactgaagtcagcttgcgaaccttacttagctatactgacacttcttattgtattataaggcgggaggattcgacttgcttacactagacagcctttacgacgatgcaatcagaagaaacaaccagaatgtaagctacaacccttgggagcctgctccagccggagctgctcccatgttacaacatccagtacacgatccatttttcgcctccagtgcagtggctgcaccacataacgtgcaaa

SEQ ID NO: 307909 - DNA, 972 bp, Cannabis indica
ttatttatttatttttttctaaacaaaccctcaaaatgcttggaccggcccggtccataattaataatttacacaaatttatcattcttaattcacacaaatttatcattctttgaaatacatgtttctagtacaaaagaactagaatacatacattgacttttcatagcaagaaacttaggacaattatgtttctaatgtcctttttatttgtagaagtaacacatatctttcaataacgtgaaaaacattctcgtcctttctcatcggaagactctaccactagaaatatttgccattacagcttttcctttggttttgtcactagcgactgcaagaatatccttattgaccgagttaatagaaattgagggctcgacctcatttcttcctttgtctgaagtaattggaacattaggactattcttgtactatagagttgaaaagtaacagctgagacattagctgatatatgtattctaatattatgttttatcatcatgtacttgatgataaattgtttgtatgctggagctagactactaaggattatttgaacacaagattcttcattgagttcaagtcctttagttctagcttcttgaaattggcaacacatatcatgaaactgactatcaagatgctcgtgagcaaccatcttaatttcttcaaacttgaaagcaaatgaattagaaagggaagttctatgactaattttctctccactgtgagagagttggtgcatccatcttgcacacctttctctctccaattgttaaacttgaaagagaggatcagtagcaagcccaattaaattggtctatgcccaaccatttggcaaaccttctctctccaatcaagtaatcaaactcatgaatgtccaactctttgttcgtgacccaaaatatattccaatagtatgacgaaaaaaatcatcatcactattttttaaaatatggaaaaaattattaa

SEQ ID NO: 307910 - DNA, 943 bp, Cannabis indica
tttcaaatactatatatacattctatattcaaaaatatataccttattaaagtaaagtgtgaacaaatattttgaattgcttcaagatagagccaagtgtctatttcaattaagtatcaacaattatttttataattagtgtctaagattgaagcctatagctaagagaatatttctgtaataataaaattgcgtgtgacacgaattcaggttgacaataagttccattatataaatatatatatatatatatataaatatgttacatagtatgaattgatcataattaatttgttccatgtgtatatataaaatatagatgaagcaactacacatgacaatgatagtaattaattatttttctttgtttgaactctccaaacattcttagggttatcataacaaattaaattattaaagaattcccttcactatacatctttaataagtctattcataattgattgggataaataaattacatacaaattaatcaatagataagtgggacatcacgtgtgatgtacaagtagttttcgtttcacactagctttgtatagttaaatagaatttattaatgaattcaaaatttgcaccccatataattaatataaatatagtcattattaaaaaataataataaattaaactatttttaaatttagttttacaacttttcatctagacatcactaaaaaatacgaatattcgagctaagcaaaaacaacacgtataaaactacaaatattcatctaaacactactacaatcttggcctttagaggctgttttttcactcccacttataaaaagggaagctaaagggtgtgaaaatacccgtttttttcgaaattgacatttagaggcggttttttgataaaaaccgtaggtataaaattgcattataccatttagaggcggttgggaaataatttttttttttt

SEQ ID NO: 307911 - DNA, 1909 bp, Cannabis indica
aaaaaaattgctcatcccttattttaaattttgggtctgtcaccgcatttatgataggggtgttctcaaatcgcattacattgcccacatcgcataaatattgcggttttaaagtatttacggtgtggttgtggtttgtatttttgccaaattataccgtgcgatgtggtttgctgttttggttggggaccaggtcaagggttcggatctggggctagggtttagagttcgtcttgggttggagtctaggtgcgggtttgagatcagattcgggtcggggtttgcgttagaatttaagatatggaagtgagtgtatgataaggtatatgttatttcatcttaaaaccaattggcaatatgatgagtactcaatcattttatatatgattttaaattatttgcggtgcagttgtggtttggatttttgtcaagttgtgcgttgtggtttgcggttttggtcgagaaccaagtcaagggttcgaatttggggctagggtcttaggtttgggcctcgggttcgtgtcttaggttagagtcttggtacgggttagagaccgaatctgggtcggggtttgtgttagaattttggatatgaaagtgagtatatgataagatgtttgaggttctattttattcattttatatatggtaaaatttttacacattagcaatatgagactatttttaatatactatcctcacgtttgggtttggaaagtgagtataacgaatgacctttaagatactacaggaccgagcttgacatgtgaaaaaaatcctataagaacaaatcgagaaatttataattgtacatattgggaaattcgtgaattttttttaaataaagactataacattaaaaattgacatatattgttccaaactccaaatctcccaaatgaaagtcaaaggtgagaacaagaaaagtttttttggttgtactaatcttttaaataatacattggtcaagtgtgggtccaacccctaatctccaaactcggactctttctaaatattataatacaaattaatacgaattacttgttatgtattaaatattatgagttgtattatattaaaatttatgatagtaataattaatacaatgtaaaattttattcaagcatagtgttatttgttattactacaatacgatatgtaaatgtattatatactcagcttttaaaagtaagttttaaaacatgcagcttaattattctttctacctactataaatgagtaagtgtaaaagagattttagaattttcagctatattattatcgtttagttattttactcaaaggtgttcattggatcacatttaatagatttagatccaaccgatctaattcaattatttattggatgttaaattttgtcatccgatctaatccaattgaattaagtcgatccgatccaattatattgtattatttttattttattgttaattttttattatttgtatatattttctttttttacctattttaattttgtctggatgtatttttctttttaccttcatatatttttgcctcgtgaatggaatgaattgatttgagacatttactaaaggatctaccatttgggcttggactgcttaacgaacttttattctaacccaagtttcttcatcttcactctcttcaacacaatcatttttatgagattattttaaaaatacacaaaaacagcaaaaaattacaacaatacagtttcacagaattttaattgtttttatggagtaatttgttagtttatatacacaatactcagtaatagtattgttttacttaattgtaacatgtggttacaaacttgtaaacttcagttacaaaagaataatgttgttactgttataaatattaataattatgtggatgtccaaatcttttatttattacc

SEQ ID NO: 307912 - DNA, 963 bp, Cannabis indica
aaaaaaaattaaaaaacaatatataagataatttttctaatttttatatatttttaataaaatatatatgattattaatataattaatgatttttttttcttatttcatatttttttatattgaagcataactataaataatgagtcaaatataacaactcatttttttttttgtgccaatggaccaaagcctagtatttcctagtagctacttaaatttaaacaatgtgattataaaacaattacatcattttggtaaactaatttcttaacaataataaactaaaaagattcgaaactataagctttgaccgagtttcttaattccaaagcctccagctcacagcaaaatcctcagtctgtgtctaacctggaatgaactcagttatttaaatccccaccctactaaatagttacctaatctaaatctaattaattagataatcacacactattttttcttttttaaagaaagaataggagtaaatacgacaagaaaaacaactataaataaataaggaaagccaaaatgaagagggcccatgctttgattggttgattgtattaaagaagaggtggtaagatagaagtgtatgagcacatagatctgaaaaacttttccaatgtgtttttgttttattataccataagcaatcccattttgcttttttttttttttttaattaaaaccttcgagaaagtaagtcacgtgaaggcacgtgagttgggggtagtagtatagggctggggtggaagtgaagaggtctcgcgtgccggcgtgctcagctttatgaaacaaaaatatattaaagaaatgaaagtgggacccacgtcagctgcttctctgacaactctgtcttatgacgtgtgtcccctcaaacatgtgaggaggaggaggaacagaattttttttttttatatttttatttaagtaaatagcggtataaatatttaaaattttaa

SEQ ID NO: 307913 - DNA, 1310 bp, Cannabis indica
acaaatatatataaaaaaaagaggaaaaatattttaaacggcaggggtctcaggctccttgtacggattagctagcttggtttgtgggggccagaggccgacgttctgggcaacaggggcttcggtgttctggtcgattagaactgtagaagtggttgcctctgtggatttggctcgagaataagcgtaagccatctttaggttgacctccacggaaaaagttaaaacctaaactggtaaaaaggcataacaaaagtaaagaaggaaacacttacccgagcagcctctttcaggactctgcccatcaccagttctaggaacaactcattgtccgccctggtcagttgatcgctcactttaggaagtggctgatccaggtaatactagagcatatccttgcccttcttggcctccgtgctccgtaccacgacatttgaggaagtctggtgcgctagcatttgcttatttgattcggttccgtctcgagcatctgaatatttttttgtagtaaacaagagatacaacttgtgataagtcaaatacccactttgatatttcaccttttcataaatgtagaatataggcaaattagttgcaaatcgagaagtttcgagtctattcgattttgcaaaaaagtgacatctccacaaactagcgaacaacttcaccagaattaaaaaattgactaagtaatctcaatatatcccttaggcatcaaaaaatacaagtccaacacattttcccactcatacaacatccatgttgacgtcagaatgtcaacttgggcactggatgtcaacctaggcgccagttactgaactgccttcagtaaaacaaccattactcactcaatattgatcctattgatgcgattctaattgtgtttgaaagatcttttcaagcgctttcaagacatgactcaaactcatatcacaattttgaatatttcaaatcaaaattttttccttaagttaagtgcgattttttcgtagattaccccaaaacgatccaacagacactattcgagctctaaaaattgacaattatcatctaaagtcaattttagccattagatcatcgtcaatggtcaataatagcccaaaataattttttcatatttttttttgttattttattattattttaagagtaatttacagcataaatacttaaatttaactctcggttgcaataaatacttaagtttaatttttgacagtaataatacctaagttatatatctagaacttctgcaggtatccggtcgttaaatttcaagtcattattcatgtgtcattttcttattggta

SEQ ID NO: 307914 - DNA, 1660 bp, Cannabis indica
atattaaatcatataacaatatagtttctcattaattcttaattaatctagttagggttgctatttcggttattaaaccttaggttattacatatataataaagcttaaaataagttgatctaaaatttacccctataaatttcctaatttatgaattcctcatgactccactataaactcagaattgcactcttgattacatagaactctctatatctccaatatagtcacgctatgtattatccattgttacaatcaaaataattattgatcctcaatagatgatctacatagagtagagacaaacttagtattttaccctttaatgtattttatgctttaaacacttagctacttgtaaaagatgtttttgtaaactagtataattactaaaattagtcctccaccatttattcttgttaagccaaattcaaaggagattattgtttcacttctaaataattatagaagctatagatgtccatatctatgattaacactcacactcaattgaactactgagcacccactatgtaagcatgagctagtctaacgggtaagctagtaatgaacaaatcaaataattgtaatcttatttaactatcaataaaagactagagattatttttttactattatctattgcttggttcacaagtttatttcatgattatttgtttaatatataaattttgataaattttgaacatataattattcacaattatagtgttgtcaccatagtgaaaaataattgtgattatatgcttcaaactatttaagtcccatgatttatcaatgcactgaatttatactgatatgataattaacaatatggtttacttacacttatctaagtgaaatttcttttctaaggcattagacaagtaaacaaggatcggatgaatagattttacatcggactggaccgatattgatagtagaaaatgatatcataaacttactgttatatcttttttagttcaatatcgcttagttgatcataaattaattgatctcaataatgagattattatactttaagctaattgtataattaggttgtggttttatttagggcataaaacctaatagtgtgtatttcaataaagatatatagttgctcttatatgttaatgatatttttcttgttggcaagagtatcaaagtaacaaactcaaagtgcagttgaatgtgattttatatgaaagatcttggaaaagccaagagaatacttggtattgaaatcgagaggccagaacctagaatcacaatgctgcatcaagagaaataccttgaaaaggtacttgaaaaattaaaaatggacaaggctaaaattgtgtcaactcctctagcaccccatttcaaactgtcttaggatcaatgtcccaaatccgagaaagaaaagaaagaaatggacaaagtaccttacactaatataggtgacagtttaatgtatgtcatggtttgcactcgaccagatttgacacatgcttttgggtgttgttagtaagtatatggctaatccaggtgaagttcattggaaagccttgaaatggatactgagatatgttcaaggaacaataaaactagccttatttttggaagaaagtcagatcaaccaacagaggtttatggatattgttgggttttatgccc

SEQ ID NO: 307915 - DNA, 3168 bp, Cannabis indica
attgaaatgggtttatttaggacacaaaacccaacaagcgagcagatgaagattgtacatgttggggcggttaggcctggagcgtatgatctttgggacatcagggcttattttgtatagtcgctaggcgacaaacttttgtatatgcacagttaaactttcaaaaaatacttttataaacgggatcctgaatttttatatgtatgatattttatgttttaattaattaagtaaaactttaattaatcacgattttcaataaactcgttgattagcaacgagctgcacagttaagtttaatatcacgttaacacgcctaaaatagtgagggtgttacatattgactcctaataaaagaaagaatattggaaatgaagaaggtgttataagtggaatatttgatggagagagtggtggggagatgattgcttcagatcaggaaaaagaaagatggcatcggttacttctgaaagagtttcattgatgggccaaggtaataatgggctttcaaagatcttaccaatggcaggccttagagatggagcttgtcaatcatcatgagtattttgatttggaactgctgtgagcttgggccaccgccacggactattcagttccttaaagaacttatggttaaaaaagcccatgattgttttctttgtgagactttatgtcatagaaagaaggtggaatggttgagtaggcaaagttttgaaggtttctttgttgttgaggcccaaagaagaagcggtggtatttcaatgcttaggcaaaatattgatggtgtcaaaattaatagcttcactaaaaattagattgaatgtatggtttccttgcatggacccctaactttcgtttaacggaaatttatggagaaccaaacagaagccattgtcgtcaaacttggaacctattgtgtacacttaaagatgaagcttcaaatcctttggtgcttattggggatttcaataatgtcctaagccaagccgataagaggggaggaagaccatatccatcttggctcatagaaggttttcaagaggcgttacaagcttgtggcctttgtgatttagaattgcgagggaatccttttacatgggaaaagagtcgtgatactcccaattaagtatttccatgccactgctaatgaaagaagaagaaataatcagattactagtttgcatgatgaaaatggtaacctggtttcttggacactgaccttgagaatgtaatggttaagtattttgaggaaaattttatggcgggatcatcgaaatgggaagaagttttagattgtgtggtgccttctatttcagatagacagaatgaagattaactaaggttgataattgaaagtgaagttaagatgtccctgttattcaaatgcatcgagattaatccccaggccctgatggtatgaatcctgttttttaccaaaaatattagcatattgttggccgagatgtagtggccactctgcaacatttttttcatactgagattatgtcggttggccttaatgatactaatgtggttctaatccctaagaaaaaaaccctgatcgcatgagtaattaaggcatatctctctttgtaatgttctctctaagatcattacgaaagttatggccaatcgtatgaagcatctctttgatcaagtggtgtccttgaatcaaagtgcttttattcctgggcgattaatcactaataacataatgattgtgtttgaagtcttgcactacctaaaacgtaaacaagctgggagagatggttttatggcattgaagcttgatctgagtaaagcttatgatcgggtggagtggccttttttatgtgccatgctttccaagatgggatttgattataaatgggtaaggcttattgagtaatgtttgtcgtcagtttgctacaacatttttagtggaggttttaacttgggccttattgttccttatcggggaattagacaaggtgatccaatttcactttatcattttctggtatatgctgaaggtttttaagcattaattaggaatttttgaggaaaaaagtggctacatggatgtcgggtggccaatagagctcttgtgatttttcacttattatttgcagacgacaactacctttattgcaaggccacagatgaggaaactaatggtgttcttcgacttctagaagtgtttgagaaagtttcaggttaataggtgaatttttccaaatcctctgtcttcctttttggagatacttctactcatatgagaacctatatttgctcgaagatgggagttcaagaagcaaatatttggggtgccgattcttatgggtaggaacaaaaatgtggtacttggctatctcaaggacaaagtttgccaaagaattcagagttggaatgacaagttcttatctcgtgcaagtaaggagattttttgcttaaatttgttatttaatctctgccttcttacaccacgaatgtcttcttagttgatggatgagatttgcaatgacattgaacacatgatgagtaagttttggtggcgtttgaaatctacacaagaaggtggtatccattggatgagttggaaaagactaggtagaaataaagatgtaggtggtatgggtttccataacctttgagactttaatctctctcttttagctaaacaaggatggtgtttgcttctaaatggagatggttttgtggggaagattttttaaagcttgatattttccatctggaactttccttacagccgagattggtaataatccaagttatatttggagaagcatccttgaagctcaatttgtggttaaattaggtgctcgacattgtatgggttcgagtaagtccactagaattttgaacgatccttggcttaatgatgcggattagccttttattgaatcttctcatccaactttgtttaaccaacaagttttggcagttatgaatccaatggctaaagaatgggacaatgaagttctaaaggatgtgctatcaagctgtgactacacattagttaaatccattcctcttagtcagtttgtagatgtggattgacggtacttgattaaagaaagttcagggatcttcacggtgtgtagttcttgttggaattattttaccaggatatatttactatcatgtatgtttgattaacatcctaat

SEQ ID NO: 307916 - DNA, 1273 bp, Cannabis indica
tttttgggcccaaagtcatcctccatagatccgaagtcttcaatatctaagagagggtagaatagtacgattcacgcatgcatttgtctgttgtgcccaaactcgcaagggtcttgtatcccctggcccaaaagccttgtgagggccaaggaattttgtgggcctgactacaatagagagaggagtaagtgtgagaattcgagaggcccaccttagaagagctcgagtctaacgtaatagagtttgacccttgggatgggaccttcgaatggttagaaaggggacaaattagaccctttagagtgtgatgcaacaggggttaacttcattaaggtaagaatttgaccattctcattagggggtcactgttgtgtctgatgggtatcatgggatgagtcctttaatatcatcaaagcctttagacaagtcgtacagcctcctatatcatcttgattcagatgcatgcctggagaaaagtcaccttcaatgttgtcgtttatgacatctgaaataaggtttttcttagacacctttttaaccactagagtggcagtatcctcaaaggggcaaatgttaccaaacgatgggaaaggataccatcggaaagtgattgactttcttctctctaatggtcggtaactcttccaccaactgttctaaaaaccatcctttaccagggaattaacgtcgcaattccttcatttcccaagagtttatctccttcatcgattagtttattttccattgttgtttgaaggatgggtccacagtcatcctcctttggatagcccaatcttcaaaccacttacacagattaggggagaaaggccatcttgaagactcatcatgtttcattcaaatcccaaacattgggaaaagggctcctttggagtctttaataaccataggtggcttgaagtagaatttttgttcatgggaaatgattccacatttgagacacattttatgttgcttctcgtacttatattgcatccagaggtctttaatggcctctctcttcttgaagaatcgtgaaaataaaggcttatcaatgttaatggtggcctgaaactacaccctccccatgccaaaagaacctctctcaaagtcgatgcatctcggaagctcataaataggcgagacttttccagcaagctcttccaggttggtatgattccaatagaaagttgggatgccgcttaacctaactcaaattggggacttgtaaaatttcacttttgatggcgtaacaagactgttggaaatattttac

SEQ ID NO: 307917 - DNA, 4581 bp, Cannabis indica
actttatatgtgtttatttataatcgttttagaagttaatatttaggttgttaatcaacatacttgtgagtagatctaagatcctggtaaaataatttccaacaaaaactcttgttctaaatgactagagatagctagcacagttgcacgaaactttggggacaacctgctgtagttaattatagcagaaagaggatgagcagtggaatcattttgtacctgagattggacattgttagtagataaaaaggaatggtaatcctgaaggtatgatggttttctgatctttctagtaggtcgtgaactagtaacatgttcaggtacagtaatgagatctggttctggtatatttggttgagaaaaatttgatgtactggtatggtgcataggtgaatggggtgcacgttgagaaaaaactggtgtactgggatggtaggtgaatggggtgcaggttgagaacaaggaggatctgcaacatgctccttggaagcatcagcagggaaaaaataaaaataatcaaagggaacagaaccctgcaataaaaatgatttttttttcatgaaaaataacatccctagaacaaaacaccctattagtattaaggtcgagaagcttgtagtttttcatccccatgagatatgctaaaaaaaatgcaaggagtggctctaggagaaaattttgttcttgcagcccctaaagtagaggcacaagcaaggcagccaaaaggctttaaatgatcatagctgggggatttggctttgagaatttcaaagtgtgatttgtgttgaagatttagtgtaggacttctgtttataaggtaagcggaagtgcttatacagcctccccaatatggcagtgggatgtgggattggaatagcaaggcacaagcaacatttagcaaatgttgatgcttcctttccacaacaaaattctgttgtggcctttgcacacaagaatgatagtggataatgcttaaagaggagaataatgcagggaattgaagctctttagcattgttcgacctaattcctttaacatgtgcattatactgagttttgataagttgcgaaaatgaaggaatggttgtttgtgcatcagatttatttttaataagatgaatccaagtgtacctagagtaatcatcaacaatggtaatgaagtatttaaaaccttcaacaatttgggtattatatggaccccaaatgtcgatatgaagtaaatcaaaacaatgcttgaaaatattatgattgctaacaaaaggtaattttctttgtttgacaaggtggcatattgagcaatgaaaatcagaacaattagagtattgaaattgcaaagctttattcagagaatggttctttatacaagatgcatggccaagtctataatgccataatgtttcattactaattttggaatctaaaatggaacatgctataagagatttctgctcaatcaagtagtaaagattgccaattctttcacccatcccaatcacacgattcttggtgatatcctggatcacacatttagtaggaaagaatgagaaagaataattggaagagtctgacaaagcacaaacagatataaggttatgatgaaattcagcaacacaaaggacattggttaagataatgttggaaattttgacttccaacaaaagaaactctagtattagttccattaggcaaaccaacagtggtgatcttggtgttattttcagtagagaaaaataaagagggattggatcacacagatgtgtggctccagtgtcaataatccaaccaaatttagggacagaagaaaccataccagatatgttagacactacaggttgttctggttgctgaggccgaaccgtggtttcctgcattttctgtgctagcatagtcatgagcttttaacactgagcagccaaatcatgctcctctcttgctttgtgacctatttcatttcctgatgtgtagttagcagaagatcgaccctgctggtttcctagtttattgggtgtttcccttggaaatctgccatataatcgatttccaagagggtatccatggattctgtagcacttgatagttgtatgtccaggcactccacaatgtgaacacgtaggtctattatctcgattgtcatttttgctgtcaaaacgattattgccacgatttgcttgagtatttctaacaaattgccctgtgctatcattgggagattgattactctcagtttgaggtatgaggatccctctctgcttttcttcttgtattatgctagcataagctttattcacatttgggagtggatcttgaagtaagatttgagatctggcacttagatatgattcattaaggccaatgaggaattcaagaactttgtcatcatcttgatattcctgtacaatcttcattgcaccacaagtgaaaactggttgtggcctatattcttgcaacaagtcccacagtcccttaagctttgtgtaataagaagtaacatcattcaatccttgagtaagggtctgcattgatctttttacttcgaaaatcctaggagcatttttttgatgaaatctttcctgtaattcaaaccagatgcaagaagcatcttccatatacatgacactatcagctatagtaggagaaaaagaattgaggatccatgaaattaacagattgttgcatcgtatccatgagtcgtaattctcatcatcttcatcgggagctgaaagccttccatcaacaaacttgattttatttcttgccaacaatgccaccatcattgaccttcgccaagaactgaagttatttgcaccagtgagaattttcgagaccaaggatgaagatgcattgtcagcattggataagaaatacggactccgtggattgttggaaggaaattcgttgtattcatcaagaacatcgaatcaattcgagttttcaccatcctcattattttttgtgcgagtctgagttcttgctccccgtgccatggaagatcggaagaacagtcaatcaagaagaaaggaagagaaggaattggagaagcaagagcaaaggagctcaacacatagttggctctgataccattttattttcatgagaggaaaacaaagaacaagaaaagaagaacagagaaccagaaacggagaaataaaattggaattcattcatctgaggagttcagtacattacatactttatatacacagttcatacatataatgaacttaacaacctctaacaaacttcctaagtaattaaccgaatacactacaccttataacaactaacttcaatattagtagtgaaaaatggttaaggcatacttaaggaaacagcccgacgaaacacttaaggcatacttaagtcgttttagcacgactgctgctagggttagaaatttagatgatagtacacaaattacagcccttcaggcgagaatctctattgatccatcaaccgctgggggcgagcagtgggacgacttacaggccgtccagtaagaaacatctctgagttcaacaaaagggctcaggtgttcgttcgagaagaggaagcccgaaaaaaaatgaatttgttgaaaataggctcaggaggtaaacccagtgatgtttcgattaatttgttgaaaacaggctcgggatgtaaacctaatgatgtttcgatgttgaaaataggctcaggagataaacccagcgatgtttcggcaagtactgtctcaacgagagttgataactcaggggcttctatctcgaagagaaaggacagttctaaggaaccgtcaaaggataaaaaaaagcaaaagaagcacgataagttcgtgccattgtatactatttataccgagcttaatgaaactcgggagaatatttacctcgcacatgagcaaatggttgtctttggcaagcttgagcccatgaggcatgcaaggaacaaaagacatcctaacaggcattgtaaattccataaggatattgggcacacgaccaacaaatctcgccaattgaaggataagataaaaagtctcatcgctcgaggccactttaaacattacgtgacgagacagggtaatggacacaaccagcccagtctgcctaataacccaaacaaccaggggttacaacctcttcctgttgaaggagaggacatcctagttatttcggagggccacatatcgcaggggagagcaataactcccaaaagagatatgtgaaagagataaagaacgagcagtcggcattcaccccagaaccttctaagaaggtaaaaaccgaggaacctccaatcatattcacggaggacgacatgaaaaacgtgagatatcctcatgtcgatccattggtggttacaattcaactcgccaataaaaggataaacagggtgttaatagacaacggaagctcagtaaacatcctttataaggaaacactgaggaagatggggctcaaaaagccaaattgaggccttgtatggtaaatctttgcggcttcactagtgacagcatttccattctgggcataatcgagcacccattaaccttgggcaaggcacccctatttgtcacggttatgcaagacttcctagttgt

SEQ ID NO: 307918 - DNA, 1948 bp, Cannabis indica
tttctttcgggccataccgctcttcaccccaccatctccctttctttctcaaatttctctatattatctctcctattcctcaaacagctcaattacaataacacatatatatatctgtcttcttattataatccaattcccatagttgatcatcatcatataattttcttttgtcaatttcgaacaaacactgatataattatacaaaatgccatcaatgcagtctagcccattctatcaaatggaaaacccagctataatttccctcctccgccatgctcaaggcagcggaggaggtggaaataatactgacggaggaggaggaggcggtgacaaaaataatggtggcgaaaatcataaaaaagccaataataagcgttcttcaacaaaatcctcgagtatgaccggagggctgtttcgaatattcaagctattcccgatgctaacttcaggttgtaagatggttgctctgttaggcagaccaagaagaccaatgttaaaagacaacgccactactgggacgatcttcgggtacagaaaaggacgagtgagcctggccatacaagaggaccctcactgcatgcctgtgttcgtgatcgagctacccatgcagacaagcgctttccacaaagaaatgcaagcagacgacataatacgaatcgccttagagagcgagaccaaaacccataagaaaaagctcttcgaggaatacgtgtgggctgtttactgtaacggtagaaagatgggttactccattaggagaatgaacatgtccgatgacgagctccacgtgatgcagacccttcgaggggtttcaatgggagccggggttcttccacctccttacgatcagaaagaggccgccgccgctgccgcctccgacggcgagttaacttacatgcgagctagatttgaaagagtcgtcggatctaaggattccgaggctttgtacatgattaatccagatggttcggctggtcctgagttaagcattttctttgtaaggtctcactgatcaagcaatttaattatattaaattattattaattactttataattaagaattcgtatataagatgatgatacattcatagatatagatttattgaattggggtaaagatttgatgattgtttcgtgatcatgaatatttgattattgtttttgtaggttagttttcgattatgtaactttgactaataaattaagagagagttttagtatatatgattatgatacatcggtttatttattatatatatttactaaattatgttcatttaatggattttatttactatataagcttatgatgcatgggttcgctaatttaatttttactggatatggatatatgatcaacatggtacacacactctcgagcaaattaagattttatttaaaatttgctcttgcttacaaataattagtaaattttcattttagttattaaattaaatacttaaaattcgatattaaattatattaataactgtatgacactctaaaccatcttagaccccactattacccttaaacaagtctcgtattatattatttagcatatttatttattttgaaatcctcctctcatattatttggttctcattaatttaattttgagtgtcggtacagattcattatttataattcaattaatatttgtgaaataaatattctattttttgttttaccaagcttaatttagcgatcaccccccaggtgtggttgtgatcgtacgtgcatttgtggaaattattttatatatactttctcttgactaagggtaataattaaaataaataatttatatttttaaattaaaaatagggtagttagaataaatattttaatcacaaaagatttaaaaaaaattataaaaatacattaacaaggagaaatttttatttttatttttacggtttgaaatttttgatttataaaa

SEQ ID NO: 307919 - DNA, 1961 bp, Cannabis indica
tttgatttagtgaataatatggagaatcgctaaccaattatcaagtgttatatctatatagtgttgattgaacatcttaaagtgccaaataataatgttctattaataataaaaaaattcaccataaaaatattgtacaaaaacttacacataaaaaatcattcataagaaaaagaaaacaaaaaaattaagatcattaaaacccataaaaattgttggaaaaataaaaaattatcattcatatgaaaaaaaataataagatcattaaaaaaaatacccacaaaagttattgttatccatgtttccgaatgaaagacacatgtcataagaaggaaagtatgactattaagcagtccctaagtaagtctcctcaataaggctaggtcacgaagaaacttcgcaaatccagaaataaatcaagaccaaaagatatacggaaatctatactgccttatttcagctttcgagacacggaagacttataaccactctgggatctagagatacccaggttcgaagctttcctgagcgatacctggaaggttactcgaagtgcgtaccacggatgttgacctcccaaaagagatgaaaacatctaccttgaagatgaactcggatcgcctaactacagttatgctttttctaacacaggatcagattttgtcccctttgctagaccatggtagtgcgcacgccccatacacctttttgccagacaattattctaggtatttacttttcaaggttaaaccttttggtgacacgagtcatgtacgaatagtgctcccctattgtccagctgcttcaacacacgagcacaatgtcagctctttgcatgtattttaccccattagtgtgaattttgtagaaaccctaagtgggtcataggcatgcccagacccgccctttagcctataaatacccttctatttccatacgagggggatcaaaaaccagatagccaaacacagtctatcatgagagatccaaacacattgatgtgaggttgttttggatcagagacaaggtagaagaaggataagttgagttagaaaagatcccaagtaaagaaaaaccttgctgatgtaggtacaaacgtgctatcagttagcaaattccaatactgtttggatttgctaaatgtaacttctacctaagatagctgaattacccccttatggttttgaaccttgtttactctttttgattaaggtggaatttgtagttttttgataatctaaatagagaaacatgttaatttaacaaactctgtcattggttagaactggttccaactgtcttggacagttagttttttcagttatgttttcactcctgagcttggttacttaggctgatattgtttctgttttctttccatgtagcttgtttatataaaggcattaaggttctcattttgcaaatgatataaattatgagattagattgagtgaggtgagaagaaacagagtgagagagagcttgagagaactgttcaagttgtgttcttggagtactcaagttgagagtgttgggattctctttgtaatgctctagagttgtgttcatagcggagattgtaaccatgatcatgaactaaaataataagaatatcacttaagaatatcacttaagggggtagtaagaagtagacatttgtttttgggccaaacttagataaaaatcctgtctttgttttaaacttttagttttgatttttgttgattatactttgatgtttgttgaattttgtcaaaatacaacagaattaaataaattaagttttaagataattatgaagctaataaataaaattgataaattaaattagggtgattctacaatacaccccctcaaaaaggatgttctgatgcacccttgacttgtttcggcatctacaaaaattttttagtctatttttttttcatattcatgtacgttatagctatttaagataacct

SEQ ID NO: 307920 - DNA, 1781 bp, Cannabis indica
agtacccaatgtttataaaactataattttcttccagtttcatcagtacagactctgctattgtcttaaacagaacacatataagacccaaattttagattatttggtctgaacgaaaaatatgtagtattagttacttccaaatcttttttaataaatttaacacgaagcttgtactacgaaaataaagaaaaattacagttttacaaacattgggtacttatgctgctaaaaaaaatcattgggtttatgccgcttacaaactcaaaactttgggtacttatgccgctatttacccaaaaaaaaatatgcaaaagtattaatctaatgatgaattgtgaggatatgtatgtgtattcttagagttaatatttgtatgttaaatatcaataaattagatttcgtgtatgggtgttcataggaccacatctaatgttttagacctatccagattcgacccaatattggatgttagattttactatgtgatctgatccaattacttttagtcatctaatcgatccaacatccatttgatattggattagatcggttctatccagtaaatgtatttcacgtatatctattgtattgattcaaattatctatttttagataatattttttagatcagatcagatctattaaattatttaatctagtatttattggattggataaagaaaaaataaattttgatcttaatttttatatatgcatgtatattttaagtgtaattatataaatttaattgctcatcaaaactaaataaaaatactaatgagttcgattggatattagaagtattggaattttgaacacctaatccaacatccaatccaatctaattagatattcaaaattaacattcaatctacattcaatctgatctgttagatatacggcagtcaattgtaattgaatcggccgcttgtaattagataagatcaatttatgcaaattcttaattttgagtagcttaaagccgctaaataaactcttagatcgaaaaacgtattacctctttcttatgtatacaatgtaagttgttacaacggtgatcactcatttttgtaggtgatcagaaaatgatgagatctgagttgattggagttgatgaaaaatgtgtaatagtggttggtagaggtgattggagttgtcgagatgttgtggtagaggagtgagtgatagaagctgatctcgcaggagagagaaatgaataagatgatagaggaagtccaattgcaataggtctcacgagatcatccaaatcggacgacagtaagagaggaatgaagaagagagagaaactccaagtgaaagattgatgagagaggatgtgaggtcagaaaaaacttatttccaattttaatgtttttaataggttttttgttatatactgtcctaatcccatattgttaaagttttaattttgagttaatgccaccatattcaagcgttataaagtttaaccacttgaaattttactttttctccataattttgtaatttttttattttaaaaaactcattttaaatataaagactcgacctaatcaatataataataaagcaatgtagtactactaggtccatattttgagagtactaagtccaacccataatcccacattagtcccttagcgtgctttgatgtgcccaaatatgagtctaaggactcacttggtacttcatattgtattgtgttagattgtattgtattagtattatttaataccatattatgtttgttgggttttatgccctaaataaaactcttt

SEQ ID NO: 307921 - DNA, 2152 bp, Cannabis indica
caatgtaataagaaaagttttgaaatttttttgggaaatcagcagtgtttctcattactccaattgactttttacaacctattcagcaccttttataaaacaaggaaagtttaatgtgtcaaatatgatgttgataatgcattatgtttctgttaatattttagatatggcatatgttatcccaattttttgcctacttgacgtggcatgtcgacgtaggcaagactgaggccacgtagaatacaacgtgtcaataagtgagcaaagtcaccatgtacaaatcatcaatttacaagggatccaacacactcaggcaagatcaagttatatggaaatggctaaacaggagggtctggtcggaccacaccctggtcggccaaagaagtttatgtgttggccagccccaaccgaagggtaggtcggccagcattggtaaagagcatcaaaggaagcccgattgaatgtcggggtccacaaccatctttttggatggaccacaactaagtttcagttgcagaacaactccaacaacccacgaaagtagggattcaaccccaaactatctacatatctttcagggatattaattagttatatttgtaacttaaatatataataaaagagtgattttttctattttaaaggatatttacttacttaaagattgatcttttgtaagccttaaaactatataaagggcattaggcaaagagaaaagggacctaaattctaagtccctcaagccctagagcactctcactcctctctcacaccacattccctaatcactagacactaagcctattttctcatctcacttgttcagaatctgtcatacatcagttctcatcattataacattcaaagagagccatgcctagaacttacaaggtaaaagcctataatatgcgtgatattatctctaaaattaatacaaataaaaggagagtaggtcattacccgctaaacaagaggtcaaacctctataaattattgtgttaattttattatattcttttacaatttacatgtggtgagtgtcagtcataaataaggctccgttgttagttgaccaaatctgaggtcaacattttggtactttcattgagagtattatttatcatcctgatcaatcatcataacttaatctaggagaaccactacccccacttcctcaggtcttcctcaagatcatatgatggctaatcccaatgttcaagttcctcccaccacagaaggtctcactaatctaacccacaccgttaatctgacgaatcctgcaaagccagccaataccactaatcccgttaatcccgctaacatgatgaatcttaatgatcaacccttagcgcccagattagatccaccaacaacacctcaaactgaaggtcatgttaacacggaacaacctctacagagtgcaactaggactgttccccgttattatgcaggggaaatagggctaggaattggcaaaccaacaattggtatgcctcatgtggatctgggagagaatatcaagctagccaggctcagagaagttgtgggctaggtcacccaaatagaagaaacacatgttgttggttgcgatgctttcatccaacagagacgtaaatttctaaggtggatggacgaccaggcggccatcctctacgcccatcaggcggagttgaactagggtaatagggaggtcggtgacctgataaggcagttcaaaaagagaactgtcggaagaggccaagatctaataagagatcctttataaggaaggcttatcaatagttcaggcaggacctatgggtagcttaataatgggcaaactgtcttaccaagtccgtcatactttcccttgcctaaagacggtcaaatcttgccaaacagaccatacggtaggagtagccagttcctggcaccaagaggtgttaggggatggccagacaatcctaaagaagaagcatcaccaatcggccaaactttgctaatactattcaaagaggagacaaaatgaccattatcaagttttagcttcttaatggtattataagtagctcttttatagaaaaatttagatgttgtttgtctccataacttaaaaactgttttctgtttttaaaaactgaaaaacagtttttaaaaactaatagaggtcgtt

SEQ ID NO: 307922 - DNA, 3779 bp, Cannabis indica
gagtatgaagagaaggattaatgatgactctaatggtggttcttatcagtgccatggatatgggggttttgataacaaagctagaggagatgtaaagaagcgtttagggcctattcaaaaggatcccatttcggtatcatttcgcgggagacttgaaccgagtaataaggtgttcttgaagaggaaaaagaaagattccttgaggaaaacaactgataacaacattaatggctctttggataaggttgtaaagccttcaaagactgtggtttctgaagattcagatgaattccacaggctggttgaaaaagctttctttaagttcattaagaatttgcatgaacacccagctcaacgaagaaaatatttagatcaagaaggggaatctactttgaagtgttgcgtgtgtggcaggtctgtcatctaatcaaatgttcattcatgactctgtagatatgattactttaccagttaatttgattatagtgtttactttgcaatcttagtgagcatctttagctaatgccaattatatatagtatgactttagtataggataacatgacttgaggagtgaagataatgaatttattttaggaaggtggtgactaagaatgctaggatttagagctttattttgcttggttttagaattaagggaaagaatcaggacatcatcaatgttgtaaatctttctcactacagattgttttctcttctttcttgttgaccaagaaagaagacaaagacaagctctaatattagtttcatgcagcatgactcatgttcttcattgtttaaactctaatacaatattggcttagtctgttcaagagaatcgatccaccgagtaaactgatcaaaccaaatcagttggtgtttttctgtttcacaggttcttgaacagtcaacatttctcgatacttaacttagtgcataccttcagctaagctagtaataagctatatttcatcatatctcattctgtaagaatgtttagttagatttttgtgtggtagtaacagtagttatattatcgaggttttctttaacaaaaccgaaaacttgtttggtacttgaaacattgaagaacaatattacctcctcctagacaacttgttaattttctggttaatggttactcttggtttctccactaaatactgcagctccaaagagtttttatgtccattggagctggtaaaacatgctttaacatcacacaaaagggagcttagagcagagcatttggggtttcacaaagcgctttgtgtactattgggttggaacagtgcaacagcccctaatactccttgggttctgcagattttgcctcgtgccgaagccactgctttgagagaggacttaattatctggcctcctgttgtaatcattcaaaatatctccatagctaatcgcaatctagatgaacgggtgattgttagcattcaaatgtatgaagctattcttcgaggtaagtctccttaaatagtgattcattctttcaaatggtaagcatccataaacattgtttatgcttttactgttaaaattattgtttatattataattacagatatgggatttaatggggagaagactaaggtgtttcggggaaaggctgcgaatcagagtattttagtagcgatattcaacgctacactctcgggtttgcaagaagcagaaaggcttcacaagcattatgcagagaacaaacatgggagactcgagctacaacaaaccaactcaactgaccataataacactcaccgagatactcgagaattgacagaatcagaaaagttggaaagtgttttgtatggctacctgggaatcgtagaggatttggataaactcgatttcaacattaagagtcactgtgtggtgagaagcaagaaggaaatccaagccatttcagatgccacactgtgaaccaattgagaagttagttttttttttgggtcaaaatataatatagctatagtttctttaaatgtttttgattttgggggaacaatttattttcctatccttaatgaatattatgtactatgtatgtgtttgaacaatcatcatgaattttcaaaatatatttgacaaagaggattacactcaaacttttttatattagtgaaaactatcacctttcaagataggaaactttaaattataaagaaaaagttagaaaattgagcttaaagctaaaccttagttaagttgagttaaatgtagagataattatttattaggttaaatatattttattattatttttttaattttctatatttattataatttttttttaattttctatatatgcgtgttaatattatatgttttatttctataaaatgaattaaatatattaaaaatataatgtttaaatgatatagagaaaaaatagaaaaattaatgtatgatataatgtaaaagtttgaagtaaaatatataaagtgatgtattttacagaatgtagtagagaaactgttggaaaagctctaatacattgctaggtatgcacgaacgaaaaactcgaacttcaaactttgcgaggatacaaagaaaatatatacataatgatgtgtaattaattttaattagtaattggaaaatagtatattttgaaagtgttttgaaacttagaatttgagaataagagtgattatatgttttaaaaaatttgattggtagaagctgataaatagttgggtggatggagattgattgtgtgtattttttgtatgtaatttgtaagttttcttaaatcattggatccaaactctctctaagccataagttgagagagatgatttgtcatattttatagtatgagagattaagagctaagtaataagtggattaatataaactcaacagtttggaaaatgacatatacattgttacattaataagtggattaatgtaccacatgaaaagtgtgtggttacatccaactcttataaattatatagttactctactcatttattacaaaattattcaaacattcctttctttgtgttttattataatttttgggtcaatttttgaaaatattggtgatatttgaaaaaatttgggttttattgtggtctttgtttactaaagatgatttgaaataatgttttttagaggaattagaaaattcatattaatgaattagatgtagtatttaaaccatcaatgttatcatagaagatgaagaggaatgtacttttgaagatgttgaaggaaaagcataaacaaaagcacaaaatattttgttattctatccttgtgctatatgtgagcagaggtttcattcagtgagcttgtaagtgttcaccggagcctagtgcatcctaaacgcagacgccaatgaacactgtttcactttaaaagatgttgaaagggaaacacaaacagaagcacgagatatttggttattatatacttgccctatctgtcaggctaggtttccttcttaaaggttgtaagtaacctcaggctttgaataacagtaggtctcttggttttttgagctttgatggggatgttagaaaaattaataaaccaagatacaaaatttgtatataaaatagaacacaataatgataaataataatttggtatacatacatgatttctcaaaattgcttgaattttttcacaacccaatagtcttttcttgagctgtaagcaacttgtattgttgagttgtaataactaggatgaagagaagtagaagattatctaatgagtatgatgttagactataatatagtatatgtaaaata

SEQ ID NO: 307923 - DNA, 1880 bp, Cannabis indica
taattaaaaaaaaaaaaaaaaagatatgccgtggctacagtgcacggcatatatgccgtgcactgtagacaaaccctcaatttgcagtcacaattgctgcctccttggagcattaaccacggcatatatgcatttatgccgggtcgttggagctgcccttagtttatatttccaaattacgtggcaagtagaaaataaaccacatatccatggagcccacatggtaaacatgacaaatcaatattagcatatcaaatcttaaaaatgttctaaagacacggggtgtccaagagtgaacaacaattctaaaaggaccgttagaatcgaattcaaactcccttctcgggaggatgagggcttcctgaatcatagcatccgggagctactaaggtatctgacacgtctcccaagaagaagcactgtagatgactgctccagcacaaacgaaaaaataaacctaccccacaaaaagaagatattttttgagatttagtccttactgtcttggagccaattttccctttggaaaatttaccccctgcggaccttttcctcgggctaagaagactcttttccagtcttttcttatacatacagaactgcaattggatccacatgaatgcctgcattttccattgcatttttcatgaaaatcaatatttcttgcattatcttattttgttccttttgttctgccaacttagcctcatggtcagcaaccttttgccttaactcaactagttctgtatagttttctttatcgtatacttcttattcctcttggttggtatcgtcagggtcattggtgtctccttctccttcaacatcaaccctagaagctacctcttcttcttctgaaccctttgggtcattaggttgttgtggacgtgaagtgttccttatgatcaccattgtaccacgaggctatttatgattttcttttttggtaagcttcctacagctctcaataaaagcaacaaaatattgagagagattttcgacaactattaagcaattaatgaatgttagaagagagaattttttacacagtcggggcattaatataatgagccttagtctatgattcattgcattaataagagtgtttattacaaagattttttccgatctcatttttctttacatcattggggtatttataggctcataatggtggtaaaagactaccattgtcgtgagtgtacgaatcatattttgcacaatatcccaaattgtaacttagggcatgattacctatttttgtgatgtatttgaggcgattataagtgtttggtgagatctaatttatctcttgcttatgatttgataactcattatttagtcgtcaatcgatgtatacgacatcgtgaaatcaggaaattatgagtttaacccttaagtacgtctgttcagcgtaaggtgtcaggtgctcttctccatactgtaataaacgcgtatacaataatataaccttaagcagtgcgctacactccgcctgtccttccgtgtcctttaactatctccaggtcgaattcactcacggagagggaaatataagaaatacctttgtctagttaaacctcccagagatgaccaatttattattcttcctttgaaataataagctccgggagtgattaagatgacccatcccgtagcgtgaatcctattgccacttggcttactcctgaactgctacgtattttgagagaaattctaagtaacagtatctatggaaatttgagaaatataactttagcgttattactattaaaattaaatttaaatacatttataaatttaagtatttatggtgtaaattaatattactaaaataaataaataaataaaataggaatgaatgtgattgataaaaaaaa

SEQ ID NO: 307924 - DNA, 2222 bp, Cannabis indica
ttggttgtattaaaaaaaaagttgttaaaaattaagctcagggtcctacttttactattttagaaaatacatggtctattttgtcatttaacaaaacacagggtctaatctgtaacttttgcaaaacacagggtccaaaataatatttaccctacagaagtcgagtgagaaaccccaacttgtggggagttactaccaacctctaggcctatatatataatgataggctagggtttggggaccacttactagagggcttttgagatcgcttcctaatcaccttttgacctcttgagatctctattctttatccctttcttacattttgggttcttcatacttggacgacaccatcttcataatccagtcaccattgactcttcaaacactattctaccaagaataaatgaccaccctttattcttcaaacattgatcaccaccacccttattatcatgtttatgagtatttggtcacccatgagcctttggttcgctgttcccaattgtattgttttccacactcttgagaacataactctagtgtgttgaattgaattattaataaaagacaaagtagacgtagcctcattaccatcgcgacatgagggtgaactactataaatcttagtgtcacctttattttttgcagttttaatttgttaaaatttttcattgtagtcctctgattttttacgatcttaaatcagttgacaaaaacccatgtcaacaacagatgtactttaagtatgacatgacaacctaaaatctaattactcatccaaatataataaaaatactaattaattagttcgattagatatttgattgtattagatttttttacacctcatccaacatccgacccgttccaattttataattgaaaataacatccgatctgatcggatcataatttcatttctaatatttagtggtcggtcgtcataggatcaatcgtttgtaattagattgaatcatcttatgcacacctttacatgcatatttggcacacaaaatgccataatatattgaactttataattttcttgtaataagtaatttttttttttttgaggaaaaggtctcaaccgccaaacaccaagagcaacaagcactctaccatggcgagggcgatgatttattcaattatagcatctactattattaattctaaatacaagtaggattttctagccgccaaattacactttttactgttgtcaaagcaagtttggccaaagtatgggcaacaccattacaagatctattacaatgcacaaaactaacatcttgaagcctattacaaagaccaataatatcatctaaaactagacccaaagaagtaataatagaagcattattttttagtttaatcacaatattcaagcagtcagactcaataataatattttcatacccaaaagagatgcattgaattaatgtgttgcggatagccaaagcttgagccacttcacgaacaaaacaaccatccaaatgccaacttactatagcgatttccaactaatcacaaataaccatacccaagccactacaattgctcaaagaactaatactgacatctatattgattgagaaaaccaagcgggggaggtttccatttcgaaactacctaaagagagggtgtccgagacctgacccaccatcagagacatccaccgccgactgacaggtggatggagaagtcgtcgaagcctatttcttatgaaatgtcccaaggtaatcacggcccaatgctaagtgagcacaagagacaattcaacattattatggactattttattactttgatattttcttgtaataagttaatttattagtatgtatgtggaatataattgtttttctcgatcaatatggaaatttaaagattaaaaaaataaaaaatgatgtaagtgataaataggttttttttttttgtctaaaaaattatagtaatccacacgttttatatttatactttaatcatttgatccaatggaagatgtaaaaattgtgttatatttggcacaaaaaataattttgtggtaaatttacactaaaatttagttttgtgctccaatgcacaattgtaaaatttaatatctaattaattctttattaaaaaaaataaaatctaataactttataatcaattttattattattttaatatgtgagacaataaaaaataggttaattagtaatttttccccctgaact

SEQ ID NO: 307925 - DNA, 2118 bp, Cannabis indica
ttagagagaaaaatttcaataaaaattgaaaatgggaggaaaaatgaagtgagatcaattcgtatcccatgggcttaaatacaaatcaacctcatccgttaggatctagacacgtggaattcaaaaaccaaaggtcatttaatccaacagttatctcaaacaacgcctgcacaaactccgtatggtttgatgacatggcatcttgggaaaataaagaaataaatacaactgccttttcaaaacactcgaaaagataaccaagagttaccgtcatatgactgaacaactcgcatgtccctcataaatagtttttctatttaacaaacaattgtcattgcaaaactaggggcatgtgttatagtgcgaagtttttgcctaaaaatgcgagtacagtctcataaaaaattgacacatggacacagttcccgatagaaaatatgatgtgttaataaatagctctagtagagatgtaaactttcgagaagatgcgaccaagataaagtctaatcgcatactatgtctcgcatagttgtaaaaaataagcaaggtcgagaggagttaatactggttgcgcatatactgattatatgtgatgaccaagtatacctcttctacgattgataaagattgtttttctacataggtttagtctggttgactagtatgatcgacgactcgtcaagaactcgcatgtttcacgctgtcaacacataaaatgtctaactatgcgatcaaagttgaacgcagacattcagacaataggcccaaagtccatacttcgagtataaacaccaaagagcctgcgagctcgtgcgttggaatatgaacaagcaactcgcaacttttcaagtcgcatatgttacttctcttaatttaaaaaaatgatgaaattattcttcatttattctgtaaacatttactttgattaaatactttcatttatttaaaaaaaaaaagaattctacaccgatcagttatgtaatcctaaaggacatttgctttctatataaaggagtgatcaaatcaaataaaccaagctgaaatcattgcaaaagtggactaagcagaccaatctctaactgaaccactataattctcttgttatctctttatttctgcttttgttttgtctatttagtagcctatagttcgagtattcgctattttaagtgaatactcgtgtatatgcaattgagtattctaattttctttgaatactggtgtaaatttagtgttgtctaaattcttacgacaacaattatcgtggggttgggttttttcttattatttttagttgttttatagttaatttttatttgttgtgaggttgatttctcgttgtttttttagttgttttctatctttttgctgaaaattttgtatttttgttattttgaaattgttaaattatattttttgtaaataaaaattctaagttgtaaaattgtaaataaaacataatttatttatttattgaaagaacccctaaatttaatttgctctactgaatttaataaaaataataaatttactttatatttcgtgtaggatattgattttgttaaataaataatttaattttataaaacatgatccaattatgtgttgctccattggttctcgttggcacttaacgactctggaccatccattattacaacacttttgaaacagaagaacaattagtgctataaaaaaacaaccatgaaataataagacatggagccatatcccaaagataagtatactttacatcgcaccaaatttcattattatagataaagtttgttgttacctagaagtggagccaattagttaataagcttccattttaattttgaattttcttagtttatttctactagaagttatatatattatgatttatgatcatgtcatgatgatgaaatgtgacaatattaacatgtgtcacacgtgttgactagtgtatttttactttgtgtgattgttattaagtttaggtttaatttaaaattttactcttagaattttgatatgtactaaattatgtttttttaaaatttcgctaaaaattctccctgaattaatgaaattattgaatttaaagacttttgtctaaatttactaaaagaaagt

SEQ ID NO: 307926 - DNA, 6087 bp, Cannabis indica
agtttagtagtacttaatccaattccctgtggttcgacctcacttgcgtgagatactatttgattgcgtatacttgcgtagcaaacataaaattcgtaacagatacctatatttctaaaggagacaaatttagtcttagtcaatgccctaaaagtaatcttaaaatttaacaaatgcaaaagattccttatgcatcatttgttgggattctaatgtattatcaggtatgtatgcatctaaatattgtgcacattattgggatgttaggtagatatttaagcaaccctaatctggaccattagatagcagccaagagcattatgaggtatcttcagagaacaaaagattacatgctcacatataggaagccagatcatttgaaggtcgtagggtaatctgattctaatttttttggatgccaagatagtagaatgtaacattgaatagtgtcaaaaagaaacttatagcttcttccactacaacataaaaatttgcagcatgttatgaggcatcaaattagggaatatggctgagaaactttatcactaggttgcatattttggagaatgtagaaagaccacgcaatttattttgtgacaataattcaacaatactatattccaataacaacaggagcatatccaagtcaaagcatcttgacataaagttcctagttgtgaaagataaaatgtaggtggatagatatccatatagcacattgggacaaattccatgatagcggatcctctcacaaaaggattaccacccaagttctttcatgggaacactgcccatatgggtgttttattgtttgaggatatcatgattttgtgggagtttgtattttatttgctttatgtttgtttaagacatttatgtatttagtttttttcttattagaaataaaatttttagtttattcactccattttgttatgtttaagtctaacctcactttggtttaggactagatggaaataggcatgctcagttcacattgcatgtaatttctatgctacacattcatgattgatctatgtcatttagttatattgtatatgtgaccattgatgggttttgtcatgattaatatgatgaaaattactttgatcctatataagtatagttgatggacgagattgtcatgaatatacctttacacaataacaaattttgagctcatgaggttatacatttataaggtaacatgtgttgtccaagtgaaagattgttggattaaaatctaatttgtgggcacatatgtataatgtatatactattataaagtgtgatataaaattaagtgactaattatgttaagggtatcaaaaggttattaaattatcatagaaatattgtgtaaatatcattagttaatttacaatttattgaggagttgaattataaatactcaaaactcattctataatgagcctataaataggtagtggtccccaagaaacacaaaggttcttgtattctccctttccccattagagaaaatactttaaagaaataatatattcttggaagatcataataaccttctatgcagtctctaacaatgacttcaggttagtgtttctgctcatttttattcatctttcttcttcttcaatttagcaaaggtattttatgcgcccgctgccatatggaaatggcagtgctctctaatttttggagagcactgccacaagagaatggcaatggccgctacatacaaagcactatggggaaatttttcaaatgttttccctcaacaccaaggagtgcaacacaagtgaaagaaaccatttcccaccaaggaacaagcttggccgaccactgccatctttgtggcacaataagtggcattggtcggccatgaagaaggggagtgatatttcttgccaaaattgcattttcaccaataatatttcaaaaccaagtgaaagaagccactaagtggtgtggaaaccacttggttgaccactgccgcacttttgggacaattggtaaaaattggtggcaatggtcggccatcacctaggatgaggagtttcattggccaaattttatttccaacatctatgtatcaaatacaagtgagaaaagtcactcaaggcttcataaaccccttatgcaaccactatcacttttttgacaaaaatggtggtcattctctcctaagaaattggcaaaaaactaatgtgaccaaagtggttttttagcatccatatgactgaaataaacaagaaacaccatccatggcttcccataatccatggtcgattactgccactttttgacccgaactagtggcagtggtctcccgttagggtttcaggcatcaaaatgaggttttggaatcccaagacccccaaaatatgactcatcatcagaaaataagtcagaacacaccctgaggggtctgagaactagcctggctgagcactaaccatttggccatgttagtgctcgcaactgggacaaaacaacataaaaactacccttaataaaacgaacataatctctcaatttttttatccaaatgacttggttcaacttgcattagaaagataattttaagagggatctaattgtggctcaaagtcatagcccaattctaaagttatcgggtccaaaatttgctcacaaggtagactggtattctttactcgggaattgtgtagtgtaattaagtgaggagtgttggaggacactgccacaacccatgtggcattatatgaaaacaggggcaacccaaaacacatgttttaagcacttatcactaatgtcatgaattccaagccgagaggtgacatcctttgtcactccatttcaaattagtgcatccttagccgaaaataaccatttccccaatgtttgtgggattttggcctagaaacaaggggatttttgtcgatattatttattaaagatgatatacgagatttgttagtgagacaccccaacatgtaagggataactaactaaccctacaacctaaataagtagaataagaggctgaagtgaagggaccttctcttttggacttacttgacgattgccaagaacaccatatcccttgcttcatattttccttgagtccaccatactctttcgacacttaaatctcaaacaccattgatatacatcttttttttttcctactttattggattattgttcccaagaaccttacaactaccaactttgatcaaatttatgataattgagtctcccatgagtcttctgttcataggtctcgattaagatttcacctagaaatccttcgttgtatttttatccatactctcttgagaacataactttgatatgttagatttaatcaataaaaacaaaagcaaacatagccgcattaccattgcgacatggggggaactataaatcatttgtgttcattttatttattacagttttattcagtcaaattaattcatcgcaattttctttatttttactatcttcttagatcagttgacaaaaaatggcatcaataatttggtgctttcattgataggattagagaggactctcaatacagtttggtgctttcattgagagtgttgcagtgaaaatttgattgtttcccctttgggaaactcattagtttacttttctcacaacaatggtgttgagtaccaggaggactaattttgaggaggatgctgaagtcccaagggggaaagttaatcaaccccaaagtgaaggaacttttgtcactccataaccacatggagagggaacctttaggtgtcaagaaaagcacgccatgccacctatgccagaagatgaaggacaagtccaagattgtgagagttcttcatcacaatctagagagcgcccaccaattaaattcatgactctgcatgatgtgctccaagaaaatgaggccttacgtgtccagttggcagaaagcctacgccgcaacaaagagctcgaagagctagcccaaaggcttagggatcaatctcctccaccaagagatccttctcctcctaggagaagagggggtgcccaacaagagaacatgcccctttgagtaatccaacaaggagaggggaccaccaagctttgtcaaacattggagtacatgccagacatacatatacaatccatgcagcattgcatggagatggccatggcgctctggcccaccatggaggtacccataaccaagccaatgatgctcttcgcaatactaatttgtcaatacccaacattggagtacgtactcgacacactcatgccactcatgcaccattgtatggagatgtcccacatggtaaacaaaatttgtctccaaggccactccttagagacatgtgtgtggatagaaaagaaaaaagataaccctcgaatttaaagagaaagagaggatgtcctatgggtagttgtaccacatatgaccccatgaggaatcaaggaggatccaatccacataattttcctcctatgcatgtatcctaaggaaatatggaatataaaaacctccttagaggtgaaatgggagttcatgccaaaaatgatgtaaatcatacattgggtaatcaaaactgtgccactgatggcagtgatgacctatctccgcgaccacctcatgtttcaaggaatatagggctcgacgtcgaggaaaaaggggataaccctcaccgagaaaggcaacaacctactcaagaggtgagtaatccttcaaggtcacaagctaccaccacatattcctaactgggggcacaaagaaaccatcaataaactttcctcaaagatagcgacagtaccgactcgctaaattactcgataagtatttttgacgacattcaatcttggtcctatcaagcacattatattaatcctcaataccataggaaaagaccaagtgaaaatatatacaaggggcatccccaaagagaagatccccatctaacacatccttatgttggtagccgcaccaacattcctcctcattaaggagccaatcctcatgttggtaactgcgccaacatccatccttttcaaggagccaatcctcatgttggtaaccacactaacatttcttcttttcaaggagccaatctacatgttggtaaccatttaaaaatcctctccctataggatttgattatggtaaaccaaacaaaaatcgctgcataacaatgcttgaggaacgactccatcaattcttgaataataataaaatgaatgagtatgaatctcatgaagagacagagtcctttgtgccttatatctttaaattaccttacccttaagagtttgagatgccaactagaaccaagtatgatgggacaactgatccttgggtccacattagtgatttcaatactctcatgcaagcacatcaagtggttagagatttgaaatgtgtgttatttcttgctaccttatttggagctacattctcgtggttgaaaaagtttaaaagacactccatagtgtcatgggaacaactctcaaatgctttcaaaaaggagttccaagccgcgagaactgaaaagcttaaatgttcctccttggccaacatgagacaatttttaggagaaagtttgaaggcctacatcaattgtttcaacatcaaagctactaaaactcatggcatcgatgatagtgtaagactgatggcattggtggtggttatcgcccataggtctgtattttagaacaacgttcaaggaaagagttgcgcaccattgacaattcatgaagcgggcacaaaaatgcatcaacattgaagaggcaaggatagtgaacaacctccgtctccaatccttgcatccaactgaagccacattagtactgccaaaacttgctaatgccactatggttgctaactctttaaacaataacaagagataaggcatagatggtgatgaccaaagtcccaagaagagtaggagtgatggaccttatcaccctatgtatttaatttacaccgagttgatagaaacccaagaggccatcgatatggtgaatgagcatcgagtgccattccaagtaggggtgggcatccgatccaatccaaccttttttttctcatctgatccaatccaattagacctcaaaatccaa

SEQ ID NO: 307927 - DNA, 3230 bp, Cannabis indica
tgagtttaaagtgagagagtagcgagagaagctcttcgaagctccattgtaatcaatatacataaaataaaagaaagaaaaaaagttagagtgagatcgagatcgagagaaaaacatagagatattcaaagaatgaaacactcaaattatcaacaaaaagttttgtggtttgaaatctaaagaatacttgtaattatttgttgattatagtgaagatcaagctactttgaagtaaacttgacagagacatagccttatgtcatcgatctatttttgtttgatattttcaacaataatatctttgatttgtgttttgtatgtgtgaatttgttcttgatttcgtgtgtgttttgtgtgaattttggttctgcaaccctagggttatctctgcgagagagaaagagtttcgagattgaatctcgaacattctgagtagattactcaatttttatgattttgtttttcttgcttattgggctggaccgagtctttttcagaccctaactttttatttttaccaattagtcatggatgcatgattagtttgcgaaaatagcataatttatctttgtgtattgtaattgtgtatcttagtgctagatagctgcagatttctacagtggtatcagagctagtttttttttcacaagaattaagatacaaattgatacaaataataagcaagactagaaattaataaccaagaacatgagaaagttgatcctcaacaacatgaggaattgaatttgcaagaagatgattttgacattagagatttagtggatgtgccattaaatgttcaacctgagattcttaaccctatctctgatttaaattctgaaagatttaatatgagtagtgttaaaactaatattgaaaaatttcatggttgtggtgattataagatttggaggaagatcaaatccttgctagaacaacagaagttgttaagggtactaaaagaacgtattgaatggcctaagaacacattcatgatacaacaagaagaatactgggagacaacaactggaatcatcatcttcaatcttaatggtgcaatcatcagattggtggacaaagaggaaactccaattgggatatggagaaagctggaagagcagttccagcaaaaatttttgaccaacaagatctttcttaaaaaaagaatctttggcttcaagattaacagattaaagaatctagaacaaaatctaggtgagttcctaaagatgcatatagaattggctaactctgggcagaatattaatgaagccctaagtgatgagaactaggctataataatcttaaactcacagccagattcctacagagaagcaaagattgctattaaatatggaagaacattattaaccctagatgaagttagttctgctctaaaatctaagaatcttgaattaaagaatgacaaactaggtagttctaatggagaactaaattgagcagaggaaggctttatcacaataaaccatgaataacataggaagaagtcatagtataggtcctaataaaggtggaaaacaaggcagatgcaaatcacaatcaagaggatcaaagaatctaaatggttgctaccgttgtggaaagtcatcacacttcaaaagggatttctactattggaagaaaaataacaaaaacaaaccaaatgaacaagatagtgatgcaaactagggagagaattgctttttaaaatagaaagaaaaacagcagcaagccaatctaagtgatggctatgaaagtgaagaagtttatattgttgctcctaattttaagaatgaatggattcttaattcaggttactgttcacatgactaattataaattcttgcttactgactttagttaatctaaaggtgggaagatgactcttgaaaataatcaaacatgccatattgaaggttcgggtattgtaaattttagaatatttgattgtgtggtaaggtctttaactggggtaggacttgtacctaactaaaccagaaatttaatatctataagtgtattaaatggccttggtgttgtgagtaagattgaaacatgtactatgaaactaagcaagagttctatgataataatgaaatgctacaaaagaggaagtctttactacttacaaggggaaccagtttcaaattgccacaatacaacaacaaactcacctgaggattctaaagctaccctatggcacaaaaagctaggacacatcaataaaagagatttgcaactaatttgtgaacactgtatagacttaaatttaaagttaggacacataagtctaaagatatactcgaatatgttcattctgatttatggggtccaaaaaaggtatctacacacggggttgtagttatttcttgtctatagttgatgattactctaggaaggtttgggtgtttcttttaaaacataaaaatgatgtttttgttgagttttgggattggaaagttttgattaaaaatataactaacaaaaaggtcaagactttaagaacaaataattgcctggagttttgcaatgatatgtttgacacatattgcggatgtattcaaaggcacatgactgttaggctgacaccacaatagaatgatgtggcagaaagaatgagcaggaaaatcttgaacaaggcaaggtgcatgttgtttcaagctggactagctactggtttctagagagaggttgttcttacaatagcatacttgatcaacaaatatccataaagtgttgtgaagtttaaaactccagaagagaggtgaactggtaaaccaccaggcttgtcacatttgagagtttatggttgtgcaggttatgcacgtcaaagcattagaaagttagagcgtagagctctaaaatgtgtgtttctcgggtatccgaaaggtactaaaggctaccgattatgggtaagagagaaacctggacttaaaactataaatagtatatatatataatttttaatgaaactatttttgcatgtgtttctactaaccctactattttaagaaatagcactagtactaaccttgtaagaaatacagtaagcttttgtgatagtctataataccccatttatacatacatattggtaattgacatattaagtgtgtgatgcaattgtattattattgttgttgttattaagattacaacgaagtgtcaatgacaacgtgacggtaagatcactttagttttttattgttttacaagccaatgacaacggt

SEQ ID NO: 307928 - DNA, 1610 bp, Cannabis indica
aaaaattaatattctataccatatcatgacatgaacttatctaatttcggacccacacttgaacctggagtcgatcccgaacccgagtatggaccccggacccagacttgggctggggtccgggtcctagctagtctgggtcgtgttcagggttcaggtcatgattcgggttcggagtccaagtttagttcaggttaggtccgggttcgagtttggatctaacgatggtctgagatctaggtctaggtccgaaaggttcgggtcgaggttggggtcctggaccttgaacccgaccgaaaataggatccgaaccccaaaacgacccctattagtttttaaaagttgctttctatttttagaaattgaaaacaatttttaaattataaagtgaaacaaccccattgtaatgaaacaaaatgggacttattcatctctaataatttcttctattcattccttcacttcacacacacacacaaaaaaaacttttaactgttaagacttaagactttgtaatgggcctaaagagctcgtagcccgttttagttttgggtctttatcttttaaggcccgtaaagttgcggctgcaagtccgttatgctagaaactgtcgcatcggatcactcagtcaacataggagggttttctattctttcacagaccgtgttcctcttctcgcttcagggttttactacacctccaacattttctggttaggaaaattttctcattttaatttcggaaatgctatttgatttggatttacatatatatatatatacatacgtgtgtttgtgtttttggctaaactttagattggtttgtgtcaggtggatgatctgttgcgaaatatcaagaggaagaggacaatggcaaatcaagcagctaccgctttcagtggaaatttgaaggcaatgtcttcttcttcttctttctctttttttttcttagtgaagctatttcaattacaaaaattcttattattgggaccacaccacctgtttgtgaaattgactgaacgaacatttttcttctttgacatgtctattgcaaacccttctaatcaaattctgcttgagtctcatatttcaaggattttttaattctagatggttgtcttgacaattatttacagctactattatcatagctttattttaactgaatatgtatgatgctttttcagtggaattgatctctactttgtgtaacgtatttgtagtatgtaatggaaagttgagtttcaagtttgattcttttttaaataatttgaagtgtgctttattatttatgcagaaagcacttgctggactgagacgtattgatctagatggtctgagatggagagtgtttgatgctaaaggccaggtttggatacactgtttttatataataagtcttgacttggtattttatgtgctatatgtatttctttttctctttaagcatttcaaattggaagtaaattaggtgaaatttgatgttctttgaatttataacacaataatgattcgatgcattgattagtctgggaagagggtagatttaatccgatggtggtggagttggtttttttactgctgattcgttgatttgcctgtgttttttca

SEQ ID NO: 307929 - DNA, 1387 bp, Cannabis indica
attttttataatataaatttttgttgtacactaataaaaaactccttatttatatatgtataaatgactatggtacaaaaatatcagaatatataaccaaaaaaaaaagttacattgtgtttatttaatcaattattctacacctacacatgctctatctttatagaacatatgctctcatatatacataaacaaatcattccccgtattaaaaaagaagaaaaatcccaacatatttacattaattaagtacatttggatccaataatcaacctccaccgcagccgccgccaccgcaaccaccgccaccacaatcaccaccgccgccaaaatcgccaccaccatcatccataacagcagcagctgctatagcactaaaagcaactaccgcagccgctgacattacaaccatgccaccatctttaccaccaccgccatcaccgctgttgccgccgccataaccatattcgcctccgtcctccgtacatccagtgccataagaattataacctcttttgtttttcttgcttgaattatatggctttgatgagtttcttctatctttctttttactcttcttctcatctactaacacttcttctctgctcaaaaagcaacccataatagtctcccaaaaatcgtctcttatatttccttgtgatctgctcctttgtgtttgtgtaactatctataagaaacacacatatatatatatatattatatgctaatgttgagaaaggagctaggtagctagtagtatatataatatgtgaacacactaattaaattagattagttttattgatgatccaattaattgaacataagtaatggtgacgattagattagtgagaacattaggcacatgagtaggaatatttatataagtaatacagaagtacaatattattgactgacttttttcctaccaagtaggtgcttgacacgaattcacctatggcgactttgactatttcaaactacgaatatatctctttcccacaataattgctttattcttttaagacttacttatcttttggactaaggtcctcaatctcaaattttcgtatttaaaaccccaacctatttaaaaaaactataaaattgtgcgtctttttttacattttaattcaatttttctattaaaataataacatgataaggacgaaattcctaacatattcttctcactttttgcacttatacgtctcaaattttaatatttattttcttgataaaaaattatatctttaaaaataaaatctatattatacaaaaatttgagggaaatttacatggtatattaacttttgttatttttttacaaaaatattgttaggcggtattttttacttttttattatatttttttataagtttcat

SEQ ID NO: 307930 - DNA, 870 bp, Cannabis indica
gacatttcatcaaacaccttaagggcactctccaaatacccaaatttcgaataaaacccaagcaaactattactaacaaacacatccttctcaaacccagatttcaaaacaaggctatgaacaactctcaatcccaattgaacatcacagaggccacaataggccttcaaaactaaagggtgggtaaaactatccggcaaaaacccctctcgccgcatggaacggtagaattcgagggcgtcttggaagcaatcgacggataccaagccttggatcatggtattccaaagataaacattgggttgtttgatttggtggaagaggagtcgagggtaacgagtagtgtttttttcgaaaccaaagctacggtggagtaagtggttgaggagataagtgtgttggtcaaggccgagacggaggagaaaggcgtggacatgtttgagttgattgaaggaggtgaatcgttgaaggagacgagtcttgatctttacagaaatggataatgaagaagagcctccgattgagagactgctcatacccttattcccgccaaaaatgttccaaatgtttagtttagttagttagttcaattatccaacggtcatttagtttttattttgaaaagtacttcagatattattgaatgatttttatgtattgatgcaccctctatttgtttcggcatcccgaaaaaaattttagtctaattttttttatattcatatacgttataactatttaagatatcttacaaaattttaaaaaattcggaataatttacaatatagaaaacaatgttcaaacagtctattttacacgcgtataaaataaaatagtcacgtgtgcaacacactacttgaacgcagtttt

SEQ ID NO: 307931 - DNA, 2774 bp, Cannabis indica
attaaaagaattaagaacaaatgatatagagcacatagaaaattggataaagaattaaatcatattaaaactataaatagatgtcaaacaatctccatcaacaccctaataactatttagctattcatgttcattgtaaacaatctacacacattaaataagagcataaaaagaaaacagaagagaagaaattgttgaaaaactctgttgaaaagccttctagttcacttcttttctctagttttcgtactccctaattatttgatgaaaaatatgaaagtccactaatttttatagtggaaaaaggataaaaaaaagataaaaaaaaatcaacttttcgggcaggaccctcgacactagcatctagtgttgaggtattagactttaactttttggcaggaagcttactaataattttttggccatcattctttcaatattgctcagaattggataattcaagatgtattagaaagctgaaagagagatctagaacttttgtgttttaactttctccaaaatctgatcagaacatagttgaattcaggtttgaagtttcagctttattttcatgcaattttttttttgttttatagatcactgttttctaaaatttgaccaatttatacattccaattgtcaaaacttgaaactaaagaaaacaagcgtaattctattccaaaaagtaacaatgaaaaagaaaattagctctaaaaatgacacatataataggctaataatagcataacaagactcaagacaaaaaacttgggtgtctttgctctcaatgaaaacaccaaaatattgaccacatttttagccaatgacaatgagtttaattaaagtgataagaataattaaataacaaaaaataaagagtataaagtaaaaaaattaccagatttatagaggtttgaccctctatatttggtaataaattatcccctttttgttatattaacttgtaagaggagtgagcaagaataccctgatctttctcgaaagctcttacaataatctttgagtatttcactattagttcgaggtttcactcttgagtcttttctctctgaatcaattcgtcctcttgaatagtgagattaaataactttttacagggactaattacatgaagaatggtttccctcaatctataacaaataaaataggaaattaacatgtttccataattacaaaaaagagattggaaaatctaagctaatttccttaattctctaaagataagaattaattccacaaatgtagggattgttttcgtgacatgcaagcttggaaataacaatgtccttctctgaaattgccaactcatatcccctagtcggtgcatgcgagttacttacgtgatcaggctggttggatgtccactagtgaccttgttcagaaatcctaccattcatgtatgactttatgcttcatctcaatttgcatatcctgctaggagtataatcatccgcccatgttatagaatgtgagacacgtgtcacttagtcagatgccacgtcatggtgcaaaaattaggataacaattgatctttccagatttgtgatgattggccccatctcaaatgatcttcccaaattagtgacgctcgggctcgctttgaatgatttccacagctccattcttatcggtcattcttcatctctgaccgtctctttctttccgcctgtgacttcaatggtgtctccagttcactccaactttcttccaccatctattccatctgttgttcattttttgatggtctcggcctcctttagttcagctccgcccataagtttactgtcgctgtcctctttcttttcagctccgacctcagctcaagtaggttcctttgtctttccgctagctagttcactcttaagctttggtgttcaatggtaacttttcctttcttggaaaccaagccctttcttgtggcatatatgatcgaccttctcatgatgattgcaatctgtatcatctgggaataagagatcacccaaaccatctcattgcttcctttctcttgactggacaaaaaaattctagtcatggaggcacgcggctttgattagtatcattgccaagaacaaaactccttttattgacaacactatatccttgtcttccacttacctgatccatttcgttctgcttgggatcaatgcaacaatatggttatggcatggattcttcaatttgtgtctcgtgagatcactgatagcatcgtgtttaaagattcagctcacaaaatgtggagaacacttcatgatccctcatcattgagcgaatatcaatcacgacctcttcctctgccataaacaaagaataaatttgagttaatattgatatgaaattcttaatttttgtatcagtagtaatttgggaagaaatgagtagcaacaagtggcttggaagcttgatccaacgctctacattgcatgttggagtggacttatacctatgacacgaaatacatgacggaagaaaccattatttaaaaaaatagttaaatactactttagaacttcgtgttttacaaaaattacagattgaaatttttatttttttaaataaaaattcaaatcttatatttttcaaaattgtacaaaataagccttgcatatcattttcatcaaattaaaacttattaataacctaaaaaaataaattgttaaaaattgaattcatgatatattttaaggtgattctacaatgcacccccttaaaaggaatgtactgatgcaccctctacttatttcggcatcca

SEQ ID NO: 307932 - DNA, 3979 bp, Cannabis indica
agtcatctgaaatatttttaagttcaaatttttcctcatgatcatgtacgttatagttatttaagacatcttaacaaaattttaaaaaatttgaaaaagtttaacacgccgaaaattatgttcaaacagtatgttgcacgcataactattttattttatacgcgtgtaaaatagactgtttgaacattgttttctatattgtaaattattctgaatttttcaaaattttgtaggatatcttaaatatctataacgtacatgaatataaaaaaaaattagtctaaaaaatttttttggatgacgaaataaattaagagtgcatcagtacatcatttttaagggagtgcattatagaatcacccttttataatttataatttatttttatattttttttagtatattaatatttttttatgatttttaaattatattttgaataataattgatataaatattttaatttttatatagtttaatatttttatacattaaatttttattaataaactttattttttttataaaaacattctcccttaacgagatgaaaatggggagcactccctactaattttccgctctacgtacatccctttattaaaatttattcttctcaatattacagaatgctattttcaaaaagaatatcttcataaattaatactttactaattaatctacttaattactatatcattactcttaattaattaacacgtattattatactctattttctatacaatattttatatataatattatatatttgagaaatgaggtgaaacaatcaagcttcactatagtagttcatgttcaaatctcaattttaaagacaccgaaggcataaaataatggtaaggagggcaaaaattaaaacaaaacacgactcttttccacccaacgggttactctggtgaggcaagagaatgatctacaacaagatgagccggcgatgcaaacctacgcaattaccattgatcttagattaattaactatatacatataataattcggttaaaccagaaactaagaagtccaacctcacaaaacaagagaacatttcacaaaatctcctccagtagtagtgttacgtacctctagtcatacaaaaaattgcaccgtgcaagtggaaaacaatggtgcatagcatacacgtaacttgactgtatgtaggtggcaccaccatgtaatttacaaaattttccagagtttcccggctacgtgttcttgtttaggttctagcattttgtggagccttgcggaaaagagggttttccaccaaatctttagctgaaggccgcttaattggatcagggtccaccatggcctgatatatttaatgaattgtaagataaaaatgccctgaacttgcaatatttaagatacccaaaacaatatccttgctgacagaacactaccagatttagaccaataacttattatcacatggcaatacgaacctaatgagtactgaaccatatgaatatgataatatgggtcagcttaagttctgtaaactaattaatgctactgtttacattggtaatcagtgtttaggtgcattaggctactttatgttttactttactactgttaaaactaatgtagtttttggttggagataataaaatggagtgaaatggaaaagaaataatttttattctattattttatttgattgcattttaaaatgttagaatattattctaatggaatgattttttcattattgtagtagaataacttccattttaaaatagagagaaagactattttaaggcaagatgagaaaaaagtaaataattcttttatcatatcttttatacgttttaatttaattcaattgcattcccatttctattttcaacctcattcctattatattttcatttcttctaaccaaatgctatctcagtcaaacaaagcacaataacttcgttagtaagttttaacttgccaatagagagtttcaattcctacgttgcaataaaagtaataaacaaaagacagtatcctaatttgacatggcaaggaagggaacagtcaaattttctgtaagaaatgcataaagatcatcaattataaggagataacatggtagtatggtaccttaattaagttctgcaagtgcaatgaacgaccagggaggagtggcaattttccctccttgacatttagacgtcctgattctggcaaagatgaccctcttattaactccaacatacaaattcccaaagagaagatatcaaccttctcaagatgatcatatctctcgtttaagacttcttgaggcatataacgtgcatcaccctcctcaattgggaggctcttatcaataagtgttgcgcacccaaaatcaccaagcttatatactccattcttgacatatatattatcaggctttacatctagatgaactattcctctctcgtgaataaactgcaaagcctttgcaatctgtatagttttacatatatcagaaatgatacagaataacataattttttctcaaatcaactgcaacagtgggtgccaaattaatatataaacctgatgcacggcctccaaaacttctgtctccgataacagttggtgagatccattgatggataagctgcaatcacagagctccatttgaatgtaaagctgctcattttcaaaccaagaagagtagtatccaacaatgttttcatgagaccctgcagagtaaaagaagtttaaacaccaaacaaaatgtgatatccactgcatcaaacatgcaccatatgacaagcagagaagcaaatgtaagacgaacctaaagctcccaaacattgaacttccattaaagctttcctcctacaagagtgcaaaagtgattctattagcaattagcagattcttaacctaatgactgacagatacatccaagaacatacaaaacaacctttcactgtcctgatgcagttgctttatgctatgtttcacagcatacagacagccatcaattctctttaagactttgagtacacgactgaagttcccactaccaatgaactggaagaaaagagaaattttgctgattaaccaacataagataatcacagaaatttaacaaagaactgagtcagctaaagtctataaattagtggagatagggtagatacctcaatctcatggaaatcagtgtgataacgtgaaagaccatttcccccaatagttgcagcaaataaatctgcttaaatcaaggataatgttattgaaacaacaatatattaactgaacattcaacagcaacaaaacttcacatcctttgaggaaataaaataaaggtctctaccagattgtttatagtgacaaagtagcctgaaagatattattaacagctttacctgcacactttgatctttggttgccaaaaggatccatgcccattcctgaagcagcttttatgtatggattttttatacaaggagggggcataacccggcaccgtaaagcaactgcagattgggatacgtagctttgaaccctctttgttccagatgctgtaatattttccatctttacttcgtctacatcacaatcatcattttcaaattccaccatctcttgaatgtcggacaaggtgggactgagtggatttaatgaaaaatcatctgtagaaatttttggtagtcttagtcttagtcacacaaataataaggaagagcatacacggttataacaatggtcttagccatttcacaaattatactaccaggaaaaaaaaaatcatcttttcttctaggactaaagaaaaagatacaatttttcatctcgtctgctttagtcagttgcaaaaagtttaaacaaacaaacaaacaaacagaaaatatgaattacgtcttgcgcatgttaactaaaaaaaatgttgaagcaaaattagataaatgaaagttcgaattgtgccggtatgtcatatgataacttgcttaggctaacaaggtcat

SEQ ID NO: 307933 - DNA, 658 bp, Cannabis indica
aaaaaaaaaagaagaagaagaaggagaaaaaagaaaccgataaaaaatcgaccaaaacgtcaaacagagtcttatttccgataataattaaaatccgaaaaggagaaaactccaacactagaacccaccaaaatccaaaaatcaaattcagttaattaatcctccaacatttttgaagaaatatatatttagaatgaaaggaaaaaatgtaccttggaaagttgggttggtgaaggtggagatggaatcaagttgagcagacctatctgctctgtcggatgaggcctcagacaagcgagacgagactcttcccttcagacctcttctccttctccgacgaccgttggccttcttagaggaccttaatctccctccaacacacccatgaggcgttgaaacacacgctcccatttccttctctccctctctctcaggatatcagaggctgatcacccctgtcacaacatctccactataattctagagagagaaagccgtgttctcaggaggagagagatccaacagcagagagttttaaggtaatattgattttgattctgatattgtttatctctgtaatttgtcttttgtatttgcctctctcagaagcgtaagttttttttttttttcctttttctctttcaattatttggttgga

SEQ ID NO: 307934 - DNA, 2797 bp, Cannabis indica
acaatacttgttgtgactaaaactaaattagtgacaacttataactaaatactatgttttagtcacaagtaaaattttgttgtgactaaaagtcacatttagtcacaaaaaatattatgttgtgactaaaaagttatcactaaaagtaacagttttttgtagtgaaataaattctaacatatattataatataactaaaacaatgtgagatttgcctcaaatatctatttttgtaatataaatactctcatctggcaaacaagttactatcttagaggtatcagtgactatattaagtaactagttaccatcttaaaagtaaccagtaacaatcattaaagttaccaagtaatgtgctgcattaagctaatttaacttttttttttttaaatagaaccctcattaatcaacaataaagatcctcactaatttggtgaacaatacattgttcaattacatccaaagataaatgagaaaaactcatcctcaatgctaagttttgccaaaaaaaaaaaaagggtcacaatattgatcctctcaagggaaacaaaatgacataatttgataaacaaacataaaatgatggcaccgtttgatcgagtgctttcgaaatggcaagcaattgagctttaaggaggttctacgtaccgagatgaaattcgatgtacgaaacaacgaaccaattagaagcctaagtcgttccgaacaacagcaccaaaccctagcctagccgcccatgcatggttttgctaagggtacgtacgtagcaaccatatttcatttcaacgtaccaactagatatgatcatttcaaacctctaatagtaaattaaatattcaataatcttacaataaatataacattattattgagtgggttacccaaaagaactgagtttattactgagtgagctagttttctttgctcttgcacataaatatataataaaaaataacaaactttttattataatgtaatttaaatggtatgtatatataggattgaaatcttgaaattcttcttatgtattggtacaatgtttgctgtcaacattttgatgtgaaaattatggtacgaagtatccgagtcacaaaaataatacaataattgagtattgtcttgacatgaattgtaaaattaaaaataaaattttacaatataatatatattttttcttatttaaaagctttttaatatatttggatatcactaaaaaatcttttgtcattaaattatgaatcattagataaattatttaaattttaaaaatagcttctcataaaatccttttagtataaaagctacacaattcttagtatagcttcttccaaaagacttctgaattagaaaatgacttattttttatccaaacactcttcaaaatgtcttttaatctagaagctaaaaaaaggctcaatgaagctaaacaaaagtataataataaacaatccttcatcattaaaaaaatactaaattatttaaatttactgtataaaaaattatatggttaatgtagattattcctttaatactgattttatttaatcagttaattaataattacttttttttaagaaaatgtatacatttatgtaaaatgcttttttttttaataagaaagcatccaaacattttcttttttttttatttcccattacaaaagcatttacaacaacaataatgatataagcaaaatattgttagaacctgttaaattcttattaacaacaatattatatattgatatgattaaaattagcatttaaaatacttgttgtatgcttgttttcgatatttaaacatgtgtttggttaattaaattatgattttaacatcttataataccccaaatttttttacaaatttgtgtaaaatatcctcttgagacattacatgcattttactaaaatgatttttttttttatcaatatatgaaaatactaaaaacacaaataataataaaaccaattactattattataatagtaccttttatttatttaatgatgaaggatatacattacaaattttaattatgaaaacaacaacattgagcataatcccccttgaattgatatgtacattttcctccatttttgtagcctcgcccaatgcaaatggcattgcaattgaatccatcatgatcataacaataactaatgcactttgttggcaaatttattgcacttccaacctctgcaattcatttacccatcatattaataaacattttagtattaaatatttaaatatgaaataataaaaacaaatcacaatatatatggggaaacttacaaaaatattagaatttgagtgaatttttacaaaaatactgtcacacgaaatctttttcaaaaatactgtgtttttatataaaacactagtaaaacacaaagcagaacaactcaaaataacagtgaaacaactaaaaaacaccaatgaaacttaacactatgaaacttaattaaaaaacacagtaaaaatgtaaaaaatttttttgtaaaaaaataataaaaattagtataccatatattacactcttttaaattaaggacccaaaagtttaaatcatcttaattaactcacattttctcaggcatgtacctgcattcaatataaacatacataatacatactctaacatattttaaaacataaatcaattctaattaaatatataataatataaaaacatgattattaaaaaaaaaaaaacggaacaaatccaaatgcatacatacatccctataaaaagaaaaaggaaaaaaaagtaaacaaaatccaaatacatattttt

SEQ ID NO: 307935 - DNA, 4571 bp, Cannabis indica
ccaaggtattaggcaaaccaagataagtactattttcagaagcttcttccatttgtagaacattgcaaagatccaatcgacttggccccaccacattggccctaaagaagatattagattttaccaaattaacttgttgatctgatgcctccttaaacttatgaagcaactccaaaactctcgtagcatattcaggggaagctttaacaaaaaaaaaatataaatatcatcagtaaaaaacatatgagagataacaagagcttgcttgcaaactttgattcctctaatccacttttgagattcacagacttgaatcaatgaggaaagaccctcggcaaatattataaataaatatagagacaatggatctccttgtctgattctatgagttggaaagataggccccatctctctaccactgtgtacaatagtataagacactgaaatgacacaagtaagaatcaaatcaacccatctcttcatgaatcctatttgaagcaaaattgcatgaagataaccccattccaccctgtcatatgcgttactcatatccaacttaagagccatactaccctcccgacctcttttttttcttttcaaatagtgcatgacttcaaaagagaccatgatattgtcagagattagatgacctggaataaacgcactttaagtatcagacattataacatccaacaaccctttcattctattagcaatcaccttattaatcactttgaccaacacattataccaaaaaataggtcgcgaatccccaatcacagaagggttcttcttcttgggaatgagaactacattattagtttcattaagaccctctgagagtacaccacaatcaaaaaaatctcgaaccatcctcaccatatcatgaccaactatctcccaatgtttttggaaaaaagcaagattcataccatccggtcccgagctcttgtctaagtgcatttggaacagagcatgcttcacttcttctccaacacaggcttgagcaactctaaatttgagcagccaaaacaatactcagcacacactgagccacctccagccaattagcattagaagctgaaaacaaactagaaaaataattcaccaccaattcttataggccatagtcccactacacccaatcaccttgatcatttttcagcttatgaatatgattggtacgacgctgagaacttgtttttgcatgaaaaaatttaatattttgatctacagattgcagccacaactgctttgaccgctgacgccaataaatctccttctcatcaagaatagtaaatagtttcttctaaattaattggaaccgctggctcaaaatcaaatcatttttattgcaaagctttttaagtttaactttacacgcttttatcctttccccaaatttcgttgtaatatccccccaaactcgtagcttatcactacacatatgcaccttctgctgaatattcattaaataaccttcttccaactcttcttgactagctaaaaacacactgggtttaccaatcaagcattctcaaatttaaattgcctcccatttaccactaatgcatatcttttcggttataaaaataggactatgatctgaagataagtcttccaaattataaaatcttgccatatcaaacaaaaaaagccaagctgacgtaactaaagcccgatcaatacaaatttccataaactccaaagtacccctaccaaactcataagtgaactgatgaccaaccattccatatctctgtcgccccacaacttcaagagctttattaaactcttccactagctacccaggatacggtgccccgccctgcttatttacctgatccatcacattattcaagtcaccaatcacacaccaaggcaagctagaattatgcgccaaagtctaaagcaaattcaagtcttcccacgttgttctctatcaggctcatcataaagcccagttaacttccaagcctccataccatcgacctttataataacatcaatatagttttgagaaaaactaattaagtttgcctgatcttcctcacgccacaacattgctacacccccactcctacctcttggctccaccacacacattctttcaaactccagctgtctacgaatccattctattttatctttcctacataaagtttcacaaagaaaaataaacacatgcctcttgtgacgaatgatgtctttaaggaactgaacattctgtcggttgccaagcccacgacagttttaattgaggccactcatgatacagggcgtgtctgaccagtagagcccaccaataactcattttttttaaccatcaaatccgtaatgcttcctcccatatccacatcaatggtctcactagaaactatattcttattcacattagagtccacactagaaacctcattagcacgcttctgtttagaatctgcaaccattaaaacctcaaacccttcctcatccctttgatcctcacccatccgagaaacaataacttgaggaccccttctcaccaccacgatcctaccttcttcacgcccttccttaagcaaattattagtgtgaaggatagttttgacaaattaccaaaattaaactgctactcaacataaaacacctcattcatcttcaataccattccttagcaactgtgctccaatcaagtttttttccttttaggttgagctctcataaatgaattataagacttaacaacgtcctctacagattactcaaatagtttcgaacaaaattgcccggaatgactaataataccatagatgaaacaaaaagtgggaacatactgatacttgaagttggcccaaaagaagtcaccccccgtatgcttaatcgttatgcgtcgttttcaggggacgataatatcaacaatcacacacacgcaaataatcacgccacaacccttgaaattttttcaaatccatttcaacaagagtgccaatatacgtagctaccccacgtaatacatggtcagatttgaatccatactacaagtcatgaacctgaacccacaaatccagtgtattaatcacaacagaccgtgaattctcccctcacttcaatcttgcaaacacaaatttcattctattgaacgtccacagagaacctgccacaactcttttgagatctagatcatgataaaactaaaataaatatcgattcacatctagctctttcacatacattcccttgccatgctgtcataacgaggccatcaagtgcctcatcacttcaaaatcaagagtcaaaaaatgacctacaacgcaccatcactcattaaccttttgctcttcattctcagggaaatcacaacataacacattcttcaatcacaactcatgctcctctttcccttcaatcacaacacattcttcctctagatcacgaacatacctactactagaagctatagtcgacccacaatttctacaactcctctgaattctcacgaccaatgtgaccacgaaacctccacaaaaaccctaaccttaaaacacacccaacacacttgaatcacacaaacacactagaaaaaaacctaacgagaatggaatttttggaaaaataaacttttgttaaggcaaacccctattcacaataaatatttaatttaatttcacatttgcttgatgaaaaaaatataacatacatttttgggtaaacaatatagaagaaacataatataaattttctaataatttccaattttttttttttttttttgtataggtctttattatttcccttgaaagaaaagtttgaaactcctataagatagcatctatattctaaactaatcaatgatcgatcatgcataaccgattaattaaagccataatttaatatgattccaaacaaaatatctattaattatataatcttacattaattgctattcgtgttctttgtcttcgaaaatcagaaacctcactacaaatttgttaagtacttttggctcacagaaaaacatataatataattaagtaaaggcttatatgagccagtatagttcagttaattatagtcttttttaaaacatatatataatcccttgttcaataattttccctagctaaaaaaatgcattatttggtgtatatattatgtccaaattaagttataacaacttctaaaatctgaaactggctagtcaatccatcttattagattttagtggaagggaatctcatatctcctctctatataagtatgtgaatttttattgactggtcttattaaaattccaccagcaaaatgagaaatctcaaaaggcaaaatgagaatatcaattataatgtatcaagttagttttgataattagataagtattatatttggtatttatttattttttgtttttttttctttcaaaaaaccattaaaattagaaatgatctatgtaagaacaacaacagaaattccaagggtaagattaaaatgcactcgttgttagacatttatatgtacaaactgaaatatatatgtttaagtataaagtgcggaattaatcaaacatatatgcactataatttaaggatcga

SEQ ID NO: 307936 - DNA, 1735 bp, Cannabis indica
cagcaggtgtgaaagggagagagtctggtacaccagaagggatattgttgctgatgtgagttgtagaagacaattctggtgcatttttgttgatatcagcaggtgcattttcctgtctgaattcgtttgtagcagaggtgtttgaacctgttatgggaaaatcttgaacaggagttagagaaatattagatgaaggtaataccatattagaaaagggatcaatcacgatcatgtcattatttaatttttgaaaaggatatacattttcatggaaaacaacatttctagagacaaaaatttggttagaatttatgtcatataatttatatcctttaattccttgaggataacctatgaaaacacaagttttagctcttggttcaaacttggttctatgagcactaagggtagaagcaaacacaagacaaccaaaatttctcaaagcattataatcaggttttttgttgaaaattaattcatatggagtcttgtttccaagattaggtgttggagttcggttgatgaggaacacagaggtcatcaagcaatctgtccaaaaacgaataggcaatttagattgaaaatagagggcacgagcaacatttaaaagatgttgatgctttctttccaccacaacattttattcaggtgtttctacacaagtaaaatcatgcattgtaccatattttaggaaaagatctttaaacactaatttcggagcattatcggatctaaattttttgaaaacacaattgaattgagtttgaacataagatagaaattgtggaataatattagtaacatcagatttttgttcgagtaaatatatccaagtaaaacgggtatggtcatcaacaagagtaagaaaatatttataattggaataagaaggaatatggtaaggaccccaaatgtcacaatgtatcaaatcaaatttattagcagagaaattgttattattgggaaagggaaatttcttttgcttagctaaaggacaaatataacaaggttaattcttatgcaagaaatctaaattacaattcaaaacattgctaagtaaagacaagcgatttttaaagggatctcctagccttgagttccatatgtcagcagggatagtgcaaacataggcatctttaggtgtaggcgccaacatgtatagaccattcttgatcctacccttgccaatcattttcttgttgaggttttcctgaacataaaagtcattagtatcaaaagtaatggaaacaaaattgtcataagcaaggcaactgacagagattatattgaacttaaatgtaggaacataaagaacattattaagagttatagaatcatcaatcttgacagtaccactatgactaacaacaagaacatcattgttgggcaatattaaattggtagctatcacaggacatatgcattggaataattttgcattgttgcaaatatgccttgtagcacccgaatcgagtatccaggattgttcacaaaccgaggcattattataagttaaaatcatacctgaattacctgttgaggtactcggatcaggtgatgtgatgttggtttgttgacttgcaaggaggttgaggagctgctgatactgggcaaaatttcattgagggagaagagcattgttgtcttcgattttgttcttgttttcgctgctggtttgcacttgattagcagcagcctccttttgtttatttttgttaaaacctggtggatatcc

SEQ ID NO: 307937 - DNA, 3492 bp, Cannabis indica
tttgttgtgactaaaaataagatttttgtagtgtgttatcgtagtaggactttattcattcataacaagggatttggtcttgtttttttgggacagtgggggaatttcaactggctcaaagctattagttgcatgactattcttgtccatgttcacatttggaggattctcaaatttatagggaaatttagcttagtatgcttaaattaaaaacatgttgttttaatataccacccaattagaaatagcatatatatatatttaatatcttttactcccaaaaatattctcacatttcgaaaaaacttctctctctaactctctcacttttcagcgttaatctcgacccagaacccctaccgttgaacacacagacctagaaccccagtcgcaagacctcgcggtcgtcttctctcacgacctctctcattttttttttgcgtttctttttctagtttactagttttttgcgatatatttacaatgatagaacaaacctgaagttagggatgaagtttagcgatgatttgcaatatttgacaatgttttgcatatttagcaatgtttagcgataatattagcgatgtatttgtgatatgagattaaaaaatgcagtgcacatcgctaaatattgctaatcatcgtgaaaacttgggtattatttcgcgacatttagcgatgtgtttagcgatattgtgaattagagacatttagtgatgtttcatgatttcacgatgtttcgtgtcatcgtcaataaccataaaaaatacgtagaaaacaagcgagctgagaactccaacaatgggtagggattttgggggttttggggtggttgaactcatagattttggggctttgggtttcacaatttctgtttgtggtttcgcgatatcctcctcggttttgttctacgttttgtcttcagagtgggtttctttggaggtggtgcggtggttgtgagtttggtttgggtctggttcagtttggttttgtggttgcgggtattggttgggttttgtgagagttagaaagagagggagagatggctgagagaaagagagaatgtatgaggagggtattttgagatttaattaattttagagtattaaatttctatgcattttaatgtggcatactagaagttgtcaaattatcaaatttatattggcctcatgacttatggtgcgattgtttgttacgattgtcatcgctatagttggttatttaattatatccttttattctacattgaaaaatagggttgttattacctaaattttttagaagttttttggttgatagtcattgataagcgtgatttatcatatgttcatttggattggaaattttagtattcttcgcgcttttttgacgcttcaaccataataatttattggtattgtagttaaatgtatattaggattttcattcctatttttgtaaacgatataatttgtctcatattgagttatttgaataatatatcattatataatggactattaattattcaatttgctatttggagatggcaacaattcatttagttaataattttttattatttttgataaggattcaattaataaaattgatcatgtggttgttattcccacattgataacttgaaactcatctaacttatttaggtcacacaacagaaaacagaagagaaagcctcataaaattaaaatgaactatttatattgtaaatcaactcaccatcgtactaaaatacaaacagactaaaatcaccccacacatacaccaatggtgattggaagctgaaattgggcttacttattttatgactggtcatgttgagttgaatgagctatgaaaaatcaactatgaagatgattgagttgaatttcttagcatactatttgatgaatgagagctttgctcactcaaccaagcaagatgaacagggacaggtgaatttaccttcaacaatttgttggagtctaagcttctctctaaaacaacatcattaatactgaaaggtttttcgcttacattggatgaggaggaggaggaagaagaacctatttcagaggaagccgtacaagtattctgttccgaacaagaccatctagtcttccttatttgctccaactccgcagccacttcaatcatggaaggcctcatgtccctatgaaacgctaaacatctaaaagccaactctgctaccttatgaatcgttgaaagagtccaagcatccgtttttggctcaagaaatggatcaattatctcctcaagacaaccttttcctattctctcacaagccagagaagccaaattgatttcattctggggtcgagtaaagtccactgctttaagtcccgttatgatctcagcaagaacaactccaaagctataaacgtcgctcttatccgaaaggtgaaagttttgatggtattgaggatcaagatatcccggagtcccttgtggggcagtcgaaatatgagacgtttcaataattccaagcctcgaaagaccaaaatccgcaactttggacctaaaactatgatccaaaagaatattactagacttaatatctctatgatatatagggggtttaatagccgagtgaagataagcaattgcttgagctgtttcagtggcgatggttagcctaatcaaccagctggaaagtccatcacccctctctctctgtaaatgttgacaaagcgttccattgggcatgaactcgtacacgagtatctgttccccaaaatctatggaacaacccaagagacgtacgaggttggggtgacttacagaggaaatgagtttgatttcgttgactacttgctcaatgctgtcagcacctgtgtgtctgattcgcttgatagcaacccactcgtctccctggagttttccggcgtaaacggttccgtaagctccggtgccaagacggtatttttctgagaacccatttgtagctttctctatttctttgtagtgatatattgggatgtttaagttacctgtggcttccgaaagacggcgtttggtgaggtgtctggctttcatttttgaccttcttcgcaataaacagcacatgactagaccaagacttatcattaaagaagtagcagcagcaatacctgaaggaagagatacaagacaattttacaccattcaaataattaattcaaatttcttgctcaaaatttacaatgcatgttaaattgagtatatatatatatatataaagttacctccgaccagtgtgattactcgagtggctcctccacacttggcagtgaagtatcttgcaggactacacttcgaaactgcttttttcacaagtcatcaaacgacacaacgcatatgacgtttgttaaaaatgttttataaacgacatgtcgtatgctatagagattgagcttttattagattgtttcaaactacgtatacaatagtttaagggaatagaaaatcaaaaaaaattttccctaaaccaaaaatttaaaacctaaaaaa

SEQ ID NO: 307938 - DNA, 912 bp, Cannabis indica
agatcatccatggtgatatcaggcttttacagcatttcgactttagaaggctcttctccaagagagagcatttgttaattatattattttattaaagaagatctttttcatttcttttttattttccctctttttgctaaactattattttttattttggtaattttaaagaactaataatattattcctttgtaaattgaaattatttttatcttttaaaataacttctgaaagattttgtttattagaaaaaagaaaaaactagaatacatcttttaaataaaattttattacatgtgttttaaataaattatttgattaaaataagtataggggggtgcataaaacttttcacaaaataaagagtgtaaagttaatttttcacaacacagttacaaaacggataattgtgcaaaattgagggtaaacaattggattaaaaaaaaagttaagagaggagtatccatgttgttaagtgtcaaccatggtcttcttaagcggcacattgggattcaaatgccctcaagctcttgccttctgcagcaaaatccacatggatttcaagcccaggaccaggtgcctacacaatcccttttcaaggtctcctccgagggaacttcttccaaccgaagatggttccagtattacattgcaggaatggcagggttggggtaccacctctcccttacccaccattgttaccagaatcgctgacgaattgaaggatttagagaaagatagtgatgaaaagatgacctttggtggtaaaggtggcaaaatcaaggtaagaaattcaatggctatttagcttagcggaaatttctctttttcttaatttgcttcatttgtaatgttcggacaatggttaggatttagttaactggaaattttgtgatgggtgatagaaagat

SEQ ID NO: 307939 - DNA, 1332 bp, Cannabis indica
agccaacttgtttgcagatcgttaatttgtgaatattagtatggtttattgtatagtaaataaataaatatcttttatattgcaaaactctataaagataatagttggggagaaaactatgtttaaccttaaatcaaaacactttcaattagatgtgtttatgtttctagtattctctttgtagtcattttcatttgttttagtggccaggtcagtgcacaaagcatcctgttactgtccctcttctgattatttaagatcatatattaagatcctattgtttgatgacaagatgatctttgaaatgtaatttaatagcatgcaaatgatttgttttttttttttgcgaacagcttgtaaaccacgtttgtttttctcctgatgggcaatggctagcaagtgcatcatttgataaatctgtcaaattatggaacggcattactggaacatttgtggccgcttttaggggacatgttggccctgtttaccagatcaggtatgtattggttcaatttctgtttttcaaattgtttgtcttctatggctaatcattacacctcatgttgattcacagctggtcagctgatagtaggcttattttaagtggcagcaaagactctacacttaaggtgaactttgagcaattattagatttctttccagtaggttgctttcttccttgttaatgtgtcattgacacaaatagtttttgttttttttttttaaaaaaaacacaatccatgtagttgttaaagcatattttgaaatttaaaacataagatgatctaaaggcctaacaaattattacaaaaaattaaagcaacaaaattatctctcaatgtttactggaccaaattatttgcaggcatttgaaactgtaatttcttctgctgttctgtatgttaacatattttaggctttgaccttgcttttttggcatgttacaataccatatatcaatgatgaatcaagtctaattttccattcttcttagctgtttttttttctgtcattacttgactcggaacttatttaatatccagtttgcgctgtttatttattattattggtctttgttcgtggatgttgagaatcctaacccattgtactgctggagtttgtttttcttgttcttattcattcttctgactgaagcttgtgtttctgataaatagatatgggatatcaggacaaagaaattgaaacaagaccttccaggccatgcagatgaggtatgtttgttcttcaaattagaatctttacacaaagtgttaaaccataacctaaaagttgagctatattttgtacaaaaagtagttttgtgatattttt

SEQ ID NO: 307940 - DNA, 1463 bp, Cannabis indica
ttgctagcaagagtaactaaatattcattcacagttcacaatagccttcaatccaatcaagaagtaacaaggttggtaatggtggtagttatactaattaatacatgagcaaggtaaaatggaacctcaactaaatctaaatcaatattcttgttatcgtaaatctctcattccttaacatgggcactaaatcttcatagcacaaatgataacaagcgagctagagcaactgcaattataaacacagattactacaactactagtactagtacatttacgtacattcaagtcccattcctggttgctgaaaaccaaaatatgggtcctgtaaatcttgtaatccctcataaagagctgtttagatgtacaggttatgatgttcctggggcagtgatgcaatccagttctttgcaggtggaagaccatttattccattaggaagaccatctataatgaaatgtatatctgaggtggctggaagaatgaaaacagtttttgccaagtgataggctgacaataaagtttcttttaggttcagctttttccagataataaaatcttttgatctttatgggacaaaagaattataagaatgtttttgattgtattatcatcaaagaaaattgacaatgacaatatataaagaaactaggtcacgagtttgggacataatttgatttgtaacgaatgtgtatgttatttgggatccagtggtcttttaagattttcatggaggcaccattgccaacttcagagattaagccttcataaacatatctcacaccttcattaagcatatctcactctaaagtaaactagtcctgtaaaggaagaagtaaggcacttactagcttctagaaaagaggttctttaaaatacttagacctgagaagctcggcaaggatagaatttgaaatgacaagggatctagcacttatccatcaaaaaacttagaattacaatgatcggtctatttttctcaatgaattttaggagtccataagagattatatatttacaactagttgtaggaagcttggaacacgacattgcataccaaaggcatagcttgaactacaactttcaataccacttttttgccagttctaagaaaggttttgctatgctttaagaatggcgttaactttattgtgaataaagttgatagaaacctttttagatctatgaagacattgatgtaagcctaaatacttgctaataaaatgtttatttaaagactaggtagtgtttggttggaggtaataaaatggaatgaaatggaaaggaaacaatcttcattccattcttttgtttggttgcatattaaagtataagaatatcattctaatggaatagcctttccactattttggtggaatgactatttaatacagtacgcactcttcgagtcagtgcccaactccaatttgcctctcagctttgtatttctttgcataaaaaa

SEQ ID NO: 307941 - DNA, 1208 bp, Cannabis indica
aggaaaccggtttatcacattggtccaacaggtcaatgactgtaaattttccaagaatcaggactctagtctttaagaaccaagaagccttggatataagaccatgtgatgaatccgttcctcattaaaagatagcgctagaatcaaaaactttctagtcttgacctttagtttcacctaccaattcttctcctctagcttccataatcgacataggtgattttttaaggagcccctactataaccctaattaattcagagacgacccatgaaataaggcttacccaccttgtcagccagatagaagatcttccatcgtcggcaattcgcacaagctttcaaaaaaaaaaaagagccatttgtgaggcgagggcaaacccaagggaaagagttggagtaattccaaaccctaacaaagcactccaaacttttcaaaaccaatactacactaaagtggtgctagctaactttttaatgactgactaaagtggggtacctagtttagtacttattataatcaaataattttttgccgacatcgttaacaataacggtctagctggtaataaaagtcttattgttaatttaccattcaaagtgaaaacaattattttacttttacttttgtttgtaaaaaactcctttatatcaaatattatgctagcttattttaactaacactatatatagctaattaattagcatgtgaccataaatgacacgtaaaaaagaagcatataataataaagttgtgtggacggttggaatgaaaatttccaaacaacagtaagtattgtactgtgaagttaattaattagtttggttaatatttatttttccaaaatattaaaaaaaaaaatgaagaagaagaagataaaagtagttatgtatcaacaaagcatatgcatgtgaagacaattagtgctgtaattataagccttgaaagagttatcacaattcacatgtacaaatacaatctctcattactttcttgtggaaagccctatattttccttcacaagttttcctatgtggcattatttatatatttatatatttatattattaaacatatagctttacaaacattagtcattttcattcattttcctaagttgcaatgtcaaaaacggcaatttaattatgtgtaaactattttacattattgacttaaacctatgatgatgatgatgatgatgagtagtagt

SEQ ID NO: 307942 - DNA, 1096 bp, Cannabis indica
atatttctctttgattccctaaaacttcaaaaaataagtcaatatgggagtacataatcaaagagaaatacataaatcttaaatgaaagagatattatgctgtcagctttcttttaagaaaattaaagcataaggaaaaaaaggttcaaatttcgcaagtttttgaaactagacaatacatatgtaaatttgcatgggaagtgttcaaacacaaagagctttcgaatatgcagacaaaagaaggtgtgatcatgttgggtctaaaaagataataaaataaattaagctcttaacattgttaactgatcaccttaactatccctcttgagatccttacaaaattttgttgataaggttacaatttctctacagtatagtaatataaataaatgtatagaaggaacattattcattctttccaacattttcataattatatatatcatacgaaacaaaggtgcactaatccacattcaatgccaaatatatcatacaatccaccattatatatattatacatatatactatatatttgtatgcatgattatggcagtaaaagtcaattcattaaaggttttttttttcatcaagtatatatatgcatgtggatgcatataaaatttgaagattagatcccaaagtaaaatttcagaatattttagcgcataccaagtggaaatatactaatacacaatcagtgagagaaattagggatttaaactagtgagaaatatctcaataaaatcaacagtgaaaaaaaaagtataaatcattacctaaaaatattctagcaaacattgttgaatttaattcatcatatattattcaaattgcttttataaaggtataaaatctcaagtaaatttgaattattttacaattctcatcaaaatagaattgtaattcaagagatctctaaatttattggtgtgaaattaaaaatgagttttaactccatgtctccaaagaatacatgatcacaagatacaagaagaaactataaactacgttcgatttgattcctttcaaaatgatacgtaggcaacctaattgccaagcagggccggccctgaaatgtagtgggctatagggtaa

SEQ ID NO: 307943 - DNA, 4180 bp, Cannabis indica
agcgttgtttgaagatgttatagctttattgtcttaaagtttccgggggcagttttgtcccagtggggctcgctctaagattttagcggctcatggttggacaaagcagacgatgagctatcctagttcgaggagattccagcgccggtggcggacagtgggcatcgtaaattcatgagtgatttaaatcaactttgtaacaaaaaaaaaaaaaaaaaattatgcccctgaactttcatccatattaaattttttttactaaaattagataaaagttcttaaatttaacaatcttaataattcaggagaaatttttaacggccaataaagttcaagggacataatttagtaaaaaatttaagagacataatctagtacatgtaaaaaattgctaattagtctcaaagagaactaaaaaaaaaccataacttaaagggtgaagttattttaccgaaactgagtcctaattttgggattccataaccattggtgttaaattttcttatttattaaagtatgcttttcaaacgtgtttaagcttttaaatgttaaaataataataaattttggggtccataacatgttcattttactctttgatattcagtgaacatgctgtggattttacccggcagcaaaccggccacaaaggcgattgtagacagaaccttagagcggtcaaataaggggctcaacggtaaaacgctcgttcattacctaaaacttgcccgcccgtgctgtcttgcaccgaaatatataattagcccattctgatttagcttaatcaaactttctttcacaaaaagtcatacatctctaaaatttaaccctagtttcctaatccgaatgatcggcaaccatctaagaatagacataaaacaatggtattcactcaacaaaacaaaagagagcttatcagccttagggtattcagcatagttcaaaatttgcaatactcaagaggtttaatcggaaaccaattcatcatacatagaagaaaataagttttaagttgtttctcaaagagtagagtagccagccatacctaatttagttcactcaactcaaatataaaatgtaaacaaaaagtagaaaacaattgaattaaattcctgtgaaagccttcttgccaccacccgaagacccagctggaacaacctttaacacattaaacctcactgtcttcgacaatggcctgtaatagaatagaaagagatttttaacataatcaagataaggaactaatcattcaatcaattacaattgatcaaaaccgaacctgcattgtccaatgatgacatggtctccctccttaacacggaaacaaggagaaatatgtgctggaatgttcgaatgcctcttctcgtatctgataatgacaatggtaaacagcgaaatttgctattgtcaatacacataacaccaaagtaaattcaacaaaacatgagatgagagattaagaaaaggctacctttgatacttcttaacaaaatgtaggtagtttcgcctaacaatgattgtcctcaccatcttggcactatggcaagtaccagcgagaattcgacccctaacagagacggtaccagtgaaagggcatttcttatcaatataagtacctgcatatgcattcatgtgtaaataaaagtgtcttcttttcttgttacattacataaacataatgcttttgaaaactcaattcaaatttgtaaaccaaaccatatcaaaatacatacacagatcacagacaatagagtacaaacattttttcagataattgacaataacaacagaacagatatacatatatttaacattagtaaactcaaaatgtaacacagagattagattatgagaccaattaattgaaaagtcttataaaacagagattatattactcttttcttcaattaattcagcaattaatcactcaaaaaaccatactttattcaattaaatgatgttctaaaacgaaagcagagttataatttcaaaccaactacagtgaagataataataccttcaatggcctctctgggagtcttgaaacccaaaccaacgctcttaaagaatctgttgcctccctttccaggtctctttcctttagatgacttcttcgagctacaaaaaagaaaagattatatttcacagtacactaagatcgaatcgaagaatcaaatccagatcaagtaatattttgagtagattttcgaaattaaggaagagacttaccaaagaaacaccttaggctgcttcaagaaggctttctcagtctgttccgccattgttattcggtctcaagaagaagtaaacctaaacctaaacctaattcagcggacggagagagaatgagaggacggagagaatgagaagtttatatagcaacggagccctaattatcaaattactaaattacccctacccttaccttacccttactttaattttattgttattctaatttttttcaaaaaaaaaaaatatatgtaattttgaaagaatgtaaattaattgttttttagtgattttttttatattaattgatggaattgaaatattattgttattataatattgtattaatattttgttatctcaagaaaaataatatttaattttttaatattaaaattaaaatttaaattaagatattatataagaattgaaattaatttcaaattttttaattgttgtagtataactcaaagttatctttgttatttagtttatggtatagcatgctacgtaggagtggacactatttaacttaaataaattgaatcgaattaatttataatttaattataattagattggattgaatgttaaaagttaaatttcaattagattagatcagttattggatgtcattctcaaaatttaattaaaaactgattcaatccaattacatatgatattatgtaagaatttaaattaatttcaaattttttaattgttgtagtataactcaaagttatctttgttatttagtttatggtatagcatgctacgtaggagtggacactatttaacttaaataaattgaatcgaataatttataatttaattataattagattggattgaatgttaaaagttgaattttaattagattagatcagttattggatgtcattctcaaaatttaattaaaaactgatccaatctaattacatatgatacatattaaaaagattagttatatttatttatatataataaaaaatatttcgattatatttacactagatttttttaaaatttgttatattttattattctgtgtatttattttcaagatgttttgcattatttaattagctggtagtgttgttgttttagttaaagtaactagttaaccacccgcgctttgcggcggatgtttaaaaaatagcgtattattattagacaccagtggtgcccagaactttttataggtggcgctttataattggttagcgatattccctaaaagctattatcttaagttatataagatctgatacttaattatactaatagtggcatgacaccgaggagggtgctaggcaccaaaaaaattaaccttactaattttcatataatttttctttcaatagtatgagaagttaggtgtacaaacggactcacgtgacatgtatttacaaaatctcttttttataatggttcatataacattcttccgtatatctcgatcattcaaaattgttcccataattgtatatcacccgttgtcatcaccgtatctcactaaccatctatcattttgtctcaccaaaaaatttactctttacataaaataaatcaagcaatgagttaacattactaactttttatacaatttttttaataatatactaagttaggtgtacgatcaggctgacctaacctgtatttacaaattctccttttataatagaagtctgacataattcgtataacactcttccgtatatcctgctcatataaaattaatgtcatcattgaatatcacttgttgtcattatatcatttaattattaaattataaaaacattttaattaaagcatacgattgagttatgtaacatacgagtgatcaaaagagaaaatataagaatgatatctttatatattaaaagtgcctaggtttaacgattcttggtttaacgattcctttttttatttagccttacacgattaa

SEQ ID NO: 307944 - DNA, 3347 bp, Cannabis indica
tccacaggggttttggggatttctaccaccccgaccacctccggtctcaaccaattcaccctgccttctgacatttcgctgggtgtccattacttaggacttagcctgcgaacccacaaggcatgcaggttagacagtggtcaaagtatgttcgagaccgcatttagggttttaaaacagcaatttactcatatatgcaatatatcttaaacagtttacaaaaagtaaagcttacaaaaccgtgaattgagctcgacactggccttgattgtacatatcttgacggtctttagtgaacaacctggtgtttctgataccaaactttaacgcccgcatttgaatttgctaaacttaaaagctaatttttaatatataatatttaattaactttaagggtcgggatcccgagttacaaaacacattaaaaactttatctgctattacaaaactccttgaacatttttttacaaacgtcaggcaacaacaaaatacaattcaaagtattgtgagaccgaaaccctccaggttgcactgccgcgatatatacaatcactgccgagctccatctcacagttcctccactttagcttttcctttacctacacaagttagcaaactgatgagtcaacagactcagtaagatatgcatagcatatatataaacaatgtgataccggctttatgcttaagccgtcccgagctctacgactgagcccacaaaatggttaagaacgttgttaagggaagtacgaccactataccaaatgcactaaagtaccaatcctgtactcgtgttggtagagccattatggtacccccgaaagtcactaagtgttgtaccacatgcacgatgtaccccttggtactcgtgttcgtaacactgtaactactttaaaaatctacactatactaacaccctttaaatcacacaaaccattagcgttagtagtgtaaacaattaatataagcatacattcatatatacgttatcatgctatcttatctcattctatgctcaggtgtgccggtcagcctgagttgaaatgcaactcgacgctttacagggccctaaaccaaaacgttcaaaactcgatgagagacatgctaaaacacttatctggaatttaaaattggaattaagaataaccctatcgataattaggatgccaacaccctaaacaacacaaaaacagggaaaactaaggttcgggaaaaagccccaaccgttagaccggttcccaaccagaagcttagttcctgggtaccaactggtcgaccgattctaatggtttcctagaaccggtcaaccagttctgtgctaggaacccaaaaatcgatccccttaatttaaatcaaccccaaactttctaaaaacttccaggatacctgtatacactcaaatagacccaaaccagccaaaagaactcaacaatttactcaaaattcaaagacaccattagagccccaagttagagttcataaaccccaatttgactcaaacaataaaataatcacctagcttagcccaaaccagcaataatcatctcaatcaaacatcagaatataaattaaaaaaatccttaaataaacatccacaaaatcctccaattcaatcattaaatttcaacctagacttgagagaaacaaaaagaggatagctaggaagagataccttaggttggaaccttagaattcagctagaattcttgatgataagctgagaattcacaatccctagctgctcctaggaaaatcgagagcaagagagagagaggttgaggaagggtgatagttttctagggttttctaacttatctcatgaataaaaggtaatatgtatatatatttttattattattaatatacttaattaaatagctgaaagtgataaaaataaaaaggaaaagattaattacccctttaataaacaccaaggattaaaagaaaaggtttttaagggtattttggtcataaacaataacctgactaatatccgacactatcaaacctaagaatgatgtcccgaaaataatataatactataacatactataactctctgaaggccaaacgtcgctttccacagcttccgaacacaaacatagaaattgagaagtttacataaatagcataataaataaattaatgttaacttgaataaattttcacaatatgcatattataaataatattaaatctcatgaataaaccctaattatttaataatccaaagtattaatcacatggggtcattacatttctaatgcccagacatttgatcaataaaactaggtttataaactattttcgtggtgagaacatgaacaaaaagcacatggtcagattgttggaatggtgggtagttagtgatatctggcaaggagacaatcgaactctcttcctcagtgagagatagtgttgaattcatagagtttagaagtggatccattagaaaatttgtggcaagaaagggatgaacagagcagttagtagcagtggcatgggtgggcgagaacagttggtgaggaaaaggaagggaaaagaacgatatgacagttatgattttgaaaaaacagttaaaaagaaaacaaatactacaactgacacagacccaaacaaagggcactttcaattcaataaacttgtaaaataatttctaaatttcttttctaatctgatgttaaagttgtattgtttagttttttcaagatatcaaatttttatgtgagttgcaattttaatgttcaagtttatacgttagcctaaaatgcctatagattagacaattggctttatttctacttttaatttattggatggaagaaactctttcaccttttgtataacgtaattaacgttttttattttcatgttacctgccgataagaaaaaaaatgtagccataaattattttaagtgagaattatataattttaaattaatattaattatttaatttatgttatgaaatattatttatagatttctaaatcaccaaattaattatcaccattaatgctttattgtatttttctttattacatattgatttagtttcccattcctttagtcaatacttttatataaataggggttcaccctattggaataaacaactgagaaattctcatttagtttctctttctctcttcattttcttcttatctattttatattattttataacacgttattagcacgagtctctgccctagctttaagcacgagtctctgcttaagcttcaagcacgagtctctgcccaaagcatgagtctctacacaagccccaatgtaagtattttgttaaagttcttgaattgtttcaaggtcacaatacactaaatata

SEQ ID NO: 307945 - DNA, 1291 bp, Cannabis indica
ttataatatttaagcttttcatatttttcattttattaatatgttaatattaacaaaccataattaaatagactttattataaaatataatttatcaaaagagtaatgatacatacttgaatttacaatattaactttaaatattcatattaattcatgtttaggaaaaaaaaattattaattacatgaaaaatgaatttttgtacaatttaatttaagtatatcatcaattaaattataatattatcatcattataattaaaattttagttgcagtttataatagtatatacaagtattatataaagacaacatattctcaacattttattatctaccataattggaacttagttgaagattgagctaaattttaggcactcttgcaacatgagtaatagttatattaggaaacagagaaaatgaaccatattcagttatttcttttttaacaaagttagacaaaaggagacaattcagaatcattcttagcatatgattcaataaattaaattggcaaatgaacagctaaacaccaagatatagccaataatatacaattaaccttctagtctttagaccaatgtgttggacctcaaaaagctctatatggtaaactattgtttgggcttattaaataaaggaggaaagaaagaaacccagcctagaccccaagtcacaatacgcttttgttcgacccatttgattatataataattaatttttgggttattctaacataatttgtcgtttatttctttattttcgataccaaccacgtaccatataatccaaacttaacacaacaataagttgttcctctttttcatattggaacgttccaataatttgttcaaggcaattgtcaaaactctttctttcaaatatatataaaatcatcaggaatttatttattttataatgaacaaacaaaaaagtattaaaagaacgaaagcaattaaagttattacatccttcacgatactcaggtgacaccctaaagctaagattaagaagagctttatcagtatctacttttgtctaaattgtgtataaaaaattaggttataacctaccatagaaaaagcacttctgtctaaataaactaaatttccccaaacctttttcacaaagaaaaataaaaacaaaaacaaacaaaaggagaaacttcacttgtatgcatgtcaattgacataataccccacccataatttaattaaatacaatcaactttttattagtctgaaattagtgatactgttataaatattattaattatgtggatgtcca

SEQ ID NO: 307946 - DNA, 1030 bp, Cannabis indica
tcaccagtacaacgtcggagacaactctaagatagaaaatcttagcaaagttttggggaaagtccaaaaccataccaacaccctccaccacaactaggaggagactcgtgcaatggtgaactaagtgttcaaccaacaacgacgagagttttaagaatggatggattgcaatgcccaagagatgcgagcctagcaagaagaaattaattgtagagccaaagaagttgtcaacctaatccaatagttttctcattctgggggcaaagaactgaagttcaactgcccagacgggatgacaatagaggaaaggagttgtatataccaagcagtgggctcatgcacagactagaggagagtctgaccaataacgtgaaattgcccaaaagagacggacccaccaactcgaggccctaggaacagaatcctgatcatctcgttgatgaacaagtattgcctgatcaccgcctcaaatgagacgaccaagaaaacttctgccctaggccgtaaggaaggagagaagatgcacctcctagctaggcatgagggtcttaccgacatgtcgcccagtactagccagacaaaagagtcgaggtgtatggacagaatatacataatgatcaacaaccccattaaggttggacagggtatcaaagggaagggaatggtcatttgtattccaatagatttaacaatgaggccaagagttggccctgtgatgataaccgttagcgaaggcgtgataaccaccatgacaacccgcccaataatggaaacggtggccaagctaatcaaaatgataaatataaggataatttgtagctaaactccctaaaactttggagttgggcacgatcaacccctacgtactgaatttttagggtgtaggaactactcttcttcttcttattctcctcctcctcatcctcctccttcttaaatacttaatgttgatctatgagatatgtatagcctacacccaaaaattttgaggggggttaatcgttcaaaactcaaaagtttaaggagtttg

SEQ ID NO: 307947 - DNA, 1367 bp, Cannabis indica
gcattacatgcgcacacataagggtatcagaatttcacagccaactgttcaatttcgccccatgacattaaatatttcaagacatttttttcaaataaaaatattgtggccctcctaatatatttgagtacgtatgaacaaacttaatgtgccaaattttaagggtttgacatgactacaacctttataaaacaaaattgtcttacaaaaactatgaaatattaccccgccttcgtgttattgaacaaataagaatttgtatgatcatcacaaaaaacacttacccagtgaacccaaactgcaaatgtgacatctgctattttcaccggaattctacagcagacaagctttttattttaattacggtagaaaaagagagcagcaaaaactttaccttttgaaaatttgtctccatattattctcttcttcgacctttataatctccgttagatgatcaatcagattaagttcccaagtatttttctgattaattttctgcaccaagcaaatcaaggcatgccaaccagaaatcaaaaccatgtaaatgcaatgcaactcttaaaaacgaaaaagaagggttgagaagaaagagcgaaagacaagtacggacattttcactggcaagcttaatgcaattttgaaacaactcgaaaatctgctgcttgccgaggagaggatcagaatctccaagagacggaagcgcgctgacggagatgtttttccggcgaatcgcggctgcacgagcagcgcgtgcctgtgcacgctcgagcttgtcgtcgttggatcccaagaagaaggggctagtgggagactggatgcgagcggacattggaaccctttgcttctgggggttcagatcagggcttagaatctcagccatcctcttcagttctgcaacttggattcgatcagagaatttagggtttagaaaggtttgagtttgggagttcgtagcaatggttgggttacctttttccctccatttcttttatgtttcaaatttttcatgatttaagttaaatgggttttcattttgaataattatcttttttaccccctatacttatgacactatactattatgccccttaatctattcagcttgttacaaatagtccttgtataattttatatgcatacatttagtccttctgtttattttgttttaaaaataccgtttgtattgatgatgtggtattataacaaaagatagagtagtaatttctatctctttttagtaggaaaaattgactataaggtggcatataactgacatgaagatttcatacctttaaaaatttaataaaataatttattaaataattcaatcgtttgtagtcagttcaaattagaaaaaagtgtaaaa

SEQ ID NO: 307948 - DNA, 1368 bp, Cannabis indica
aaaatatcaaaatattattttctatttttaaaaataattttttttgtcaaatttattatattttacattttgcttacatacttagactctaaactcacacccggactcgacctagatctcgaacaccgaacttagaccccagacctcagacttggaccctggacccaaattcggacccggatccaaacctggaccaagactctaaacctagatccagaccccgaaccatggaccctagaccccaaagccagactaagactcggatttggacctcggaccaagatccggacggacacccaaacgcggatccaaactcgagacacggtcgaggacttggtctgagtccgggaccagggtttgggtcttagtctggagtttggggtgtaggtccgatgtctgggtttgtgttcgggtttgggtccaagtcgaagtccgggtcagggtctggggtctagaaccgaattcgaggtccgactctgggtccagagtaggatgggttcatttttaaaaaacttaggccaaaaactattaaatttttaaattgacaaaaaactactctctattctcacttttgaaaatacaattctgaaaattgaaaactaaaaaccaaaaatacagccaaacagcctctaaattttgtgtctcattacacattttttaaaatgtgattggttagtgtctgtaatctgttctttaattttaaaataaattatgtaattggtgtaattaaatttaaaattagttttaattttaaatgaagtgtgcaatattacattttaatttatatgtaaatttagttatgtaattttataatttaattttgcaatgattttttttttttttggaaacttgtattaaatttagttatggttaatgttagttttacatgaacattattcttttttgattaatttttttagattaaattctaccattattataaatttagagtcatttataacaatagtgaaaataggataagggatttcacccatccaacatatattttcatcaaattctagagtatattttgctaaatcatgtgttgtttgattagcatgtcattgaatatgggagacaattgttgggttttggtgccctaaataaaacacatttaaatataatcagatttactaattaataaataccagaaattacattttatgttgcatggttcacatgatttatttcatgattatgtctaatgtataaattctattaagtccagaacatatgtatttgttcatgattatagtgtcgtcagcacagtgaaatatgatcatgattatatgttcaaaagtttaattcccatgatttgtcagttcactggatttagactagcattataatttgcgataggtatactta

SEQ ID NO: 307949 - DNA, 1027 bp, Cannabis indica
tacaaatttgtgctttaatcaataggtgtcgtgcgcaaccatgttggtaccgagaatgtgagggaatatgatgttacacaaaaaggtggcttcctttcggtggtgcacgcactccgtgggtttgatgtaggggacaaatccctaacacagtaggacctagtgtttggaggatgccacataggatggtatctggaaacttctggatgtcttttcagtttcctgttttcaaattaccccatgaaggtatatggatacatcctgttggaccttttagcttttgggaaagataatcttttctgaaccaaagtggttcgaccttgttgcgtctataagttggacttacatctagagtcgtagcctgaatatgcttgtgggctgatttattaacttcattaggcctatggatgggctcatcttgtcaaatattaagccttggaagtacacgtgccattaagttagaatcacgaataatatttacccccaagccttcagggctcaagagttgtagaggcttacagcctacttccaaatttgtcttgaatatggaaccgtgagcatgtgtgaccttttggaattccaaggccataagtggtggatgcctggggtcctttcatcttcctggagtaggaaacatgtgtcatgagtcccttggtacttgcctattgcgcaccttaaggaagagagtaaatcttagggacgtgagacgatgactggtttaagtcagtaggatttctaaggcgaatgtcgtcatcaaatggcctcgatattgtacatagcattaaatgggagccttctatattcccggaccattagatcactttatttttttaggatatgatctaattcatcagatcgaaagcacgcggatcaccaatttgtgtaaaaatagggtgagggtcaaatggttatcacttttgccattttaaccctttgagtttaaatattccagagagagaaaatcatccaaacaaaaaaaaaccctaaagtttttccagtgaatgtgcaatatattggaaattattttacc

SEQ ID NO: 307950 - DNA, 2239 bp, Cannabis indica
accatgagcacaagcacttagcaagcacagatagtaatctcatccgggacaattctaatcgttcgcatttcatcaaacaagcaagagactcttttaacaaatccatgagttgcaagtcctccaatcatcgcattccaaatcaacacatctgttcttcgtgtccaacccccacgaaacacactcaaagcctcatcatcgcaccacatttcgcatacatgtccacaagcgacgtttgcagcaccaaggttaacaacaacttgttctcaacaatgtaacgatgcattgcccttccttgctcaagggcacctaagtgagcacaagcacacaaagtactcaccatagtaacctcattcgcttcgggcccttcacattgcattagctcaaacagcttcaaagcctcaacatattccccagccttaacatacccatcaatcaaagaactccaagacacaacatccctctcctccatcaattcaaacactccccgcgccgagttcacatcgccacatttcgcgtacccatcaaccatagaattccacgaaactaaatttttctttaaacatattatcaaacaccttacgtgcataagtaatatccctacaagaagcatacatatgaatcattgaattcccaataaacctatctgattcaaacccatgtttggatatgtgaccatgaacagccacaccaagttctagcttcatcaatgaagccgcagccttagcaagaaaagggtatgttaaatgatcaggcgagaacccacctctcaacatttggatgaaaaccgatatagaccggtttggattacggctcttggagtaacctcttataacggtattccaatcaaacgttgagggattagagagttgcaatgataagaatcgataggagtaatcagcattaggggaatcaaaaatagcggagaaagataagatttttgaggaatattggtcttgttggtagaggccaaaagtgagtaacagagcatgaatttgcttaagttcagacatggattgacatctgtctaaaaggggtaggagggttttcgccatttttggtcagtttcaacattaaaggaaggatttttattgttagtgatatgatattgatttgaggtaaacaaaattaaggaatttgagaaagagaagagagaataatgaaacagaaaaagagaagatggagaagtgatgatactgacctatatgagtgttgagtgactgcgtgagaagccggagagtagagatggtgaacggagtagccgtcgttgagggttgatatactttcttcacaattgaatatagattctctcaaattttgattaatttaattaagagtttttacactagtgaaaatttcaatttttttttttatttaagagtgaattttttttcaaaaatatttgttttttcttcaaaaataaattatgtggcattaaaattttaacctaaaattttgctaatcattccaacttgctatattgatagagtattaatagtcctgtatatcgtattagatcgactcatattatattgtatttttcaaaatataaatcatgtaagtattgtgtcatacaaaatatgaatcatatcgtatcatgctaatattttaaaagtgtatccaacacaattgtaggtctaatatttttatgttgtacttaaattcgtaaatttattttatattacgtaagtccccaaacttaaatagaatgtgtctcacatccataagtctattttaatttgttgtattagaattttagaatgcatgagttttttttaatagaagaaatattcattaggccattgctaaaaatagtcaaaaagacttgtataattataaactcagataaacttgaccatcaaactctcgcaacatcaagagagagtgttatcttagcaagtttatgaataatagagttattaaaacggttataaaatttaaaaacaaattaagaatgtaaagctaagacaaatcttatgaatatcttgtaacactgtattggattaaaatctctaatagcatttatatgtatttgtttgtgttgttatataaaatttgatccatttaataactaatgactcacaattattaaaatgatgattttatttggatcaaactttatataacaatatacacaaatatatatgagctacagggccggccctgggtataggcgggctaggcctgtgcctagggcccacctagtctaggggtcaaaaaaaaattttgcccttttaaaatt

SEQ ID NO: 307951 - DNA, 2199 bp, Cannabis indica
ccgtataggtatacacggtgctctgctcggaacatctccttcagacagatatggggaatcatttccacgtttcactagcatgtgatgccacgttagagtgtgaaaattgggataacaaatatgattagtattaactctctgtatcaatacaaccaaaaagggagaaggtcattacccgctatcatatgggggtcgaacctctataataaatctgtgtcttatatacttttcattctatttgtgtaacacgtggtaagcatcaaatctatatgaccccgttgtcggttgatcattttttaaggtcaaaaaggagcatacaagcttggccagtattatgaaaacatgaagctagttctagtgccacagttttggagtggcaaacatttatgaaaatactaccaataaatgaaaaaggtttgaggaccacataaattgtgtaatgcttaaacatcactcttacgttgtggccttttaggctgaccttgctgaaaggttcaaagaacaattggtgctaaggttagatgaccactttcaatgtatagttagttttaaaataattgctcttgagtactgtcttttgggaagaatatatcattcaaaacttttatgttttaactagcaaaagttagttagatcatgtaatagttttttataattcaataaatgtacgttgccacggtaacaacacataccgagtaataaatgaataaaaatattaataatcattcaaattatgtcaattttttgcttttttgcaaactatagcaagttatttaactgcctaatatgtgtataaagggtttgcctaaactaaaaaaggttagagagacaaaatagaatttgtaaaatgcaagtgaccaagagtcaaaagtttcctcggtcacttggcgagcacctatacatgtacaagtattggtagaaaacaagctgcaacaaaaatcaaaagaaaaatttaaagctaagggaaaatatctactttaagataaagaagcaaaataagtctgggcttaaaaggtacctgactagccatttatattaagcaaaatgtaaataaaaatctgagtctataagtcgcttggtcaaccatattgcattagaaaaaggcttgtagcccgaataaagaaaaatatttactccattggggtccaagagacttgatcttaagcagtcgggtcttctttatactaagtgactgaagaactctcatcgaatttcttctatcatcttcatccttcctcatttcacaataactgaagaagtaagaacgaatgttgtccttcaaatacccaaaattggcattttgatccaccttccgtaactcataaaagacctccacgacatctatttcatagacctcgacctccttttgatacgacttctgctaagcgacaaaagtttcttctaaggaagttttctcctttagaaaagtttcatctttttgttgaagaaccttagtcaattctttgaccttggcctcttagttctgaagtaatgtgtggagtcctttcctttcatctgttagaccacgcaccctcttggattctaactcgaggtatgcttcaagcttggcaatggacaacatgtcttctatttgctgctttaagtcatcaatagacttgttcgcagtaactagttacttatttacttcactgagctactggtcctttagctcagcctctttcttggcctcctccaaagccttcttaaagtcattagttgttgtattggatttgagagctacagacttggctcaagaataagtatagattcaagttaacctgcaaaaagaaaaaataagttaaattacctgtgtgccaaaatccatgcaaagaactctgaaataagagcttaccctagtaatctcattcaaaaatccactaaccaagagttcttcacgcatctcttccaccctggtaagctgctcgttgaccttagccatcaattgatcctagtagaaactgagcatttctctagccatctttgtctttggctagatggttggtaaagtggaatcgctttcgtaggatgggccattcagtatggcccctttagagcttttggccagagtagctggtggttgattcgtcgaagtcttcctagccgtaggaagggactctggaacatctacgatgaaagtatcgagctcctctctgttggaatttattttaccaggatcttagatccactcacaagtatgtt

SEQ ID NO: 307952 - DNA, 2542 bp, Cannabis indica
atttttttttatcatttttcttcctcttttgtttctttctttcctttttatttttctttttttttttcttttatgcttattcttcttcttgctgcccattcgaggtctcgtcgggatttaggtttgtacatgatgggcattctcattaaaaaatgttatggtctggtcttccattcgacttttctttgaggcatgctactttggtcaaaaggagtcttatctgaattcttgagctcattaatgtatctcttttgagcgtcattgctagtccctgcaaagtatggtcctcctgatatgatcaacacgtcctctccctccataagcaaaggaaggtccaggttatgtcctgattgtccccattgtggttgttctggagggttaggagcattgtttcctagtgctatgtgtggttacacattggcatgtgggactacaggttgttgtgcattgcccccttgtgggttgtattgcttattctttgcatagtgggcaagaggtccattacatatgagagtctctatttcatctcttagattcctacactcattagtggtatgcacaatgtccttatggcattggcaatacttcgttggatccctcttcgcacgactttccttcaaaggttcaagcatctgaaaggccacccaatgtttgtttgtcacatatatggtttcttgtgtctccaccaattcagaatatattgtgaacatgggctagtaacctttgctctttttggtaatgttttgatcttccccattgtcgctctttctcttgttattgtgcctaaatttattggcggtcgtaaggttgttagttgtttgcctttagatttgtgaaagtcgttgtggtagtgactagaacaagttgtgttgggggaagatgtaggtaattggctattttggcctcctcaatgtttacatacttttgggccctcttcatgaattcgtcgatggtgagggaacctcttccttggaggttatcccataataaagacccatgagttatgctgctcccaatgccgtgagtctcccactatcatcaacgttcttgaccttcgtcaattcgatatggaacctattaatataggcctttagaatctcactgggatgctgttttacattagcaaaggaaaagcatttggattttcgagacttggcgacacaaaattcttttttgaaatcacttgacagtttgtcccaagaggtgattgaatacttcttgaatttattgaatcatgttttttgctcctgtcaaggtcaccgggaatgacatgcactttagacccccacttacttggcttgtcatcattaatgtgttgaaattactaatgtggactcccaaactcagtacttctgtcttattttgtcatggttggcatcttgaacccttgagggtatggcatgccaagatgtgtggagcaaaaggctcaggttcctcattagatttgtatcccctaaacttcctgtgtgttaacaactgctgaatttgttgttctggcattgtgattcatgggtcgtttatcacgggagcaggaatgttgggaccggctggtggaggagcgtttgtattataacagggtacatatactccttgttgtggaggaatgtcatattgcacctgataaggaggctccctttgtgcatgccccttgtttaagtggtctctcaaatcaggttattgcctttggttcagatggtcctggagatccggttccttgcgtcacgtgggggtgtcgaagatgttcctcatagtatggaggaggagcattaattgtcttgaacactcacagtctgactccttaagtcagagcggtaactatcccccatgaaactaatcgtcctttattattgaggcctccgaggtgtaagctcttgctaggcgtacaattatgttgtggtagtttgagatcttgacaagtaactattgtctcgttgtggatgaggttgtgcatgttgtggtctagtctccctgggtgcctgtcccggacaggcatagttatcacgagagacggtgcaccgtctttcccatccatgtcccctaggttgaggtccttgttgagcatggttgtctcgggggtccactcgcctatctcgagggattcgaggcaagtcttgacttggaaggcgattgggaggtgtcttcttttgtcgtgacctccctttctgggctggttaatgtggtggtgttgcattagtacgaggaggctcaggatgccttattagtgatggggggaacctaattggcgaaggtgggttctggacatgatttcttgccccccccccttcatcaacaccaatatccctaggagcaagagatggttaagatgattagactgcattattgtgtgttgtgcccctctcctcatgggagcctctccgtgggggatgtgtagtattgtcttgaggggcagtatgtccttgtgcgtccctcttagtttgttgttatgtaggaggtgttggatatattttaccaggatcttagatctactcacaagtatagttgattaacaccctaaatataaaccttcaaaaacgatgaaata

SEQ ID NO: 307953 - DNA, 3223 bp, Cannabis indica
aaaaaaaaaaaagaactaaaaatctttcgtggatgctgaaataaataaaaaaatctaccaaaatgacattttaggaagggtctactacataaatttctagaatttttttttttcattaatagctaaattaggcaaaccatgccttacaaaaaatagtaatgaaaaatctaatattttataatatttttatttattatttaccaaataaattctattatttttttgtaatatttttatgggttagcacttttttggatcctgtactgttttgtaaaagttattgattgggaccctgtgctgttttgtaaaagttattcatttcaccatctattttgttgaatggcaagatagactttgtgttttccaaaatagcatataaataggacactgtgttcaatttttgaattttttttgataattttttttttaatataatcaacttaaagacaattcctaacacaaatagatgcagtaaacaaggttggccctgagtaaatttgggccctaggaaaataatttttttggaccttttataaaaataaatagtacttttaaaaattattaaaaacttatgtatatttattaaaactttttttttcatttgggtccctgataggagtgggctttaggtgcaggcctagcccgccttagcctagggccgaccctagcagtaaacataactaattttgtcataacacctttaaattattttgacaaaaaataagttctatttagtactattttggaaaatacataattactgtaatttgtcatttaacaaaataaagagtccaataaataatttttacaaaatacaaagtttaaatagtatttaccctacttttatttaaacaatattatttgtcaaatatgtaatatgaaatttttaaggccacttactatacataattaataatttaatatcttatgacattagcattagcatgtaataagtaattagtaaggtcaataaataattgaaaatacaactacaaattatgtctaaacatcagaattttatattaagtgtcatcataacttaaaaagcatgtgattaaataacttatgaaatattattatgtattggaaacaacaatcctattccaagttcaagaccttatgactcgtaaagagttgtattaaaaacaatgatcctgttctgagtggatgatggtgggtgattggaacacaaaatatttccataacaaggcatctgtgaaaaaataaaagaatgtcattacagagattatgacagaaactggtcaaaaactttcaattgaggttgatattgttaatgagattgaacagtacttttctggtattttccaaactttctcacttactaatgaccagattcggcaaggtattgaagtagtacagtctcaagtctgctggggacaatgaatgccttatagttgtgtttacttcaaatgatattttttgatcagtcaaggctattagggccaccaaagctcatggccccaatcgttttcatgcaatgttcttttaaaaatattgagatgtggttggtaaacgagtttcatgtgtcttcttggctattttgaatgaggagcggtctgtggagtatattaataagtcaaatatggtgtttatacccagagttaaaaaaattcaagctggttaaagagtattggcccattagtttgtgtaatgtcgtgtataaaattggctccacgacattcgcattgagaatgaagaatgttcttagtcctcttatctccttcgacaagaggagttcatggtgataggtggtgttggcattttgatagggatggtaattactcagttaaaagtggctattttgtggcatggttcattcaatttgatgagggggctgctgactcatcttggcaagcgtggtggtggaatggtatgtgaaatttaggggtccctccaaaagtgaaagtgtttatatggtgccttatttattatgccattcatgtagattcgagattgcgtactcgaaaagttgtttttcctttatattgttcgagatgtggtgaggaatctgagaccttagagcaatccttgtttttcgttctacacttactatgatctgaaagagtgttggactgttgtctccaattcaaaggtttgtaaatcgcccaatactagatattcttactggtctattttttaaactttctcaaggtgagtttgaggtgatgttgatgcttttgtatgatagaaattttattttatttggtgagacgcaattaagattggaacttattctcgacttagcacaacgggctttgtgggagtttcgtgagcaccaatggctcggtttgatttcgacggtggttgctacttctaaggtggtgtcgtttattggcgggtcacttttctttgaccatcgacgcttcagtgaatttggggaggggtttgtggggttcggcgtgatacgtgatggtgagggtgtggtatgggcttattgggcagtagggaagtttggtgtgaatgtggcgaagttgcttgcggttcgaatgggttgtgttttgctcaacaatttcgattccccatctctgctattgaaagtgattcgacgatggttattggatggattaataatcccaatttaaatagcatttttcaactaattattttagatgttatttctttattagcagttgttgatgatagttcctgcaaggctattttgcgttctacgaatggtgttgctcatgcactggatacttatgttactagttctgtaggagagtatatttggatggatgtttgtccatgttttaattagttcttttgtaacagttgattttatcttaataaaatgatttttttttctattaaatttcaaaattgagacatttctgagtagttcgccaatcaatgacatcacatttgcccaagtatttatatatatttatggtaattatatattacaattattaaaaggcctattttgttcacctttttatttattttggtatttacgagagcttttatattttatttattataatgattatgtatacatcggttagtttggtcgggttataatgtatttttatcaacccaatataaatgtcgtgttgtaaatatataattataactcgtccaatgaaaaataaaaaaaagtgtaactcgtcttatgatttttattagtttggtcgggttaacccgtttaaaccgatctttatttttattttttttcattattgttagtttttagtgttcaaat

SEQ ID NO: 307954 - DNA, 1381 bp, Cannabis indica
gtaagctgcttgccatatgtttttctttcattgttgttgtattttcttttttctttggtgatctttctacttaaatgcaatatttatactgcatgactataatttgggtattttctttggtcgtctttagtttacatcttaggtcgggattcgatgcctagagtatatagaactcgccatttctctttcccttcgccccttctaccatttcttcttgtgcatggtgcaattagcacccaattgatggcataggaaatttacaattttttaaaaatgctagcatcctgagggagtctcttgtcagtggttagagaggacccccattcctttctttgttttgggtttgatatgggggctaactgcttagtgcattctttttttagatgagcgaagtcttgagagacctacatgggcacgacatttatgcatttgaccgagaaattctagaactcttttccaagaccaagatgtcaaatcctaaagtttcgtccaattcttcatctcagacagtggccctacatcttatatctggtgcaagtcttccactccaaaactactttatcaactttttagtctttgtaggactagctcctaacaatcttatcccccaagggtactacctattgtcaggcctttttattttctatgcctttaggggttggcctgctcctagtcctgctgaaattttatatttttatgaactcgtgtctgttccaaaaaaggggatatgcgtaaggatagtttttagtcaatgcaatctcacctagctaacgagacccaagttccgttcaactaccaaaagaacattaaggattgtcgtcatagatttttcttctcttctggttttagagcttttgagcatttggacctattgactaagtggtcccaaattcctccattgctatggatgaccccctcataaattttcctcaaccatgatgtagtttttgcaaccctcagcaaagaagagcttaacgtgggaaatttggtgactacaagcaattatcaaagggccaaacttctttaaggtcaacagtcgatcagggacaccaatttgtcgaagattaactattcaaatgctcaagagaaagaagataaaaacaagctccagctcgagataatccaggaggctgagtcaaagtataaggcatatcggaggagacaggagtaggaagacatgattgcccaggctcaaagcaacaaattgggaaatgaggaagaaggctgataataagcttgttgtaacaccctaactatctaggcatgttagcgtgatttttaacgtaatgtgcagctcgttgctaatcaacgagattaacgaaaaacatgattaattaaatttgcttatttaattaaaaacataaagtactatatttgtaaa

SEQ ID NO: 307955 - DNA, 2344 bp, Cannabis indica
gtaatgggttttatttagggcacaaaacccaacatgatgtacggtaggaagtgtcgttctccaatttattgggacaaaatagccaaaaggaagtattttgatcctaagttagttcaaaagaccaatgaagcggtagaaaaaatcaaggcttagatgcttgcttcgcaaagcaggaagaaaagctatactgatccgaagtgcagagacattgcatttcaagcatgagatcatgttatcctgagagttttaccaatgaaaggtaccaggcagtttgggaagaggggcaagttaaaccctaggtttatagggtcatttgagatactcaagaaggtcaggcaggtagcgtatcggctagccttactaccagtattattggttgttcataatgtattttatatttcgatggtgaggaaatatgtttcagacccgactcagtcttgagttacaaagccctagagctacagttagactcattctataaggaataaccagttcacatcttcgataagagagaaaatgttcttcgaaataagaccatagttttagtaaaagtactctagaagaccagcaaggtgaagaagccaactgggaactagagtccaacataagggctcaatatctagagttattcaggttagattttaaggataaaatcctttaaacatggggataattataatgaccgcatgttagattttgaattagtaaaggcaattagcattaattactcacattttataataatatatgattttatatttgttgtgggacccatttttagaaatggtcattagagttataatctctcaattctaaagattttattaaactttgagagtattatttatgctaaatataaattatacagtttttatgacttttgcttggtgacgacggaaaatgcgatggattgtcgtttgagtcacatgggtaactttagaatcaatttcttagcaggacaattataagagatatttagtatgccgagtttaggcggggttatggttttagaccattttacccctaagtctaaaggttactttaaatggaagaaaggggcattttgggaatttgatttatttgattaggtggtggcttgtgaacttgacaggtagccacttatcctttcagctgaagtgtgttgaataatttgaattatttaattgggaaaatcaaagaaatagctagaaactcttttatccttccctctctccttcgaaccaagatagaacctaggagttggttactgatttcttcaaattcagcaacattccaggtaatttctaagaggaatttcagaggtagtttgaggtaaatccttaacttactaattttcaagttgttttagttacaagtttggtgttagcatgcatttttgagagttagtggctatttagatttagttttgctatagtatgttttcagaggttgtttttggttaaaattgattagttgtagctgattttagtgatttgagtggtgaatgagcaagtttgagttttaaagctcaaactttggtcattaatggaatttttggatttgtgtatgtttctttctgttattgcttggaaaatgttgtttgaggtttgtataggtgatctagaaggttttgtttggtttgatttggacacgaattgggcatgttttggacttgtttgggttacctggtaaaccaattaacaaattttacaggtcctgtagaacggttaaccagattaggggcaggattcttgaaaagtccattttgttgattcctgttatttttagagccttagttattgtttccatgataattaaggttatgtcaaagttagttatcaatagtggaactcgtagttgtgagtttaggttctcgaattaagttttggcatgttatttacccatttgcgtaaatatgacatagggtatccattcagcatgtgattttctattcaggtcacccagcacaaataaattttgaaacaaggtaagactagcatagaacgtatttatatatgaatatatataagtgtgatatatgcatgctatttgtgattcattcactaacaacactagtagggtagcggtactgagtgtattggtacagtgtatgatgtttgaagagtacaatacaatgttaccaacactagtacaaataggtacggagtgaatgtggtacaacacttaggggtactagaggtacggagcaaaccctaccaacacccgtagagtagcagtacatggttcatgtggtacagtggttgtaccttattaaagaacgatcttacttatctaataagccttgtggataggtgtatgggtgcctagatgcaagtcggtactatattattgttggaatttattt

SEQ ID NO: 307956 - DNA, 2516 bp, Cannabis indica
tattgatgttgaataaaatagattacattgaaatggagttttatttagggcataaaacccaacaataacatacttgttagtaattctagatcctgttaaaataattccaacatattctcagtggtaaagatccgtggatatctggccatagttctttctatctgatcacttactcgaggccatctaatgggcttgttgctcatgtcattatagatgaatgtaaattgaatatagatctgttaaatcaatactttttacctctggatgtagctcaaattttaactttaccgctgagtttctatcccaacaatgactctcttatttggcatcatcatcacacagggctccataccgttaaatctggataccatttggtagcagaactcgataactttgaccgcttatcatcttcgacttcttctacatcatggtggaaattattttggtccctcaaactgccaaaaaaaaatcaaaaattttgcttgaaaaattgtccatgaggctctcccagtcactgctaacttagtcaaatgcaaggttatcacaaattctagttgttctttttgtaaacaagcatgggaatctataggtcatgcattgtttggttgcaaatatgtaagatctgtgtggcgctactcgggaataactttagattggcatcaatcctcctcaatgtttaaaggggattgccttctgcacttatcaagaatatatgacaaatctgagctaaaacacatcatttgcatcatgtgatcgatacggaatgaacgtaatagtgttatccatggtggtaataccaaaccagcttgtacgattgccttttctgcagcaacataccttcaaaattttcaagatgtccaagggaaatatcgtccatcttcatggtctacaactcaatctttgctcccattttctacccatcctcacgtaccgtggctgccccttccacttggtgaactaaaattaaacatagatgcagctctagatgtgacaaagaatatcattggagttgaagccatagttcgtgactcacatggcactgtgattgctgctttctctaagctaattatgggtaactttgcctctcatgaaatagaagcgaaagctcttttccatagtctgaattgggttcttcagatggacttgcgaatcacacacatagagacgaatgctttattggtttctactaaatggccattttaatacaatttctacttttaaagatttaattgttgatgtttctagtcttttatccttctccctaaagctattattatacatgttaaacgtactgccaatatggcagcacatgggttggctaagtatgctttagagttggatgaggcttattttttattgaagaattttcctcctccagtgcactctgttattgtaaatgactttccttaatttatgatgactgagtatttttatcaaaaaaaaaaaaacttgttaagacaatagtaacacaaactatcatagtttaagtttctataggccttttaaaaatttaaaggtgtttaactaatattttttaaagactatttttatatttttttctaaaaaaaaaaattcaatattctacaccataccataacatgaatccaaccccactctggacccggccacaatctcgaaccttgaccctaactcggccttaggacccagacccggatccaaacccggaacccgccctcagacctggaccacgacccgaacccctgtcccgaactcagacttcaaatcctaaatccagacccaaaccttgaaccctaattcgggactcagccacggacccaaacctggcctcgaacccaaacccagaccatgaactcaaactcgaacactgaccttgtcccctaactcaaacatagatattgacccccaatcgaccctggacttggcctcctaccctgaactcaaacctcctatcctgacctagatcctcgaccccaaccctaaacctaaacccagaccatagccctgataggtaaaatttataacgcaagtatacgtcttatttcaagtaataatagtgcgtaagtacgagtatcgtctcacaaagactattaccaagtaccaataattatttttttactttctatttaacaaacaaaaattgaggaaatattattaaaactaggaaaataatttaactataaaattaaagtaggcaaacaatgattatgaatatcaatcaatagaacctaggatattaatttcatcaacttgtcaatcttgttactaatccattctacgatttcttcttctaattttaatagtgggttaactaaaataaatcatattctttttcaagatatagtacctcaatctatatgtaaattttctatgtatctgtaataaattttaacatataaaggcattaagaatgaaatatctatttgttacacaagtcatacgagtactcttgtgttgggttttatgccctaaataaaactcatttcaatataatcagatttgtttattaatatagatcagaaataacatttaatgtt

SEQ ID NO: 307957 - DNA, 1333 bp, Cannabis indica
acatacttgtgagtagatctatgttcctggtaaaataacttccaacacatcgatcctagaggtttgttatcagcttgactctgactcagagccagagagggtaaagcttctgcaagggagtgggtagcatgcagtatttcagggttggttaaagttgggttgtcactaattataacaaaatcagtggaaatcgaggccagatgagatgagtgagatataggggaagagctagtacatgatgtaccaaaatacatacgacccatggagatgttggggttaataggagtaggaatcatgagactttgggagttcttgggagcactaatacatgaaaacgatgccatactcgagcaaaggagtgaaactaacagattaattgagaaagggatttaccatttggccccctgagagaagtcagaaaggtccaagtcagctatggtaatggctggatgatgaggatattggaaaggaaaaggcttctcagagggcttctcttttccacgcaggagaaaatcataagggcaaacaggtggggtaattgattcatcacacttctgaaggtaagggtggcaatatttcttggtacgatcaagtttctcacaatagaaacagaaatcagagagcctttcttacttgaaatccaaccatttagtaaattccctccccattttaagaaaataaatatgaatgcctctcctaatgggtctattaacatctatgagaaactggaccctcaaataaggcctagatccatccttgacagtggtgatatccacttcaatcaaatcacctacacccgtggtaatgagcttagccaactcataagatttgcaacgaaaagggataccatagatttgaacccagaaaggaacataatgcaagttttcaggggttatgggaaaagagttatcaggggcagcaaagatagtaagtgtaacatcccgataagcctaatggtaagtaattatgatttataattatattatgggatagttagataataagtgggattatgatcctactaatctaattcaacataaatttaaattttgctataagtggataaataagtgtaatttataaattacggagatttatatggtatatgtgaatgtaatatgagttactggtgtaataaaaatattttcaagtttggcgatgttgacttcgcttttagccaacgataatgattctttttgataagcgataaacgatatgtcgtaataagaataagtagtaaagcaataataagacacagaaattttatagaggttcagtcccgagcagttcggtaatagcgtaattctcgttagttgtattgacttaagaataa

SEQ ID NO: 307958 - DNA, 1832 bp, Cannabis indica
tttagtacaaaaacaattattatcaaaacaactttttctaaaagctgggttggagcagcttcagcttttagctgtagcttctccaaaaattcttcaaaaagttgttttttgactgtttaccaaatacatttttatcacagctttttcaaaaagcagcttttagcttttccaaaagctgtgccaaacgggccataagtgctaactaaaaatcaaatcaaatcacttagacaacttattaaattagagtacgagttatgtttttctaaaactggttttaatatttttttttctttttttgtcagccatgttaatgacttatgtgtttcttttaaagttaaggtgatacaatttgatatttttttgctaataacaatttattattgtccacatgaaagtttataacaatgattgaaacttcataatttttttatgttattttaagttattactggtgacctactcatcattataaacaatgattgccagtaacctactaattatagagaagttattactggtaagcacataaagaaatggatcaaagccataaattatgagatgtgctcacttagaaagaatacaacatggattgttgtccctttaccaaaaggacagagggtaataggttgcaaatagattttcatgcacaaagaaggtttttaagaagaagagatgaggttcagagctaggttggtagaaaaggggttcaacaagagaaaggcattgattataatgacatttctcagaagtggtaaagcaaacttcaatcaggataatgattgcaaaagtgtcaatgtttggtatggaatggataaaatggatgttaagactgcttttttgcatggaaaacttgaagaaaagatctatatggcggaaccagatggacacaaaagcaagaaactagactaagtacgctttcgaaaaaagtccctctatggacttaaataaattcccagataatggaacttgaggttccatgaattcatgctgcaaactagttataacaggagtgaatatgactcacgtgtctactacaatagtacaccatgtgggctactactgtatgtagatgacaatcattgggaaggaaagaaagaccattaacatgttgaaagattagcttagttcagaatccgaaatgaaaaaaactggagtggctaaaaaaatactaggaattgaattcaagatagaaagactagagaaagcgtttctaccaaagaaggggtacatacaaaaaattattaataaattttgtatgagtgaagctaagatggtttccacacaattagcctcacatttcaagttgtcacaagatcaagcactaacaaaagaagaggataagatcaatatggacacagtgccttatgcttcatgtgtaggaagcttgatgtattgcatggtgtgcacaagacaagacttggcttatgcattgagtatggtaagaaggctcctctttgatccaggcaaagaacattagaatgcagttatgtggatacttaggtacctaataggaactgcaagtgcaggattgatgtacaagaataatgcagtgtttgacacttaaattgcaaggtatgttgactctgattatgcaggaactatagacaccagaggtctataacagggtatgcattcacaacatttggtggatgcataagttgaaagtcaaatttataaaaagtccctctttggtgaataaaataattcaagccattattcaaaaatctacatggtatcagagccggttaaaaatttctatgccctaatcgcttaatttattttttcttttcttctctgccctaatcgcaccaccatcttagtcgcattttttt

SEQ ID NO: 307959 - DNA, 2940 bp, Cannabis indica
tttttcaatttttctataaaataatctttctgaaagaaaaaaaaccatatttttacacaaaaagtaaaagaaactaataaaatttataattttttcatcatataatttaaatttttttaagagagagaaagatagaaatttctattaatagataaatcaaataatagtctattacattatgatatatcactcaaagaatagaattaacaagatagaaaagtcataccatttacaaaaataggaaaaaagaatcaacaagatagaaaaatcacaccatttacaaaaataggaaagaaaaccctgatagcacctttaaataaaataattttgatattttaacaattaaattttatgttttccaattaaattgatattttgtttggtaaaataattattttctatgcttacttaagttttgaggatttttttagtagtccaaattatacttttttatttttgtgtttcaattttttcaaaaaatattggcttttttttttcaaaaaaaaaaaaaaattattatgtgagaaaaattcaaaaataaaaattgggaaaaacagtaaaaagtaactagttactctaaggaggtaactgattatcccttttgttaccctaaactatttttctcatactttttaacattttttttttatttttcctataaaataatcttttggaaaatctatatttttgtaaactttcccaaaaaaaaaaataaataataatttgtgaaaatacttaagtttaacttttggttgcagataaatacataagtttaattttgacggtaatcatatatatgttatatttctagagcttatgtaagtacctaattgttaagtgataaatcactatccacgtattatttttaaataaaaaataaaaatttaatgacttagaccaatgaaggactgccacatggccattgacttgatacttaaatgttacgtatttacagaagttctagaaatacaacttaaacattattactgttaaaaattaaactaaaaaataaatcaaaactgaaaattacttcttctctttttatatccatgcatatgattataaataatcacaattatataaggttgcaactagtggggagccagctataaatattaggtggcaaacaaaattaattaaaatggtcataaacgaatatatatatataagggacaaaaataaatatataaaaatatgtaaagataaaaataaaaaatataaatttataaagacaaataaaaatatgtgatgacaaagctaaaatgaaaatatataaaaacttcatgcaaaaaattaacttattaaaaatgaaatgaaatcatgtgaccctatataaatctcaaactatatcacattaatttcctcttaaatttggaaaacacctcgttgtatgatacaaatttataaatctttaatcaagttgtaatatgtcacagcaaatgcatacatttacataaatctattctatttttaatatttagttactgaaaatttcgatcaaataggcgatcccaatcctcaatatttttaaattagatggtggaagaagtttgcaaaagcagaagcaatgaataaatgatcgatgaccatgacctaaaaaccactatcacaagcatataacagcaacttaatttattatagtattattggctgtcgttcagttttgaattagctatggttgttagttacttgttaggattgtgaagttgtacaagtaagccccacatacatggttgttttagtagtttgaactgataatgagtcttggtatggtagcctcccaaaactgactgttgaccaaactaaaacaagataacaaagttggctaacactaaactaaacactgtgtaataattaaccactacaatacatatatagaatttaattaacctaccgtttagactctcactattttcaattacacattgaataatcttcccaatgactaatgacttttcacatgtacttaactccaatgagtgatgatgtgttgtatagtgtctcaaaagtcaaagcaggtccatttaaggattaaattaagagaattgctaaaagcattactaatacctattactattctcagtattatattgttattggtataattaaaatattaagtctcatataacttaaaaaattaatttttaaataatattactaactaatcgtagagcgtcactatagaaagtgttaagcattactaatatctaataacaatgttttttaattaattaacaaagaaaaaaaaagaattgttaatcaaaacaaaacaaacattgattgttaatcaaaaagtggtgtttcagtttcttgttgattttttaaaggaaaaaaaaaatgagaagaatttaaaattacctctttgtaaggatataaaaaatgatgtaacgtaatatgaataaaagaatttattaaaattccattaaaaaaaatcatcaaaactattagaaaaaaattcttcttgcaatagaatgaaaaaacaaacaaaaagaaaaagaaatttattccattaaaatattttaaatacaaacaaacatattatttttatttaatttttttattgaaagtgaaatcaaacatattataaacacgttatttccttacaaaaagaaatattaaatacaaaaataaacatgatttcaatcttcattgtgaaaagaaaacacgatcgccaacttaaaatctctcacaaaattaatttcaatcactttaaaagttatggtatatataattatgggaaattctataatgcacctctttaaaatagatatattaatgcacccctatctattttagcacttgaaataattttttagtcaaaatttttctcatggtcatgtatgttatagttatttaagacaacctacaaaattttaagaaatttagaaaagtttaatacgccgaaaattacgttcaagtattgcacgcgtgattatttta

SEQ ID NO: 307960 - DNA, 1151 bp, Cannabis indica
aacgatcaacagcctcatccaaaatttcttatccctataagtaacttttttaaactttttggtacatattttatgtcgtatataaataacctgatatatatccaccactatacactgtccagtccacctatatatacacatatatggaattaatagatcgactctagctagattattgatggcattagtatagttagtaaattaaactatatagctcaagctagctatgcctagagctaatgctgaatcattaattaaaagaaaatgaagtagctagctagggtagtgaagcacactaccctctccataatattgcttttactatatatttgcatgcctttataataggttattcatgaatttactatgtttttattttattttatttttatttttttggaggaatttcacgttaaaaatgtggagtatccgataggtacaatgcaccttatggagaaagtgttttgtaaatacaaaggtttattaactgatttactttttacaccctatagaatatagatattaatagggttaggttttcattatttaaataatagaaaattgaaaaaagcttatctatatattggagatgatgacagtacgtttcagccttgtatacatttctatctatatatctatatatattgacattaaatctctccccaatatctcctttactgatatatatatatatatatatatataacaacagagtcaatgggactactacgtagaaggggcctatatatatatatgatgactggcccttctaatttttaagattttcttaaaataatgtattttaataataatataatatcgatcacaataagaaaaaggaaaaaaagaacaatatgtatggaacccatgtagggtttggatgcatggctttgatctcatagctagttagcctcaatcaaatccttaaataaagatgaactgtacttgtttgtgggggaaggggttaattattaattggacggctaagggtttcatagatctgaattactttatttaatataagataaaacttaaaggacaaaaagaagataataagaagtgataatgatgtatatatgttgaggattttaccaccgttaaactagtcgctgtctaatgttaatatagtgttgttcgtttatttccttcta

SEQ ID NO: 307961 - DNA, 1670 bp, Cannabis indica
tttagttttttagtaattttgagttagtgttatggattgtgggtcaaattctaagtttgtagattaattgttattttataaattgtcattctaatataactgtgttttttggttttgtgttttgatgttttttcagtttcgctagctctggtgataactattattaatgggcaggtgtttttcaatgagatgaggtgttatttgaagacgatatagctttattgtctaaattttatggggcagttttgtcacatgtggcttgcgatttgatttctgtaactcatggtttggcaaatcatgcccttcggttagacaataagctatcctggttcgaggaggttccatcgctgatcgcggttattctgtgtgacttgtcaccacaaaaaaaaaaaaaaaagaaattacatgagaatatacaagtgtcgtttgttgggtttgtatcagttatgctttttaactaatttttgctcctcaaatgcttcctttctctacttttttttttaaattcctccatgttaaatgttccctccatatccatttctctcgaatcccctattgccgacgactgccattagcccctgcttttctgttctacttcttctattctcatggacctcttgatgaaaaacttgcattcaactctctcccttactgatgaggagagatctatctttacactctctgactcatttcccacaccagtagacaagcatccctcctctcttttggctagagttctctccacacaaaacatctacaaaccaagtttcgttaaccaaatgtttggcctttggcaaggtagattatagttttaattactgaatacaagggtgatgatggtttatttcatatttcttttggctgtgagggagacaaacttcgggttcttaacaaagaaccatggtattttcaaaaccatctcattatacttttggcgccagatgctctgcaaaatgtatcaaatgaaaatataattctcactcccttttgggtgcaaatttaccgactacctttcttgagcaaatctaaattgttggctgaagcacttggtaatgtcattggagagtttatggaagtgtttgatgactccaccaatgaaggttggcgtccattcttacgagtgcgtgttaaactttgtgataccaagcctctactgcgaggtcaaatgatccaactaccaaagatcgaggatgaattttgggttaactttcgatacaaaaggctccttgaattctgttttgagtgtggtcaaataggtcacccctttgaatgttgtgtcattttcatagaaagaatggataatggtaatgatgatgattttcaatacgggccatgaatgaagggtgctaaactcccgaccaatgactatgattgatattgcatgaatttttctaaaagaaatgcttggccactccttactgttaggctatttctagcctatattttggatcacttttatgttcgctttttgatgttttaggacgaaattatgcttgttttctatgttttttctcggagtaatggaagccccgggatgcaaatgtgcaataaaagacaagtggagccaagaaaaacgtcaaattcaggctcaacgcacttctggtcgcggcgagatagccatggccgcgtccataaagtccaaaacaaaaacacggtttttggaagctcca

SEQ ID NO: 307962 - DNA, 1535 bp, Cannabis indica
agatgttgtagtctttcatttagtaactcctattaaatttaggtaatagtgtttgagcattctttgacgattccattgcgaatttgttatgtttattgatggtaaaatttactgcttgaagtcataactctgatgacaaataatataactatgacttgcttacaatttttttcttttaaggtgtatatcattagaacaaattgtcctgatgaagtggatggtgctcttgggcttctccaattagaaggtcacatgaaacagatgactggtaaacttgtttaaattttggcttagaaacagctttcccttctcttttttcgttattattttcatttcatgtcttattgcgagtcatgcaggaaccatcattgcttgtgaaaaggaaaccgaaagtttaaagcctgatgatgtcttggagtgccctcataacaacacacaaaaaactacctccgggacatcagaacagtctgataaagacactgaagttttaggacctgaggctttggatggaattagactttcagatgagtcagctgtaagctttgatcaagtgaaacatttagatgatttcaacattcttgttaatggtttgatcataaactctgagcttcccaaatacttgttggccaagtactacgagctctgttgtagtcagaaagcatttcttcacgagaatattctcgagggcctgaactgtaaacttgttgctggggtcatatcagagacaatcaacatagccgacgccatcagagcaagcaaaatctccagctcggtcaatgatttcaccacttgggaaaagaccctgaaagcctttgaggggttaggcatgaatgtggaatttttgtgttatcgactagagcagctagtaagtttggcttcaaaatcaaagagatacgaaaaggtcaaagttgaacacaaagatgccaaggaggagttgcggaacttggaggcaaagatgttggtagtaaaagacagattgagtaatcttgagaccgaatttgaggccgttcgagttaattttcaagatctccagctaatgttcaaagaagtggcaagcgctccttggtgattactgatgaggaagcttcattttgttgtctctttattgagaatgcttcatatgaatgtgtcaagtactctttagtctatactaactacatggtgaagaaggaaatctttgtatgaggagtatatatatatattaatatatacacgtatatatatgttttaaacccaactttaaatctttctaaacataaatgtacttatggggaatgatagcatagcacctttccttttcctctccattgaatcaacattacccaaagaaacaaactcatatgccactttaaagtttcctgaattcctttcctctaatatgatagggaaatttacacccactactgttttttcccaatttattacttttatactgttgcacggcaaatacaacatttatacttgttttttttttttttttggctagtttactgccttcaaaactttagccgcttgatgtgagtggtgtttgtttt

SEQ ID NO: 307963 - DNA, 674 bp, Cannabis indica
ctctctctctctctctcttattaagggattatactgtttttgtgcagttcggttatggagcactacgctaaatgcaaatcttgtttgctacaagggtcataattaccctgtatgggatgtacaggtatatcttgccatttttatatttttcatacgagcagtttctcttgcatgagagggttattattagtgttgatttgacatgcaatgatgtgtgtgtgtgttgttttatataatttattaaaagaagtgttgtaggattcagatttttatctgctttacttcttctctctcaagaagattttgcttcttaaaattcaagttccaacgaaattatttttaggggtatgggttttacttctgttattaatatttccagctatacaattgttttgattcttcactgtctcttccctttacctgcattaagtaatggtcatctttccttagtagcaattttaatctgataacttctttggttatgaattctcggagcagtatagtcctgtaggacactatttcgctagcgcatcacacgaccggacagcaaggatatggtctatggaaagaatacaacctttgcgaataatggcggggcatttatccgatgttgatgtcagtctctctctttctctctaaatttgtgttaaatgcataatcagattggtccaaaa

SEQ ID NO: 307964 - DNA, 2838 bp, Cannabis indica
gctaacctgcccgaattgtcaagttcctctacttggttcgatatagcaatatcattgttaggagactggtgcttcaggttcatattattttgatccccgtcctaaattcaaaggagaaaacccacaataaggaacattgaaatctgaaatctaagatagattactaaagagtaccaaaatcattaagatttccaatttatcttttcaggtttatcaaaatggcttcatatatacctgcaaagaagacgcgctgcccatgttcacaaggactggtgctccttgaggctcacttaacctacccgaatcatcattttcttcaacttggttcgacttagtaaacttattgtcatctttctgtgtactagaagccttagctttcgctgcaaaatcatagtgaaactactttatttctctattctttaccatacatacttaaataactcgaactaaacaagctacccgaggaccgatcattcgtacctgcagttgaaagttgaaccttttcaagttcaaatgttgatgaattaacaatacaaggagacatttgatcttcatccatgtttgttgtacatgatgttactttttcagtaacactaccccaactacttccatttaaggttggtaacccaatacttctaccttcatcacatgttgatatttttcgattctccggtgtaattaagttctcctgaaagggaaataaacacagacaaaagtttcaatttcggtccagcctgaattaagaatagctaacataacatgagcttcaatacatataccacctttgatttgtcaacccattttccatcaatccaatccaagtgataacgcagttcagtgcgatcaaacatcatctccgttgtgaacttcctcccatgatcgaatttaacaatgtactttctgattagaagagttttagtgactactccaactgaccaacccaaatcacaaagagcatccaccttatccaacacctcgaaaactttatcaacatcactcgtttctggaggttggggtcgaatcatctcccgatctacttcgaaaacgccctcatcacgatctttaatattcttcttacactttaccccaacagaagttttaccatcaatttccccaatcacaattgctggcatccatgcagtgattacattttcaggatttagattcacttctacagctgttcctgatctgaattttgaatactttagttcctgttaacaatcatagcatcatcataattattcgcttatacaaactaattatcacacaagttgaagcaaataaaaagagagtcttgatattatctttcaagtttcaactctaaaactttaacttataacatacataaaatagggaagtgaaactgtttatccagaaaaaaagccataattaggaagttgaaacaaataaaaaagatagttttgattgatactatatttcaactaaacaagagattacatctcaattcaatacaaagatgaatcctttgaagaccccaaaatgcaaactagaaaaatcaactgtcataattatttactttaaaaaaaaaaaaaaacgcattaaacaagttgaaactacattgtcaagtttcaacactaaaatgcatgtctcaatacaaagatgaaaacttgaacaaaaccctagaattgaaaccatgaaaaagactgttgctttatgagttaaaacaaagaatacctgttttttgcctcgaacccatttctgatcaacccaatcccaatgaggtcggagctgagaccttttacacaagagaatatcaggtgggtagatgaatcgaactgtataatcatcacctctgacattaacgacgactccagtccaccagatttcgtcgtggaaagcatcaacggcttcgtatagatcaaagggcttatcagggtctgtatcaggaggaggatttggtctgactaaaaaggagtcaactttttcaacaagaaggttatcgttgtcatcttcaagcatgtagagatatttaacgacgagttttgagttttgggtagttttggaataacgcttggtcttcttcttgatgtgagagttagagaaaggagaggtgggttgtcggagaacggtggccgggaaccaggcgttgagaaagccatcttcttcagtacagacctctactgttgaacctggtttgaaatgaagattctccatttccatttccatttctatttctgaaagtgggtttgaagaagaagaagaatgagaagagttggtcttcttccgctgcattttctttaattgattttaattaaagagtgaagtaaagagactactctctcactatacttgacttgacttgagtggaataggaagggaagggtctctctctctttgactcattacaatttttgaagaaatcaaaagtagaagtatcggacaaggcatccattttattagagaagtgctaaagggtactaatacggtctagtatcctcttatgtgtcaatattgttattggtctaattaagtattaagtcttatctagtgtaatataatagcttttatggaatatcgctagtcaatcgcaacgcgacgtattgaaaaaatactaggcaccactggtatctaatagcaatgttcattttattattcacaacattaagacacaccaaagatttacactatcattaaatttggccctaacaacatctctaatgaaaaaatttaaatttagtgttaaattaacatcaaaaaaattactattttagtactattttttttaattctaactataacaacaaaaattgcattaaatttaatattatttattattttattaatataataaaaatattttaatactaaatatatata

SEQ ID NO: 307965 - DNA, 3046 bp, Cannabis indica
ttatattccactgcacccaatgtgaggtttcctaaactttatatgtgtttatttcattgttttagaaattcatattacgatgtcaatgaaacatagatggtagtaaatcttgatcccggtaaaatatttccaacaaagattgtgtagaattttatcaacaaaagaagatgcaggtttagatcttgatcatactctgcgacagaaaggttcaagggttaaagatctaaaaagaatgagacattatattctgctacagctagccactgtaaggttttctatagctttatatgtatttatttcattgttttaggaaatttatttttaagatcttagattatcaataaacatgttagtaaatctagatcctagtaaactaagttccaacatctattgccattggattgcgtggctcggttgatgaggatctcctcatcaataccattgtcagccaaatcaaagatgattgatgattggtaaaaataaagttgtgttctttgctctcaatgaaagtaccaaactatcgacctcacttttagtcaacgacacttgagtctttaatgcgataataattttttcagaaaataataaataagagcaataagagcacacaagattcatagaagttggacccctaataatagtaatagcctacttccctttttgttgtattacttaaaaagaattatcaagatcacatggtcgagcctggtgagtttcttaatatactcgataaagtttacaagtatttttacagactgactgctcttttacaatgtggaaaaaggatctctaaatagtgatatgatctcactatctatagggaagatatagatacaatattacgaattagtaagagaagatttaggaaaacataaatatcaaatcccacgattttctcaatcatataaaatcaatcccatgaagatggggattttcaataagctataattatggagatatttaaggaaaatatctttaaagatctttactcaatgtatgcttctatttagatagtgacaattacttagcatgcctcacctacttggagtagtgcaaggcttcgggcctgcctggatggtaaatggtgaaggtccagacttaactggtttggctttgactcaatctggatgaagctataagtgtgtatactctgtccaagtctgaatatttacgacacgtgtcaccctactgagtgccacatcaccttgtgcacaatttgagataatagtttgtttacactatgttcaccatttgttttcattttgacatttttattttgtttgattttaggaatgagaatgcaagtaccctgaatctaatctctgtagatcgaaagtgtcacccacttgcaattaaagtctcattgagaagcttaattctactctttcgagaaatgtcaaggctttgttgaagtttccccatggttagtcaatttaataagaaaatttttagaacttcacattaatgtgtcaaatattatgttgttaatgctttacaattctgttaatatttatgatatgtcatacaactttaaattaacttttatgcaatacttagatgtagaaaataaaaaaaaattaataccttattgctttgacgtggaagaataggcttggatcgccctctatcctctatggttggtaaccttctttcacttggtgtttcaattgcagttgagtattttcttggttacattccaacacttgtttcaacttttgtacaagttcttcatatttgtaattccttgagatgaattcaccactagcttcgtaatttacataatttattccttaattaaactgaccattgaaaaatatgagaaaagaattgcatccctttcttgacattttaaaaattcaattatagtcaaccaactatgaaaaaattgtaaggaatgaattgaaagtaatacatgtgttgttagggatctacgttacaaccttaaaacaattaataacatccatgaggtaatataaagaaacttagcacgatagagtttgcctatatgagtcgtgcattgccaatttcgaaccctgatattttacataataatattgtagtagaacaactaatagggaactgaaaaattcacaatataggcacaactatgtatgaacaatgtgattataaacatcattaagaaaaaatttaacaaagtattattgcagtgatgaacaatgacatgtacgttaagaattttttgtgaagaaacaatcgtaagaacactgcaaaccaacgtgaactcaacaaatgttaaaacatgaaaaaaagttgaccctattagaattattttttattagagccttgtgttggattgtctatatgaaatacctgtaaataaaattaaaaatattgtagcattatcaattcgtaattattgatacgtcaattatcggagggttgaaaatacagatggccaactataatgcagttacatagaaacaaaaaaccaaaacaatgttgccagatctttggcgcgagatgaatgtgagtttactttatttgtcgtgatcaggattgaataaatctaggattgaaattttgaaaaactacattaatgcaataggtataatattagctactgtagtgatagacatttttttattatatcttatttggattgatgaagaagtccagatctatttcctacatgtctatatcttatgaatctgtaaattgaatttaggaaatttagttttatgaaatttgaatgacttttcaggttttgagtttatgtttcaaattagttttttctacagaatctttcatcactggttgattttcggtttaatttttttctactgaagtgatctcgctagaattaatggtgtttctttgtcagccgtcattaattcatcgtgactgacctccttccgtcgtaggttggcttcatttctctgatgcgtggagcatgcgacttcaaggttagagtaagaggtatttttgttatttttttaattggactgtataaatgtttatggctaattaggattttcgccccctgaactttgacatgtaccaaatcatgcccctaaacttttaaagt

SEQ ID NO: 307966 - DNA, 2147 bp, Cannabis indica
cccatcttccctggtgctggagcaacataaaacctaaaattgaagaatacaatagtttttaaaataacaactgcagtatgcatactgacacattgacacgcagactgtaataagtctggaagatggcaattatacagaaacatgttcaaaccccacaggagacatcttttatagtgtagagaatctatgatggtaatgccttagtagaaaagtgaatgaaaaaaagatattgcacattattagcagcaacttgttgtcaccagttctaagtgttttagtacaagaatttaaccatatcacttaccacaccacgagaaatgttgtgagatagtaggcagtattcagtagcccatacgataacactccagcaatgccatatctcttcagtttctttatcatcctgacatgttaatttagcataaatgagattctcaacaccaaagtacacaccgcaaaagctatggctagagcattctttcctcctttaaagacacaatttcatgaccaaataaaaataatccttcgataatactcaacaaaatagaaaaatgaaaccccacattgtagcagtatataaaaatgagtaatatgatgaatattccatttagtttacttggtataaaatggtctaactctgaagacctatccaattaaaacaactctaataacacacatgtctgcaggtcaaactatgatttgctgatgccaattttgcttgtggtgaatcccattataaatggagatcatatggcgagaaggggcaaatgtaactcaccctcatcatatcactaagaaaaaaaaagtagcctctaatattttgaccaatgacattgtaaggcaagtagtaagtactcgttggatttgggcagtactccttgaccagtggcatccttttcaggcgaacctaaaacagaattgcacatgttatagtttcacaaaatttcaattttttgttgcaatgaaagaaaaataaaaatagcattggtcaatttccaaaacaacaattttatttagttggcattactgcataccttcatgttcaagggatccactttgagtatctgacaaaccacgaggctaatctcacataaagaaaacagaaggcacaattaaaattaaacacttttcccatggtagttactgcaacaaaaacaaaacaaacaccatataaagtgataaaataacgctcaagagtgcataaatactactgaaatggagacaattttcattgaacccaagtgacattgaaatagtagtatgttacacttaagcctaatttactttataccaaattggtaatttagtggctagtagcttatatccatggcttgaaggcaaacccacgaagaagggttgttttaaaccagaactagattagtctactcttgtaaggggtcagtactattacagagaaaatatcaacattataggaagaaaatgcttttcttacttggaggaataacaaggcatatatttagagataagaaagtaaaaactcacatcaatgtcgtcgccgttaacagagcaaaatttccggaattgggtatgattgatttcccaaaggttcatcttccgtggcaaaaacggggaagaaccaatatagagtctccggcaagagaagttgttgataccctgctaaggcagagaatcaaactgagttagaaaaaagaatgagtggcaaagagattggtgatgggattgtgattttaccggataacaggaaaatgagcaaggaacggtgggcagcttcagagaaagagacatggctatggcggagggagagattaagcagagtgcttaaagttgggtactcaaattaaatactcgtaactataactaattaccaatatttactggatcatgcctaatgtgtttctttattattttttgttttaatttttagacagaaaatagaaattttcattaatagacaaattatacttcattgaacaaaatcaacaataatagacaacaacctcaactaaaaagaaaaataagcttctaccaacctcaacaggtgtatggtttgatttcgatcaactccgtaccggagaatttattgtgtaacgaccgtgaggtctagttttatttaatatatttttacgcttaccttcaaaaaaaaaaaatctaatatataaaaatagttt

SEQ ID NO: 307967 - DNA, 885 bp, Cannabis indica
ggacgaaaaggttcagtatattcaaaataataattttttttttacatacatatatattattttattattattatatatatatttataaacatatttgactcggtcaaaccgagtctttacaagatatctatagggtacaaactgttgtgccctactcaagataaaaaattatggagtgagcaggtttgggtaaggttcaacactcctaaacacaactttataatatggatggcagtagaagggagattgagatcggagagactacacagatatggtattattgacaatcctaactgtatgatgtgcaacaaccatgaggaaacaaatgatcacttattttttggttgcaacacgtctatgaaatttttgacagaagttgcagcttggctgaactagagagctacagataaaacattgactcgaatcaccaaatggttacacagaactatagctaaaagatttcagaaaaaaagtaatagctgttggtttagctagccttgtgtatcaactctggaaagctaggaatgatcggatatggcaagggaaggagcaaaacatggcacatttagtttgaagaatcaaagagactgtgaagcaaagaattgtattagtttggcctagaaaagttagtcaaaaaaatgaggaatggtttaatactttgtaaatttatgtatagaaaagattaggccataacaaacttgttatggtgcttatagattgtacaaattacagtttaagagcaataaaattcacctaattgataaaaaaaaatattaacatttgttgctcgtttcaattcattaattaattccaaacagtgaactggaggagaatgtatacagactactataaaaattttcctctaatagtggtgaacatatgcaa

SEQ ID NO: 307968 - DNA, 1618 bp, Cannabis indica
aaaaaaatctgatttaatatcaaaatcaaatttttattcaaaatcacattttaaataaattcaaaaaaacaaaccataagacttggttattacacaataaccgaaataatacacctaaacggtgtcagtgttatttaataataactgaagacataggggttaatcgcgcttaggtagagaccctatagaagtgattatttcataataactgttgtcataaggggtctttatgccttcggttattttaccaccctttagcgacccttgagatggcaacagttgcaaaatttgccaaaactgcctctaaaggctaatttgtagtagtcgtctttcacacattatttgatataagaccatcttgaatgtatgatataaaaaaagtactaaatttagcacaaaaagaaagtaaatgttatattagcaccttttttataggtgctatataaaacctatggagattaattgtattatcgtgtcaatacaattatgacatgatatgattattaaatgtgttgacatgatacggctaaagtaaacatgatcacgacacgattatcaaaataaagtgttacccaaacttatttattatatgtttcttgtcattttcgtattgtgactaggggcaaagctaaaaataaaatatatatgtggggcgattatctatttttatagtgacatgttaagggtatctatagtgcctagcaccctttatgaagtgtcataagctattggtgcaatttaatatcgaatttcacttattttacttttaataatgattataaaaaaccaataactatttatcgcgcgttacctcgtggtggtaccaaagatcatgtgtttaataacaatacttattcttatattatgtgtggacttcaatatttaataaaaattatataattgactataataaaatataaaataataaacaattacattaaaatatattttaatgtaatcacattttaaattaattgctaagttcaaatcccattaacaatacaaaaattaaaatgaaggtatggaattttgaacttaattgtgatctccttaaattttaaatacagatttaccaatatactaaacaatacaatttgttaatatttgaccagattaatatttgtataaaggccaaagataaattatttaagttaaagctccaaataatttagaatcgagtcaaattttatataggccgggtggtcgctccacttagtctgcatgtagcttcgcccacgatcatgacccataataccaatcctattatttagggtttctgattccaagaatagcaagtatatttgaaagtggaagagtcataactgcatggaccagaaggaatgatataccacaaacatgtacgatttggaagaacactacatttagggatttgaggggtaacaatgtcaaaaaggtggaactcatttccccatttgaactcacaagacaccacaccatcaaataagtcattattattgtagaataaaatgaaattatacttgtctttgtagggcacaacagattcaccaagattgttgccttggatttgcattgaacactcaagtcttcttttccatccaaaacattgttaatctgaacttgtctgtaacaccccgat

SEQ ID NO: 307969 - DNA, 1669 bp, Cannabis indica
ttaaaataaaaaaacgataaaaaaaaaaaatctcacctgcgcagggatgggataaataatcccagacagatgaggttaactggattagttatccagacttctaacatgcccaaacactgaattggacaaattagcctgtctaatccaatccagtcctgcgtaccaaacgggtctttagggtaaacaatgagttatgatggtctgaagtagtccttgcactgattgctctcattcttttgcttttttatttttctatcaccaatttgggcagaattcttcccgtacgatttggctttagatagcaacaaaattattggactattttctaaaagaaaatgtgatatttttgaaaattactaaaaaaatgtacattttcaaaataatttttttatttttaaactcctaggattggtaggccctaggcctgcgcctgacccgcctttgcccgggcccaaccctgactcgtaatggcgagtttgctttcgattttgtaaaaacttgctttcgattttgtaagaaccaatatgacaactaattcttctagatacctatggaaatattttggtgtgaaataggacttgctcctacaactcctcaaagttaagatctatgggagtctgttaatgaaagtgttgacaatgttgttatgagtaattgaaagtagcaattcaaacaagttatgggaaaagctttaagatcccaactattaccttttgccaaagtcaagtaagtattcaaaactaaaaaatatacacgagtaatttgcagtgtaaatatttaaatttaatttgtgttgcagattaatatttaaatttaattttttatagtaataatacctcactgatatttttgaaacttctgtaggtacctaacaattaagtattaagttaatagctacatggttcacctgattggtccaagtttttaattttttatttttttattttaaaaacatttaaatttaccaataagaaaataacatgtagatattgacttgacagttaacggtccgatacctactgaagttctaaaaatataacttaggtattattaccgtaaaaaattaaacttaattatttattaataattaagagttaaatttaagtatttgcgcaaatatatatacatatttacatataacttggaaagaagactaatttcggctaaactagtttatggttatactaagcattaagttccatttctatattaaggttcaaatatttgaaccaaacaagaaaggacttggtggagcagaaacttgaacaataccttcaagcattagcataactttcttcatggaaggtcttaaagaagggtcttcttgaatacaccaaattgcaactctcaaaaacatctcaaagctcttcatgtcttgaatggcctccatatcatttccaaccaatacatccaatcttccttcaatgtaacaatcataagcccaatacactaaaatgccttcttcttcatcactaatttcaatatcaacatttcttctacaacagatgatttcaagtagtaacactccaaagctatacacatctactttaactgtgattggcatgttgctaaaccattctggtgccacatatccctttgtccctctaatggctgtgttagtatgactctggttaatcaacaatagctttgctaatccaaagtctgcgat

SEQ ID NO: 307970 - DNA, 2897 bp, Cannabis indica
aaaagcagattcatatgacaatatatatatatatatatgtagatctaaaccacacaaaattaaacagagaattacatagaatataatatatattaaacaacttctaattaccacaaacttgcataaaataattttaacaatctaaccctaaaaaatatcccaaactaataattaaaattatttttaccattaataataacatcatcttcttcttcctccttttcttctttcttcaacctataatatagcttaataataataaaaaggaaaaaaaaaaccctacccaataagtagtacctccataatattagatcaatcaccatatatatatatatatatagctcattgatgatggtgatgatggtggtgatgatggtgttgacccaaatgatgaatcaatggttgaggaggagcaatctgctgctgctgctgctgatgtggcggtggctgtgctgatgtcatcgagaactgttgtggcggctgaggaggtggatgatgatgaggtggcggcggcggtcgttttctcttcttcttatcataactaattcctctagctttagactgcaaatctcttacctctcggagatagagcctgacagctctagctccgaaaggattagcttcgggtttgcctccgtttcttcgaaggcagcccgaagtcgccctataagagcatccagactgccccaagcctgacggagcggacagggacaaggggcaggtggattagggtgcccgtaaaaggggcatattggtgtgtggactttagtcttaccaaattggtctaaataacggagaaattcgagaacatgagctccgctgcatcgggatagagatagcggaggccggtggttctttaggtattgcccgaaagtgttccaatctcgacgcttctgattctcgtaacgactactgctgttgttgctactactactactgctcgagttcgatgaaccaatcagagtagtagtagtagcgggaacggtgccagtatttgtgatactggcaccgtctgaatttgaactatctacttctgcaattgaatccataataatttttttttcaaagattggatcttggattgtggctatagaaaaaaattgtgagaaattttattcttgtaaccaaacatatatatttgttctagggttcttgatgagagagaaagaaagagagagagagagagaaagagatgaagttcagttaaggagaataaggacgtatatgatgtttttgggttcttagaatttgtgcagaggtaattaatttatttatttttaattattattattattgtcaattatatttatttatgtaatatataatataaaataatatagagaaaaagagaaagagaagacttactgtttagtgaaaacaacttcactaggatttaaaaaattaaaaataaaaaaagagggcacgggttgatttgatattattattattattgtttatttaaatattttgatttattaattatattaaatttatgagcattcatatttgggtacgattaatatttaatatcactatttatatacgtggccttttgtgactagtgagcattatattttaaaaattattacactaaattatataggatctaatatttaattatactaatagtgatttgatatcgagagaagggtgctaataaccttaatgcttttttaatatttctcttttatatgttaagagagaaatggtaaaaagcaccactcgtgactagtatcctctttagtgtcatattactattggtgcagttaaatatcggatctcatatatatgatttaacgtaataatttttaaagtaatttgcagtataaatatctaaatttattaacttctggttataaagaaatacttaagttcaatttttagtggttaagttataatttttgaacttctgtaagtatctgatcgacttaagtgtaagtaaattgttacgtgacaatctctgattgtttcagattattaattttttttatttaaaaattaatttaaatataccaataagaaaataatactagaataatgacttgaaattaacgactaggtacctacaaaagttccaaaaatataatttaagtatttttactgtaaaaaattaaacttaagtatttatcttcaaacgaaaattaaacgtaaattactccaacttttaaagaatattactaatcgtaggacactatctttaagtggtatagtactagtgtctaataacaatacttagatatatatatatttatagggatgaaaatgttgaagcaaaagagaagattttttattatgatgatgatgatgattgtaagttataagacatgactgttttctcagtttgttaacttatcttactattttttggtttctttgctttgttaatttgagtaatactagaaaaaggttttggtctttgaagagaaagattttggttactgtttttctttttcttttttttcaaatattaatttattattattattattattttgccttaaaagggtgaagcaaggtcatgtcttgtgatctactctgcaaaatattaactttgtattgataatatctatttttattgtttagaaaattttcaagtatttaaaattattaaataaaatagaataaatgattttaattattaatttatatattgaatgacagttgctatagctccgtgaccagaatacccttatggaaacttatttcattgttttactttttcttcttcttctcacctaattaaattttaaaacctttattttctgacacctcaatttggatccacacatcttactttgctccttatataagggaaatttacatggtatactaattttggatatttttttacaaaaatattatcatgcgatattttttatttttttactgtgtttttt

SEQ ID NO: 307971 - DNA, 2071 bp, Cannabis indica
catgtaaccagcctttcttttcaaactttttgataagcgcagatagcccctcggcacacaaaatgaagatgtatggtgagaggggatcaccttgacgaatacctctactaagaatcactgcccccatctctctacccccatgaacaatctgataagatccagaagatacacacttcatgataagacgagtccaactctaatcgaaaccaagtttagagaggatagctccaagataagaccactcgattctatcataagccttgctcatatctaacttcaaagccatgtaacccttccttttctttttttctttctctttagataatgaagaattttaaattaaacaaggatattatcagtgattaacttgccagggataaaagcactctgcgtatcagcaacaatcttgtccatgattggtttcatacgattagccatgactttcatgataactttgtagatgacattacaaagagcaatcggtctcagatccgccatacgcaatggattttttttcttcagaataagaaccacatttgcttgactacacccattttcaaactctccactttgaaagaagcgctgaaccactagaaccacatccgtaccaacaatagactaacacttttggtagaaggctggggtcattccatctgggcccgagcttttatccaggtgcatataaaaaatagctcttcgaacctcatcctcctccaccggttgaatcaggcttgagttcatctctaaagaaaccaccctgtcaacacaatcgatgactgtagcatgatcaacctccgaagcctcaaataaatttgcaaaataatccaccaccatctcggctaaaccagagtcctaatcaaccaaatccccatgcttattaagcaacttgtggattgaattattttttcgtctcgtgctagctgccgcatggaaatacttgctgttagaattgccttccttgagccaaagtttcttagaacgttgcttccaataagcttccttttgatcaagaattgataacaatttctctttagccactttatatctttgaatagaggcttcatcccgctgatttttcaacgaatccaattcttccttgcacttcttaattctctttttaaaatctcccgtgatagttttaccccaagcaaagagttgatcggcacagtaggaaatctttgacgaaatgtcctctcccgaactattgtcccagctatcacgaacaatttggaagcacattggttcctttagccaagcattctcgaatctaaactttctagtacccacaaagctagttttgacaatcggctcaagcaagataggacaatgatcagacgttgaatgcataagattgttaaatcttgaaaagggaaatcagtgaagccaaagagagtttaccaatgctctgtccaatcttacctcgatccaattcacacttccatgatatttctcccaagtaaatgggtagcccaccaactctaagtctgttaaatcacaatctaaaagcgcttgttgaaagccttcaattaagccattcgggtaaggattgccacctttcttatcttcttgacttaccacattgtttaggtccccaatagcacaccaaggcaaatatgacgtctcatgaagttcacgtagcagctgccatgtattgtgtcttaagtttctcctaggttcaccataaaccccagttaatctccaactattatcgccttctataatgaaatcgatatgactctgagaaaagccaaccacacgcccccaatcactgtctttccaaagaaacgccagccctccccctcttctttaagcctcaacacaaaaacacccctcaaagcccaaacttatacggacccactcaattctatttttcaaacattttgtttctcaaagaaaaataaattcggatttcttttgagatacaatctctttgaggaattgaatagtccataggttcccaagtccacaacaattccaacttagaatattaatagggaaatttacatggtatactgacttttgccattttttttttacaaaatactgccagacggtattttttacattttta

SEQ ID NO: 307972 - DNA, 3018 bp, Cannabis indica
tttttttttttctgtattgttttgcatgtggcggtcaattcttgtctcattactgggttgggtgtccattacttttctggtataggtatgacacgagtattgggcatgctcaatgactttgaggtgtgcttgtcatattatacaacttgtcttctatttgttttgtttcatatcgaacatgtggatctagtactactttaagagtgtaaaactccgaataaattttgttatattatgtgttacagctccgaatgttgcctgcaagaacatgaatcttgatgaaggcacgttggtgttagtgcggtcttggatcaatggttttgggaaatttttgttgcatgttatgggttaattatgtttattgaagattccaacagtggatattgctgggtatatgaatttgttggctgcatcactgattgactttgtgggtctcattatattagtttatccacggtcatgttggtttcaaattctggaaataatgatgtggtttggtcagtatcaatttagactaaagaaaaaatgccattcaaaaatgaagcttgtgagggctttttaaagtatttgtggatgcatgacactgtatgatctttatagcaaacctatcgtcaacgattatacataattataatggttatcctgagctgtatatcttaaggaaacctgctatgtgctggttggtctacttataacaactgtcagaagatggaaacttttttgactgcttgaaattggctgcttctgaattcttcctgagatgtgatgtgtcactacggaagatgtttgctgggccacattaagcttggtgtttctggtgctgcgggttcttgtattttgcagattggaattctctttataacattcagcagtttagttacggttcctattttctgttttatttttttcgttgtgtttttccattggatttaattaatagggttcatttgggtgatttacagctgtataggtttcaacattttcattttttttaatgcgggttctgagtgcatggccttttgggactcaacatagattcttttagttggttcctcatcttttcatgtttccacttctgttttttttttttaatttttttttggttgcacatgggatgagagatgccttaatatcttcatcccagtgtcattcagagtgattatgcattctggtgtcaatggaattcaccaatttcttgatttacaataaaataccgggggtgtgttaaagacttttaattatgtaataaggaatggacaaattgggagcacgcaatttgtcaaattgattggatgcttgcagttctgtggtcttctttggtggactctttctcttgtgtggtgtgtgtttccatgatgctagatgtgtttcaactgaagggtttgaaacctatgcactgggagtcttcttctctttgctgtgttagaaatcatttatgtgccttcatcatctgcatgttgcagatatggtccaagttatcattctaatcactctctatatgagtgctagtctgaagtttttgctccagatacatgattgtggattggatcagataaaatatataggtttaagtgggaagtaagcattttatgattcatggggtaaatggatgtggctcttgaaaataggatctggaattgtgttgttctgcagaaagcagctaccaatcaatcgtgtgtatgagtgaacatggtcttattgctcatgtcataataacatttactggcactatgggttattctcttgagaagtaacaagaagtgcagtattcgaaagttgtaatatatgctactcagtatgggatttcatgagtgatggtaacagtctttgcaaactttgttgaattggtcatttgggaattcaggatctctaattcagctgctatgagtgcattattctttctatgtaattaatggttgcttatctttagacttcactgcctcttttccaggatatagactacgtgcaggttcttcatctcctgtacggaggagggatgctgatcatcgctacaaccctgatattgaccattctggtgcgatggcacgcagccgtgaagttggtagcacaagggatactggtagatttcgagatgcttcacccccttttgttcgaggaaggggtggtggcaggccatttggtagggcggctgatggtccagatattggccgtggaccattcagaggtgagggcatgagcaggaacaatccaaacgtgcgtccaagagatggagactggttttgtccggatgttgggtaagttgtttttttttcctgtcttgctttctatatttgcctttgcatcattgctcttatttcttttatctattaatgttttttttttggttctgtactgtcttagatgtggcaacctgaattttgcaagacgagactactgtaacaagtgcaatagggctcgacctggacctggggaaagtcctcgaaggggttaccctgttccgccacccccagatgctattcctagacgatttgctggtcctccactggatccttccccaggaaggattatgaatggctacaggtcccctcctcgtgcttgggctagaaatggccctagagagtttattggtggagatctgccacttcccagacacaacgacaggtttcctgatcatcacttgcggagggatcgactggattttccagatgacatctacagagggaggaccaagtttgacaggccaatgcctttggattggggacatagggatcgaggaagggagagcttctttaatgataggaaaggatttgaaaggcgagctcaatctccacttccacctccgccaccacctcctcttagtcgtggccgttgggggcgtgacattagggagagaagtcggtcaccaataaggggtggcttgccgccaaaagagtaccgccgggatgtcttcgtggaacgaggtcgagatgatcggcgaggcatggctcgaaaccgcattgatggtgcatactgacatggttagggatgccttttttatatagagagagagagagagag

SEQ ID NO: 307973 - DNA, 1610 bp, Cannabis indica
acctaaaaaaacaaatctaaataagctctctaattaaaattttacatgaataagcttaattgagtcctaccaaaagagcttggaatatttttctcttatctaatcagcccttttcttttcttaaagaacccaataattacaattcaagattcccacaccaacgaatataataatatacgtacatatcccacaaatatatatttataaaatttccatgagaaaatatcaattaaatggatcaaacataatctttacacaagcaaaaaaaaaaatggccatactaaatatatacttttctttcggtctttggagaaacaaatgtcttcatatatatccttatctttattctttttacaagtgtcacatatataggatatatcttttagatatggccggcctatataataacgacataaatgaattaattcctcccaaaagtaataaatagaataaatagaacatacccattactaataagaaattaatcacaatttaataatgattataagtgtcttatcaattaagagatatttaagtatgtgattatttggatttggattctatgttatgatagctttttctttgtttctatataaaggcgtgttttcccataaacttgtatgcatcaaaaaacacaaagaatactaataaaaagtacttctttattacaacaagctctctttgctttgttttcttttttccttgttcctattaattagtacgtttgtaattaagtttcatataaagctagccctagctatatcaatatatcatcatcaatggcgccaggaaagactcattattatatgcaatcaacaaatattattgttgatcatcatcagcaaccttgtgtggcttacaaagggccttatgtgaaaacagtgatagttcctcaaatggccgtgcaagcacatattactcatcaccatgttcctcaagtgatgaaaacacatgaaggtggacatgcagtgtttacagattatggtaggactaacaaatttcctcttagagctatgtaaaacacatgtacaaacactacttttatatattagtttggtacttgtgttatatatatatataaggactacgtgcgtactttgtttatatatatatatatatgctcctttactttttaatttaggagtggaaactgttaattttccaagacttaattgtactttagggacgatgtacttgttacatatatgtatatatatttagctgtcctcctctccatatacgggagtgatgtactgtgatatataaaaaaaaattaatgttaattatatatatatacgtgtatgcattattatatatatatatagttttttccttcttcttcttctcattattgttattataaattagctatttcttttaagttatataaaaacaaaaatatataaacaagaaatatatagtttgaattatttcatcatagctaatcaaactaattaatgcgatggaattatgttggatatgatcatttactataaatgtatagatgtatatattgtttgcatattattgtggacaaatgtcatggaataaatggtagagaattgagtcatatataagaacatgagctactccactcattgccaattggt

SEQ ID NO: 307974 - DNA, 1348 bp, Cannabis indica
ttggtccatgtgtaggggctgccatgaccatgaatggggtgatgagtgaatgtatcgaggaatttcttaaaagatgtcaaaggtcgtttgttaatatcacccccaattttgtcagaaagtgagagaaagtcgttaaatttgcccattagaagccaaggcaaattgtgaatagaatctccaaggtgatgaagaagttgccacgtgttagtctgattgtatgatgtagaacccgtaaaaaccagtaaaaatgaaaggacaataattggacaatcaattatagcagtgaaaatgatttatattataagaaagtaaggttacatcaacatcttgagtccataacaaaaggaggcccccactaaggccgacctgagggacttcaaaaccgtcagcaaaactaacttagtacaaaacttatttatagcaccaataggtagtttagtctccataatatacaaaatgattggtttaaactgcttaactaaaagggaaagttggaagaatgctcatttactccccaatccacgagcattcgaactgatgagaatcatggctcctaacgggtgcgttgcacgacacctgcctcattggggtttctttcatccaagtattttgtgagactttgattgcgcttgagaagcttcttgaactcagcttcattgatgccagagggacgcttggggcactgaggtttggtgcagaagaaactccaagggaaaattgcatcgtttgagaagtcgttaaatctgccataatagtggaaaaggctcgtgacaccgggacactgtgttagtttgatgcttcggtgactgaagggattgacatagttggcagtgtggacaagtgtggtaaggggacatttagttgctccatacttgtaactttattatgaactagaggaggagatttagacaattgcggggcagtagttgttggtattatatttatccaggatcttagatctacttacaagtatgttgatttaacaacctaatattgaacttctaaaacgatgaactaaacacataaaagttaagaataacttacagtgattgcagcggaattaatgtctccttccactcagatctctaacccttgattcctgtctgtagcagagtataatcaagatctgagcccgaaagttcttcagttggatgtgatccttcacagtcttccaaactataatgaggtactgaatgatgtgtgtgggcacttctctctcactaggaatttcgaaattttctctcttgttttctctcttgatttcgtgtgacacacaatgcaaacaaaaatttctcatgcacaagcacacaaagagaagagagggggcggctataaataggaaaaggga

SEQ ID NO: 307975 - DNA, 1525 bp, Cannabis indica
tatccaaggtgtaagtaaactttatcgctgattatcacgttagtgtagatctagtacactgataaatcatgagactatactttgaagcatataatcataactattttctactgtgatgacatcactgtaattgtgaataactatattttctagatttatcaaaaattgtatattaaaccataatcatgaaaataacatgtaaacttaaatgacttctaatcttctattgatagaaaattagttatattgaaatgggttttatttagggcataaaatcccaacactaatcctaattatgttttgactacaaaggcagtccgcctatccaagactttgatcgagtaaggattctctgttgtagagcaatgtggccttgggcggtgttaaagaagctcagagaggctgaaggtgaaatggagacttttcaaaatgacacactggcagaaaaggcccttacagagcaagatcagtaggcactgaaggccaaggatgaaaccctaatctctgttcaagctaagctaaccaaggtggagacagatttgcttaatgcttggggaggagaatcaaggattagtgtccaaggttaaaactcttgaggaattgcaccaggctgacatccaaactatggtaagcatgtccatggaacagaaaaagctacgtgaattttgagaccaagccaaaaaggaggccgcaaaagctacgagagaggcctggttgactatggtgacctataagcattgtttaaaatgtttctaggacagagccttcatgttctagaaaacgaacaagtttgaacctcgtctcacttttatgtcggatctttaggcccccttggctcaatttttgggagaaaaataagaagcttgaacagatgctagtcgaacgagtgggtccccatcttcctcccatagcagattaattaacaaccatttctaacaattcctttatttttactctcgctagaacaatgttttaatttttattcttcttttgtttgttttttataagcagcacttataggtatatatacttaccattctttgttatttttacttgcatatttatgcatatatatgcctctagtaacccctaagttacttaaaataatttttggatcacttagtctaaattcaaaataataacatgtatattatactaggttctcaattcacaaaaaggtgtctttaatttggaaaatgtaaagatgaaatcaaataccaaacccctaactattgatagtacttgcagaggtgatcgacatttcatgctcttgagattagggatctacccacgtgttttagcttgtaggtctcggagcctattgttggaatatattttaccaggatctagatatactaacaagtatgtttttaacatcctaatatgaatttttaaaacgatgaaaataaacacataaaaggtatgagaaaccttgcagcggaattaaatgactccttccgcttagatctctaacccttgtatcctttatgtagtagagtatcaccaagatctgagcccgattctc

SEQ ID NO: 307976 - DNA, 3201 bp, Cannabis indica
aacaaattctagaggcttattaaacttgcagaaaaagctaacaaattttccaaatatatgattagcattcattaacacgaaagacttattcctatttttctaaactatcttactataaaattagatatattgaagtaatacaatgtggtgtcaagtttcccctgatattctgagtgaaagtatagttatatgatttatattcatcaattcataaaatataaattagattttcaaaattatttctctgtaattaatagtgtggtgtctaggtcttgagcaatattcaaaggtgcttttaatatgaaataccacataaatgttagtataatatatagtcatttcatattcctggtagagacgaacaaaatacaagtttcaaaatgctttcaacgagagggggaaaaaacaacaccaagcaaagcattcatttatcatcttcctcttacactaacaacatcccaaaacgcaaatgccctactttgtttctagcattacattaacaaaatatatttacacctacgagaaagaaaacataatagtaatgatctaagaattaatcaccttataccaatgttaaaaccatataattcagtaccaaattcctaggatgaatccacaagttattcatacacaacattaagagaagaaccaatcagtgagaaaatgtacctcaattcttcagtagcagaaacaaatattattattttgcgtcactgtgaaaccatgagcagctaccacagaaagaaaatcacaatcagaggccaagagaatcagagacagaacggaagaaagggtgagtgaaacgtagacactgaacgaagaaaacatgggagagaaagtcagcaacagaaaaagaatttagaatgggcttggcgtacgcctcaacaataagaagaaaaacttcctacaatatcataaaactcataaaaacaacacataattccacaacaaagtcataaaattcaagaaaattactaattaagtcttaaaatcataaactaaattgatagaaggttcaatttcaaataaaaaatggtgaaagctctaaatataaaaatttgttaagaacttagagggttagggtttttagggacattttcctatcttttttattaaaaatctgttaaaaaaagatccaaactaaagctcattagtcgtttaaaagtatgaaatagctattagaaaagttttttttaaaaaaatccaaatcagccaacaaaacagccctaacactgaaaagaaaaaaaaaaagacccgctgttgaggtgtgcacctcatgcgcctcggtatgcatcacctcagaggtgtgcgcctaaagtccacctcgtcagtgtgaggcgtatgcctcaatgacagcagctgcctcagctgcgtttttcactgccttgcctaccgattttaaaactatgcctatctcacagaatttcttgtggcttaacagagtatttttaaaaattcttttagtttcaacagaaacatgtcaaatactaaaacaacaaggcttaagagatgcaaatggataaaccataattgttcacaacttccctaaacagactattagttggtagctattcaatgaagtattgtcaaaacttctctaaacagtattaattcgtaactattcaatggcattgcctattttgcttctcccattacaataccagaattttttttgaacaactacaaattatctctccaatcaacaacacaacattgttccaggtaacttatttgtcactatgagttgttaaagtaattgcaattctcctagaaacaccataaatataaattagattttgtttggagagaagtttctcaatgtcaccaaacacttcttcaactacaagatatagaattatcccaaacttaaacatagtcctaaaataataaatatatgtacgagcaaataccatacaaatgggattcacatgaatgaaacagaacgaaaaaatttattgaaccaaaatcagaaaactatggaagtttcatcggccctagcccgtgggtttcaaatcgaaaaagattgagaacaaaatctcgggaacatccagattagaacaaagtatcgtatgattattaagacatattcatagtataacgtttcaacacaatttctaaatcttagaacaaaacattataacctaattatgagaaacctaactattattaaaaagaagaaaaaagaaaagagaattggataatagctaagtaatatccctgtagaatgcccgtgtagaactctatacaaaacagagaaaatcacttagaaaactcaaccaaccatacaaagtttcaacctaacagagcctcaaaatcgtaagcacagtacctgttgtgagtgaaataaatgcttatccggtcaatgagtgaaacggaattcgtccaatacgatctccgatccccgatcagttagtgtacgaggttgttaatatttctagtgtagcgctgatgagttggtgacagaaccgaagaaagcctaaaactaaaagggcgataagagattgaggaatgaagagaaccaagaagttgtgctggtggtatgaatatttggatgagtctaatgtatatgacttctagttttgggtctcctatcatcattgggctaactcaaataatacaacaaacccactcctttattaaaactacccgtaatttttttaatatttttaaaattgcttttttttttcttttcaacaaaacaaaacaaataacttttctttaaagagataattgcggtaaaagtctccaaaaacttaaggttgatgcagattaatactcaacctcaaaaattggcggtaataatccctaaggtctcaatttttgtttgtccgttcatacccaatttaacagcactgttaaatgctgataaaaaagccacgtgttgagagttcattggtacatatatataattataattaaaaattataaaacatataattatttaaaataaaaaatctgatttaataaaaaatctgatttattaaataaaacaaaaacaaaaaattctaaatctttctctctctccctcgccgtctcttctccttcttctaccatattgtttttgcagaagcacttaaaatcaataaaaaaaatcaatttattaaataaaaaaaaactgattgaataaaaattaataaacttaaaaataattttttacttctaatcacttctgaatcaatttatttttttttcttctcctcc

SEQ ID NO: 307977 - DNA, 1866 bp, Cannabis indica
atatatatattactttgttttttacctttcatcacatccaatccagtacttcaaattcatgaacttaagaagttattttttaaaggcacttttcacatatttttttttttatacaaaaggttaataaaggacaattattggagatggggcctgagaaagcatcacaaatacatttcacaagattaaacaaaataagtctaatatgaatatgtatgtacggatgattttacatatatggatgattcaaaagaaaccagctgaaatttaaaagccttgcaataaggagtaagttgtacaaggttgaagagatttaaaacaacccaacaatatgttgatagttgataccatataaaaacctaataattaaaagaagactagccatgcaattttttaatttgccttctttaattagtaatgatggtcatgatgctcatcctgccaaacacaacaattaataattaattaataatagtcacacaaattagaagaagaaaaatcataataacaatacccaaaaacatgttctgttcatatatattattatagatctagatatagtaaggaaaaactcacacttttgtaacgcaagaaatctagaaacttgttccttccctgaaaaatgtgatgatgaccatggctattatatttcttgatttgttctctcacaaatctcttatacaaaactgctgcacctttaaattggggaagaaccaaccaacccacaaaaactagcttcacatcataccaaatagacaccctatacaacacaaaattacttacttcactcaataaatatgatatgaaattattattatttataaattataaaaaaagaaatatattacgtctctagagctggttgaatgatgatttcaataagagcaaggaatgagtatataatccaataagcaagccactgttcatcatcatgttttgttatgctctccatagctacaatagatgcatacctaaatatatatatacacccaaataaataaataaatatgtatatatagttaaatattcatgagttacaaatattaaaaatgaggaaattaacttacaagggatagagcaatgtcaagatgggcctgcaaaaaattaattgtatcattaaataactcaaaaaaaaaacaacaacaatagaaaaaaagaattgaagagtagataaatgtttaaatgttttagtttagtacccagcaattaaacgaatttgactaaaaatggtaacaactgcttcccccatatctgatcttgcttcttcttcttcttcttcttcctaattagtgggtttttctcagtgagaaaaaataaaaataaaaatgaaaatgggtggtgagcaagatatttttcagggttaagagagagagagagagaggacaaaggttagaaactttatagagagaacaaattacaaaggtatgaattattgaagaaaaaaaacgtattgagttgataggattggatccaatgaatgaatcaaataaaacgacacgtgaatgtgagtcctgacacgtggcatgacgaacaaaccaaacatagaaaaatataataattgttccaacaattgtttgacactctcacctcactaactttgtgtaaggactaaggtgagccaagattttaattctcacggcaaaatcaaaagtgaaccaatttttttatattccaacaaaaataaaatttggtaaataaagacataagttcttaaatttctttgagtttgtatacagtataaataatttagggattatttcacaaaaacataaaaacaacaaaaaaaattacaaaaatacagtttcacgaaattttaaatatttttacgattttttttattttatttacagaaaatacagtcttttatgt

SEQ ID NO: 307978 - DNA, 652 bp, Cannabis indica
ttttttgtgtaaaaaaccgaccaaaccgaccgttgctcacccctacccatattgccaccccttgtctagccaccccttctaatctgaacctccctcttttgggaaggaaagtaggaaaggtaggctatcttttaatgaaggctttttaataaagatttggttgtgctcatattataaatgttgtcaaacataagagccaaccaagactcctaataaagctttatattcacaatttcttattggcctaatagataatttttaattcaacaataagaaaaagaaaattacaaataaatttctaaatcctaataaaaattacaggcagcattgaattttaaaaaaaatatatatatttttctgcatggacacaacacaaagatctaactctcaaaatattatgcttcttaaattaataacacaaaattcttttgtaggtcatgtctaagattcaatcttaaaagattggttggttaggtacacatgaaaagtacctatcaaattgatgttactagtcggtgctatttttccatgaatatgaaaattttaaatatagctaaaaataaacatataataccaaaacgtttgataaaaataaataatattaaaaaaaattataattttgcatgagggctatatatataatatatatata

SEQ ID NO: 307979 - DNA, 1410 bp, Cannabis indica
cggtttttaattggattttgagattgatatccaataatcaatccaatccaattagaatccaacttttagcatccaatccaattgtaattggatatccaactttttgtaattagattgaattggatcgattcagttcaattggattaaattagatgatgcccacgtatctatgtatctttcctttccatgtaaaaacgagaacatttacctgttgatttgctaaatacatatactcattttctaaagttacgagattatattgtcaagtttccattcgtgttcatcataaatgatttgtatatgaaaagtatgattaatcaaaatttcaatatattatattaaaaacataataaaaaataaatattaggtaagttaatcaattattcatctatcaaaacaaattgagtattttctaatttgtttagttatcattcatttccatgtaaaagtaatttcttttacgagtatgttcacctatcaccaaatacaaatactcttcttccaatattacatgattatttatcaagtttccattcataagtttatcaattattccactatcaaaaattttaatgaattttggaatatgcataaaaatctcaaaataaaaataaatatatataacaggtaattaagtatcttaattaaatatttcttttaacatgagacttaagatatacttatatactaaaaataagctgggtctttttatgatttgttttaattattatgcactagtatatatattttctatttctatataaacataatttcttttacgagtacattcacttactctcttccaaatacatatacttttcctccaaagttacgagattatttgtcatgtttccattcatgagttcatcgtcaattatttatctatcaaaaatatcagttagaatttcaagatatacataatctcaaaaaaaataataattaaatattagttaagaatttgaaatatttcctttcgatttgagacccagctcatactaatatactaaaaacagattctgtaaaaataaattcctttttaagagtatgttcacctactccaccaaatactaattctctttggagttgcaggattatttatcaagtttctattagtaagttaatcaattattcctccatcaaaaattttaattatatatttgagtctattaataaacttaaatatactaaaaataaattgattttttatgctttgttttaattattgttagaatttgtgataagatgaatgagactccatatcaaaatcaattggcgatggaaggaagtctattactcttatatattttattatctttccacatattagcaattggacaactcgatcatttgctctactttttggatttttagtggctctttctttttcggctctacttcaatcggtttatt

SEQ ID NO: 307980 - DNA, 2435 bp, Cannabis indica
caagcaattgataaagtgaaccaaaacatacacaaatgaatgaaaaatacttttgtttctttattgatgttgaataaaatagattacattgaaatggagttttatttagggcataaaacctaacaaaatacttgaccaaattgaagaaaaacgagcctcagcaaacctaaagttagtagcccattaagaaaaggtggctcgatacttcaacaagcaagtgagcatggaattttttgtgggagatatggtcctcagaagagtatttctgaacaaaaaagatagcacaactggtgtgctcggacaaaactgtgaaggaccgtattaggtggtcgaagttctagaatcaggaccatacaaacttgagcggtatgacaaaaatatggaactcgttttggtgccaaggtattggaaaggggaacatttaagaaagtattataagtaaaaataccatgtcggatgaccactttaagtacaaaaagaaagaacatttacttttaagtaactggccttcttggcggaccgcgcccaaggattatgatggaaggattaagtactcacgtcagatgaccacctttgaaagtacaatttatttttataactgcaattattttatgtttaaatttagctaaagattggattagatcatataatagctttcatgaatgtaagttactactgtaacaattgcagctggtattggaagaaattggtaggattcaaggacaaggtcaagctcaaaatgtggctagttttgtcatgtagaaatttagaattcaaaattgctaccagttactattcagcaaccaagggaagaaatcatggtgtaaatttttgtgggatagattgattattcgtaaacacaaatttatactatggttgttgctttaaggaagattaaacaccaaggaaagaattggcaatttgacaagaatatagacatgacatatctattgtgtgggaaagaaaaagaaacaatagagcatttatttttttcttgtgaatatagcaggaaatgcctaactgaactgaataggaacctgcaatggggaacaagagcaatcgaattgcagaaaatcctgcaatgcatcaacaaaatgaaggcctttttagcaactcggaaaagcatgatggtcagtctaatggcagggttggtataccacatatggggagcaaggaacgatgtgctctagaaccaaaagcaatgaaaaatctgagtcatggtgaacagagttcagcatgacagcaaaaggagactcacaggggtgctaccgagtaaaacaaaggaaacggataaacaatggttgttgaatttgtaagagatttcataaagctaaaatatagtgtataaaattcatatttatttgtatatgaaaagttgatgtaattgaatgtttgagcaatacaacttctgtattcataaaaaaaagttactacggtaacaaaaatattccgaccaatgaatcaataaagatgtctatttaaattctcattgtatcgattctattagcacgtcataaatttaccattaaatgcgtacaaatgtctgctcaaatccaaagaaccgaacaaacaaaaatcatacttgtgaaatgcaagtgaccaagagtcatgttgacctcgcttttagccaacgacagtgagtcttaataataagcgataaaggatataattcatatatgatatgaaaagataaataaagaacacagggttttaaaagaggttcagccctgagcagttcggtaatagcctactccccttgatttgtattgacttaagaacaaagaatacagtgattcctcgctcaaagctcttaccatgaaatctctgagtatgctctcttagatctctctcaagtaattctttcacctcttttctagtaagaatgaatcactatttattgggttatatgcttgagggaaggtttcccttttacttacataatctataattggtaagaatacatattacatatttagaatacactcattatgggatttggacagcttgccatatctctgtgatacgatcccagatttatagggattgctcttgcgtttcacgatgcaaattctggaattgctaagttttgatatgtggctcgaattgtccactgctgagctaggaggacctcgtccgtgtaggcatatgagatgttctactcagaacatctcctttgggcaggtatggagaattaagtccacgtgtcaccagcatgtgatgtcttgtcagagtgcaaaaattaggataacattttccccccaagtttgtacgggactttcgaagttgcgtgtagacttcattcaagatgacgttacgtttgagtgggtgacacgtgtagaatgtatctgttcgtgattcgatgtgagtatgaccagcagtctctttggtttttgggtaattaatgctttgacaaattaatacctcgagacacgttt

SEQ ID NO: 307981 - DNA, 1733 bp, Cannabis indica
aaaatatcttgagtcgtctaattccgaacaccattgtaagagttatggtcaaaacattatcagtcgtcgcaccaagaagtttgctgcccaaaaaatgggtacttggccgcgacactgaaattcaatgttgcagctcctggagcaaaagcagcgtatgtttatgcaaatgtgaagacatgggtcgcgacattcaaaacccaatgtcgtggctcgctaaggcgactgggcagtaaaaggtgtttttaaaccctaatttcgtgtggaatgggagacttttgaatctagagacttttggagggcaaaaatagagagaggaaataagcttggaggctacaattattgatcttcaaagagtttttttcttctatctttaattttatgtttctaattagtttttatcaattgttcacaatgacaatgagtagttaaacttttaattagggtgttaatgaatattgtttgagatttatttatgattttaatgaaattttagttctttcccaattttttatatgcatctattttatttatgtttaatgcttataatttcttgatcactaataattaatttatgtttttaatgtaaaatttgaaaagtgagtattgattatgctacagtgaaaaaacatagattttaatgtcggatgaaagtacttgtatggtctatgtagcaattataatttctatctttaatgcaaattatatgtgtaatttactacagaagtttaggacttttacatatagtttaaattctatatattctaataagaatatagattgaagtagttaatccgctatcacatgaaattagaatataaattaaaattgtattaggaaataagaaattgatacaattgaaattaattgtgttaaactttgatcatttttatttgcttattcttttacttctttcaatttagtttttaattttaaatattctttaaaacttattgtcaccagataaaactaagcatttaattgtgtagtacttaacaacagtccttgttggttcaactttatttgcgtgagtatattacttgtaatgatacgtgcacttgcatattagaaaatttcacaacaagtttttggcactgttgtcggggactattttagctaatatcaaaataattaaattttattctaatttagtttctttgaatttaatttttctaatatttgtattatatgagtttgtcttgtgaggtacataaaaaatgctacatcaagattaccttgtaagtttttctgaacaatacagtgagtcagtttatgcttcttgggggagatttaatgcattgatagaaagatattatcacaatttctcaagtgagtgtcttattctattcttttatagtggattggatgatgaaacaaaaatttggatggattattgagcacgagtaactctagagtctttgtcaagaagaggcaatgatgatataataaatctgttgaatgacatggcagattttgattactaatggtattgggatccctcacttcagggtggagtcactaataccctccgtattgcctaaactctccccaaccatttcaggaagagtagaataaactatcacttgcagaagaaatgaatcacttggcggatatcgtaagatctctgtatgataattttgttggatatattttaccaggatctagatttactaacaagtatgtttcattaacgtcctaatatgaattctaaaacaatgaaataaacacataagagt

SEQ ID NO: 307982 - DNA, 2041 bp, Cannabis indica
ataataaaaataaataaataaactgacctgaaaattgaagtgattgcttagttgttgttgtgttgtgtgttcttagttgttatggcttgtgtgaggagaagttaaattcaactatggcaagtatttatagttgtaaaagcttgcttacgtggcaaaatttgattggatagaatgattatgagttttgttatgagtattccaaatcagcttgtgttctaaggttatatatttcatcagtcaatggaatctttttaatccatggatccacaatcattctttttcatccaattagaaattgacacattagcagaagaatatatatgtttttttttttcttgttagaaaggaatgaatagaaagaataaaaggaaattttgattgtaaattaattccttgtgacatatccttgttgaagaagtgcaagtattggttcaattatcaccaaaaatctaacttattttataagccaccatcttttataaaaaaaattatatttttacatttaagaattttttttacattctacgattttctatagacacaaaaaaactatataaaagtaatataaaaataaaatcaaaataataacaaaacataacatataaataacaataaattaataaaagtgcaacataaaaagaccatgtattctgtaaataaaattaaaaaaatcgtaaatttttttaaaattctgtaaaatcgtatttttataaaattttttttattgtttttgtgtatttgtgaaataattcctatttaaattgaacaaaagtcttatattttagaacctatgtagtttagaaagaatttttagcaaacaaaatttttggaaaatacaatttagtagtgctaatagttcgtgaaaacaaaaatactaaataacttaatttcatttctaaacttctaattaggattgctgatcaaatgaactcttttttttttttttttttgataaagttaatcaaaatgaacttttgatatcaaatattagcaaagaactattgacatggctagaatttctaaacaagttatgattttattttagggtaaataccattttggactctgtgttttgcaaaagttacagattggaccatctgttttgttaaatgacaaaaaaaaaccctgtattttttaaaatggtaaaaatatgaccctgaactgattttttgtcaaaataaaatttaataataatccgatctaagagtattatgacaaaactgtatacattttctgtatctgttcgtattttcaagttggttatattaaaaaaaaaattgtcaaaaattaagttcagggtcctatttgtaccattttagaaaattcagggtccattttgtcatttaacaaaacagatggtccaattgataacttttgtaaaatacagggtccaaaatggtatttatcctttattttatgtttatatgtacaatattttacccgtttgtgaaaatttctaaaaacatatattttaaataggcaagttgcatgtttgtctaaagctcccaatatattaaaaaaattaagaataattaaaatatttgattttaggactaggagtgtttgttgggaacaacttgcttaattagaaagataactaggaaggtagaaagtgcatctctacattttaaaattagtggaaaaaaaaatgaaaattttaattttggcttaatagtatgttttgcaatgtaaatatgatacgacctgatacgaaaaaaaatatatgtgtttaagcatgatacgacacaacatgaaaaaatatgaacttatgtacagcacgatacgaaaatatgggtttaagcacaacacgacaccacaagtctaaaaacacgacatgtaagcatgaataaattagctcgaaaatatgacatattgcaaagctcaataatttgatatataataataacaataataaataataaatattcatttatcaatcaaaatgatagtaataataattataattatttttatatgattgtgtgtaactattattaaaaaaatatataaaaataattaaaactataaaatacacatatat

SEQ ID NO: 307983 - DNA, 2116 bp, Cannabis indica
ccgctattagtgttcaatgttgtagtgtcataccatgtttatttagattagcataagtagccaaataattaagactagctttccataaaaaatcttgatatttgggagaagaaaaatctttaaaaattaatttccaccacttaaaaggtcctgaagaagatgagtcatgacctcaaccccatcgagcaaccgagctccaatgataaatgttaactgaaaactacccattaccaaaataaatccaaattaatttatcatgtctatcaaaacttgaattaggaatagataaaatatatttcaacataaaaactataaatattatttcttacaaaatacaatatacataaaactacgtaagtttattttatgtttttaattttttaaattttgttattgcagtttggaacgctaaacttaaaaaaacatagatttaagtgagtgaaatgaagtaaacatgagagaggggggacagatctaaaacaacattgatggtggccgattgaaccagatcgatctatgaatgacaaggaagaaagagagagagatggaggaggttaatacctgtgcgtagaagctttgtctggctcgatggtggcataaggagacgatcaaagtgaatgcgagatagagagaaagtaagaagtgcagtttgtgcatgcgaatgacctttgagagagggagacgaagacagtctggaggcactcgtttggcttgatttagtgtattttgaacaagaaaagaaacttttgtacaaatacactaaacattattcatattttgggtttagtttttgtctggttattttcttgtctgttgaacttaaccttgtcaattggtaaaatgtcttgatattatcttttggattgttgacattttttttatgtctctcttcttgaatattatgcttggacgttgatcataatttgccaatggggagattgtaagtgccatgttttctgtatggaaaattatgttgctttttacttatttaagtgtattgtgttctggttgctgtcttggcttattaagtagttcatctaagttgatcttagtagcatctacttagattggtttcatttatcattttccaggtcatctttttagttttttcttttaatcagtgcagttggcgccagctggcttgagctgttgagttagttagctgagttggtttttaccgaagtatgagatataaaaagctgatattgcttttttttttttaactaactctccatttttgatagaatcttctagtgattcttgctctgctaaagcaaaatactttcctatgtttctttgattatgtcttgcagatcgtaattcataggatcttcaaaggttgaaggagtgtggatctaaaatttctgaagagagtttagactgatctactggagggatatcagcttggtggaagcaactggatcttgtcttcttggatctaagtgagtttaaatccgtgttcttgattgtattcaagagttaagtaaattttgtgtaaagttatttcagattatgttgcctaatttataaaatcagaactggtgaatgtaaatgaaataattttatagtagatattactttattcagttcttagggacccaagcactactcagttggaatgtatttctaatataaagaaacttggtaaatttagtgttcattgagttatctttctagctttaattcatctagattcatacctaaatcaattacttagctttcagaattactataactttcaagatcattcacatcattgagataaaaatattgagtgctttttactttttctaaaatgagctttaattaccatatgtttagcttaaaaagtttgtaattttgatagttttttgagtttagctatatcccacttaatatattaaacttttacaatgcacattaaggaggtctgtttggacatttgagaaaatttgttggtaaagttttttttatagtcgtcaatgtcgtaattattagaacataatttaatattttaaaaaattcagaaaaacttaacacgctaaaaataagattcaacaatctattttgcgcatgtataaaataaaagagtcttacgtgtaataaattatttgaacctatttttggcatgttaaat

SEQ ID NO: 307984 - DNA, 1558 bp, Cannabis indica
  modified_base (8)..(8): a, c, t, g, unknown or other
  modified_base (376)..(376): a, c, t, g, unknown or other
ttttttanatatatttataaaaatccacataacaactaaagaaacaatttaaataacaactaaatccacatagaaactcacaaaaaccactgaaactgtaaattaaaaaaaaatgtataaatataattcccttaattagtttaattgtatatattaaattttcagacactatcaatctaatttgatgcaatcacaattaaatattcaatatttaaccttacttataattaaattgataggttgtcaaatccaatcacaattagtcaaattagatggaattttaattaatgtaatatgagtacgcttaactaaggattattaaagccactaaagactagcttataaaataagcattacgcaacattaaaaaaaaaanaaaaaaaaaaaaaaaaaactaaaagattagttaaagcctaagaaaatttacaggtgtgttccagttccatacaagaaaacgttcaccaaaccaaaaaacccatattttgtccctatgaaaacacaacaaaatgtaaagcagagccaaaccaaagatgtcatgaaaaggacacttctttcaacgactacaaaaaaatagcctttttcttctttctctacacgtaagaaacctggttatattctgctgaacatttttcttccactttttaacccttttcttaattaggttcttaaccatgtacagagtaaaaagtattccaaggagagcaaaaaatagttatacttataatattcactgcttcatttcatggacgatgaaacgttggaagccatagcaggagaccataaatcagcaccgttggtgtccgccacgtgtaaggtgcattccactggaatcaagcataatcccctgcttcgtaaatccttcttacctccattttcaccaccttccttatcctatacgtaaaatgatcagtttcaacaaaagcaaacaaataacaaaattgccactatacaatcacgatactacaggagaaatgctaaagggcaacatggcgtgtcatatatggtgtaattggttctgtacaattttagtttaatacattatgaaaaatgttatgcatgagaaaatgtggagagagtttatttagtgtgacatccaaaactctactctacaaaaagtttagctttcttttttattagagttagtcctacattaccaataagttagtcaattgattttaaagtagaatttcattcaatttttcctaaattctaatatagtttcaaaacagatacattgtgagctaattttgagttagttcttatatataagatgaaatcatattggacccacaaaaaattaccatatcccaaattctaacactctttaaaaccatataggaccctcaaaaaattaacactttcctacccttaaatttaaactaaacaatgaaatatttacacattcctccacaaccataccaagagcattacatgtatgcccaagtaaaatgaggtaaaagagagaaaagtaattttgtgagtctataattggattttttttttttgaaagaaccatgagttcattaattaagaagattgatgggaatcaccgggggat

SEQ ID NO: 307985 - DNA, 1500 bp, Cannabis indica
cttacaaaggtcgaatctcctaccccgacgaggggagaagggaaaggtgaatgtgggaagtcttggaggttctgctgtccccgagcttcttcaaaaaaacacgagtttggctggttgaccctctgatcatgtcggaggccacccgttctttcgagccttggcgaccttttgctcaaaagaggcaaaaccgtgaaaaaagggtagattattttgaggacgagcgacctattgggaactacagaaagtatcgcgacgtaaagcataggacaagggcaggaactttgtctaagcttatgtcgaaggcctagggaattttgtatttggaaggtacacttgccaatagtccatcgaagccccttcaatattagtaccaatcttatttttgtttttgggagggcctcatcggttatcattcccaaaaccccgtgcatactgaccattaagtgatatcctacatcagtgtcttcacctatgcagacctacttctttaggtatggtgcgatgcagacttgatggaaagtgcttcccgagttgttcaaagcagaactctaggaatgaagcttgagaaacccctagaaaataaaagacgagccgaagtcagtaaaattttcaaaattatccaagagagaatatgggctgaggatgtcaaagtggaaaaattctcgagagacgatgggaatgctgcaggaaatggaatgtttgtcgaaggtatgggtaggggttattcctacaaatatgcttgttccaaaacaacagggtaccgtacgatctccctcgatagtaggttactctcgagctcccagaacacatctcccaacactccctactctgccagcttaaggtaggactatgctacatgatctcagacccagagtcataccctacgtgttaatgggcaggtggctgcaacattagaaaggccacacacagctgaaagggatgagaagttctggaactgatagtgaagaaaagtttatgagaaacaaaatatccacccacttgacttccttaggcaaaagttttgctggttacctccacgaatggagaggccttcggttgtgttgtcagaaatctatctggtcccgtaggtccagtcacgtaaatgtcaatcaagctggcaccactatttgtcatgtataaaagggtcgcttggaaattctgaaggttgtcatgcagcggtaaagttcattgcagactttcccataagggtaattgcgtaactctgctcaagggagtgaaaggataaaagatcactctgaaaaaactaagtttttgcaaatgccaataattattacagaaatatacgaatataaaattgtatacatctgcagcagccaaatgtaattatgttactatagagaccagttttgctgagacaaaacagaacaggcaaaatataaaaataattgcaggaaattaaatcacttgacacaagagatttgtacgtggcatcagtgttctttgagacactactagtccacggggccacgcccagagaat

SEQ ID NO: 307986 - DNA, 1583 bp, Cannabis indica
tgtgtgggtgtgtgtgtgtgtgtgttgtgtgcatgcaggtgtgtgtgcatgtgtgtgttgcatgcatttgtgcgtgtgttgggggctcgcgtgccagcccatgaggggagctcacttgcgagctgtgtatgcttgcgtgtgtgtgtgtgtgtgtgtgtgtgtgtgtgtgtgtgtgcgcattatgtgcattcatgtgtgtgtatgtgtgttgcatgcatgtgtgtggttggggctggcgtgcgagcccatgtgggaaactcgcatgcaagccatgcatgcatgcaggtgtgtgtgtgtgttgcgtgtgtgagttgggggctcgcatgcgagtcgtgcatgcatatgtgtgtgtacattgtgtgcatatgagtgtgtgtgtgtgtgtttcatggttgtaagtgtaaggtgggagttgaatgtatattgacaaaaatgccattggagagggaatcaaaggacaaggcgtgcaaaagaaaggcatacaaccacgcatcctgcatgctttgaaattaaggaggtacaagtagtggagacgcgttgtttgcaacccccgacacctcgacaacaagtactccgcaaccaccactcctcccactcgggaccacctgacacgcgacaatggtagaaggcaaataccacctcctacacttgcaactcgcagccatacaaggccaacttgccccttggaaactacaagtgtatctcaggctaatagagcctataaacattttattctttgatgtgagacggggtcggaagaacagttgtgtaactcaggcattaaatgcaatagagaaattgtgtaactcgggcattaaatgcaatagagaaaaaacattcatccattaatatttgtatatcgtttcatcttcatcttcatcttgtttttgggtttaccttaaatttttgggccactaagttagttgaaaagttctcaccatcaacagtttagcgtcgtctgtgggaatgacaagctcaagtcaagtcatttctttgcacacaatcattacacaatgaccagacactcttattgtcatcaatagacatgactcaccttgacaaaacccaattgatcgcatcggagcgagacccactaccgcccatcatcagaaaaggggaggtgaacgtcagcatgactcaagtagatggaggagaccaacaaaaagcacttggaaaagtccccaaagtgttaagagacgtcagaacgatcataaaagagccttgcatatgaggcatcactcgtagggggagagataaatacacctaagaggcaaggcgagaacctcacgtctggagcttagagcaaagacctccaaagaatttcaagggagaaaataactcagtcacctttacagcggaagatacaagaggagtatatttcccacataatgactcgctggtgcttacatttaagatggctaacaccagggtgcaccgaacattggttgataatgggagttcaatggatatcctatacgtcatagccctaaaggagatgggactgggtcttgaggatctgaaacggtgtgcataaatcgatcaaatccaatgagaaccgaccgatccaattacaaccaaccgcc

SEQ ID NO: 307987 - DNA, 1895 bp, Cannabis indica
agagagagagagatgacctgaaaacaaaaagagaaaagcgaggactgtcgtggactgctttaataagaatggcttttagttgatgcaatgaatgattttttttctttttattttttcttgtggttgctttaaagagtactacttaagtatcaatgcttggtggttaaattacttagtataaaataatacaaaattaaacacaatgaagaatgtgttaattgaatagatgaataagtataagtgaacattggatggaaaagggtgagaggaagacatgtttgacttgatcatggattggacgcaaccctatcaactcgtccccttgtaggaagacaaaaagagaggtgcagttacggtaagaagctacgttagacacacattttttattttcacactacaagaaaaaggatttttgatggtgagttttctcgttgcaaaaatatacatatgtcgccaacattatttgccagcgagctttaacgccgtcaataattcgtcgacgtgtaacgtgttttgtcagcgaaacactataactcaccggcaaaactatttatcccaatcaaatagttgccgagtaaaagttcctcgcctgctatgttttgtcggctgaggggtctttgacaaagtttcccagaaaaatattgcaccgacaaaacatttgagccaattcgcgtctaatttttaattacccgcgaaagttttgccggtacaatatttttcaagcaaaacttcgtcaataaaaaatactttaatttttgattgcgagatgtagttcgccggcaatatatatatattttttaaaaatcatgtttataataaaattaaaattaaattaaaaccaaaatcaaactttttaagatactaataaataaatatgttctctcaacgtttgcactctgacgtggcatcacacgatggtgacacgtggaatcaactttacatacctgctcgcaagagatatgccgaacaaagcaccacatatattcgcacggacgaagccttcttaaccgggcagtgagcagtccgaacaacacgccaacacttagcagtttcaacactcacattgtgaatcactgaagaaatccctataattttgggatcatataccagagatatggtaagctatccaaatcccttgatcattgtattttgtattcaatgtgtaatcttgccaattatatctattgtaatcagaagggaaactttcttccccacagttatagccctataaatagcgatccattctcattgggaaaaagggggaaaagtttatctaagaattcaaattcagagatattattgtaagagctctaagaagaggaatcattgcattggggagtaggctattaccgaactgctcagggtcgaacctctataaaactcttgtgtcttaatttattacatctatattactacttgtcgcttacaatttagactcactgttgttggccaaaagcgaggtcaacattttggtgctttcattgagagaagaatcacaggatcgtctttatttcaaatctattcataagcacgatggtggtacagagtcgtaatggcgtggttgatccagcaaatccacaggcagtggatcctgcattgcagaatccagggaatgcaagggttccaccagccacgaatcccgaacaaccatcaactataggtcaaggtgtgacaactcctttgagtggaattgtgcctggtgtgcaagagactggaaatgccagttcggcagccaatcagggcattcccaacactgaagttccgcccacaacaaatgctcgaacaaccattagagatgcaccgagatccaaaacctccgtgctgctctttgaatcatgcaaggtcataccaacaccctgcatcatgatcaggaggaactccgtgctgcggtaaat

SEQ ID NO: 307988 - DNA, 2319 bp, Cannabis indica
ttatttattaaattaaaatatattaaattatgctaataataattctcatcttatttgatatttgatatcttaaaaatggaaacctttctctacgtcttcagaatattctctccctctttttttttttttatataacaacaacgtccaacccttaatttgatcacgagcaccctcaatttttttttaccaaattacttattaatgggagcacctcttccgagtaatatataataaatttagttaaatttgagcactatgttctctgtttattaattctactcatgcatgtgatcactcactgtatatgggggtcacaaaatattaaagcggttatatataattaaagcagaaaaggtaacaaaaagcaaagcaatgacaaattacacaacaaaagacaaatattggaaacttgatcttgatgatcatgatgagtagtagatcgagagctagctagtattctttaaatacaattcttacatgtgtacaaataaaagcaatgaagaaaaaaagtatatatattagacatcattgacactaattacaatgaaacaattatatctacccctataaattaatatagcatacatataatcatatatatatatatgtatatttcacgagagacaatctaaaactaataatagctggtgatcagcatataattaattttggcatatacatcatgatataccatcaagctgctctctcttaattaataaaatgtatataatatagcatcatttcctccagtagaaagcttttgatatcgatcgaacctatattattaactagaaactaatagtagttggaattacaatatgtatagtatacaagttaaaattggtcaacaaaaacagtaattattattggaataataaggccgaggccatggtgaggctggggcctctctcatatgtgtataatatatacatatatgagagagagaagggcagggaaaacagtgagacaggcacgctttgcttgatttgatcaaagcagacacatgcataggattgttacgagactatataaatatataaatatatataaaaacatatatattaaaatgattaatgtgaaaagtaacagaagaagaaaaaatgcagtagtactgggctctctttgcatgtcaccaaaacctaaatattccgtgttgttttatcttttttatcttctcctctcactgcttcccactcaccatcatcaccaaaaaaaacctcatcatttccaactcttacatggtgaaacaagatatatttatattgtacaaatattctttctggtcatcatataatctatatatatatttatatatatatatatatatatatttttcttttatggtcggctcggctggcccttgggacaaggcttgttttgcaaaacctaccactttcttctttgttatcattattctttgcattcgtccgtgattattacttttactaccaaaagggtacttgcaattacactcaaattgacttcaacatcaccttccccttaaacatttcaataatattaatcacaacggatggatataaattaaattaaatgaaaatatgaaaagatatatataataaaatatttcatatattatgggttataatttactgctaacgtaattaatgttagaaaattaataatttaagatataaatttgtattgtatataatttataacactatatataataatagatattaatttagtatacatattaggttgatctatagcaatgatttcaatttaatagtgtaatattattaactaagttgtaatgaccacatgattaagatataaattagtaggacaattactattaattactgttatttgatgattatatatgaatatatatgttgtaggtctcatttcagaaaatagacattagagttataatttttcaatttcgaaaattttattaaactctaagttgtgttatttactttaaatgaaaaatttacaatttttatgattttagctcgataataatagataatgcgacaaatggccattagagtcacatgggtgaacttgaaacctttatttagagggacaatcatatgctggattttgggatatcgaaaattaatgaggttatggtgttgtactattttgcccctaggctattttattacttaagcattaaagtaaagttaattttggtattttattttaagtggcaagtggattagtccactaacctctagctagtcattaatgattaagagataaacttgagttatcttttgtttaaagggaaaagtttagaaataatacaaacctagtgtgaagagcaaaaccatctcttgctctctc

SEQ ID NO: 307989 - DNA, 1514 bp, Cannabis indica
taatagtaatatagtaaataaaattatgtaaaagtttataaatcaaaataattagcggcactataataaataaaaaaggtaaaatttattatgagtcaaatttagaattatgttatatcttgtgccaaatttaacataatttttagcatatgtcaaaattgatattttttagaacatgattggagtagtatttttataatgtaacactgtaattcgaggtaattgaaggttttcaattaaactttctaattctcataaaaaatttccattttaaatattgactactaaaaatattatttttttggtgtaattattaactattttgccaaataatattataagaattcttagatatttaatgcctcatattcaaacatcactttattttttaaaatattatgtaattacttagtcactttcaaagaactaaaatataacaacacaccatttttttttaaagtattccattaaaagatgctcttacatattattagattcaaaacctaaattttagtatttatttatatataactgagaatatagacaaagtatttatgcagcaaattagtgaattaaaactcaaaaccagagaaaaatgtgttacctttgatttgacagagcgtttaatgagtgaccataatcctggaacagagataacaaagagacccaatgaagtgtaataactggccaatgagtaaccaacaacactttcagaaaccagaaacagtgaagaagaagaagaagaagaagaagtttctaatagctgttgttgaaggtcgagatttgcagcaatggagagagtttcttgaagagaagaccggaggatgagtttggtggggtttgaccttgttgtaatgggaagccatggatgtgttctccggcggttgtggtggtcggagaaggaggtggggagagtgagaagttgggtgtgtggataggtttttgagaagagctgagttgaaacttccattgttgttgttgttgaaggtttattattattattattagtcccacatcgatggagtgagagagatgagatttataagagataagattttcagagagagtcacatttgtgtgattgttctattttatcccaaagcttataaatagccacgtagtcttattctttttcttttttattatttctacaattgcccttttatttatagatttgaaatttgatccttaacaaacaaaaatttgaaatttaatccttaaatttttgaataatttgcaacataaatgttttttttttaatattagcagggctgaataattggacctgaaatttgaaaaattcgcaaaagaacgggtttcaaagattagagactgggtttaagttacacccgatttaccatcgggcgggttcgggtttcattaatctaaaacccaaacaaattagattgaactcgaactcacctgaaatctgtatctatatatttatacattttttaaaaacataaacttgaaaaaaacttaattctaaacaatgatatatcatttttcttttc

SEQ ID NO: 307990 - DNA, 953 bp, Cannabis indica
tagggagtatcgctagccaatcgcaacgcgacatgtcgcaaaagtgttaggcaccactggtgcctctaactaaatacatcatcatcaatcatgtaagtggatttaatgagataaaacttgtctgctttatattacttttggagtaatattatattttaatattaatcaatcagtaactcgctgtctgtctaccaaactaaagcagctgtaaactagctagccaaggcatacaaacgacttcacaagaattccattattatcatatatatccctttctttacacatgtccttgtccatcaatttcactacactttcttggtcaacacaacttcatcttagctatatgatatatcctatctcatctctctcaatttttccaataaatatctaattataattctactcattattgccattcaacaaaaccttacataccaagtaattactcaatctattgatcatttaccttgaaaaaataaaaagaaaaaaaaatctagtaatcatttttgatttttctccagagaacgttaccaagacctttcattttcttttttttttattattattattattaattagttggaacacccatcctagctatagatcaaaacatccatagtcaaccacgtggacgtggcagcctactcgtttgaaattaagcatctagtggcactggcaaaaccatgtgttaaaaatatacaagatcatctccaattattctttgaagatgctctagatcttcacatcatccaaaatataatattttattttactttttttccacatcatttttgacacttttacttttaaaaacactccaatggtataatactttttaaaaatactacaattatgacatcacatattattatatatatataattttgtttctttattaaactattatatatattgcacttttaattttttattgtataaaaaagacatagcat

SEQ ID NO: 307991 - DNA, 2628 bp, Cannabis indica
cgaaagagctcctattttcgaagttagggtaaaggtagggtaaaaaaaagagtgggacgagtaaggaggcagcatgagcgagaacaatatgtagtcattacatgtgtcaaggatgaaatttgtcgcccaaatattggtgatgattgtttccttgatgtatcttgttgttacccaaattgttgcagtggtattccttattcaagatgtgtgggccctgcttctacaccattatcatcaatattgatgttgatgaataattatataatatatatgtatgtgtgtggtttgttttttgaagtgtataataagaaagtacctctctagtacttaaaataaggatatatgtcaaaaccatgttatcatatagataatgtggaaaatataagatgtacatgcatgtatcccaattgatactttcatatgaataaatgcatgcttgtttaatctatttctcatttttgatgatatttttagtgacaacattttaattataatataacaatcctaccactactactacttctaaatcattgtcatcaatattgtcactaggtcttggtgatgaataattatatgtatgtatgtatgttgtgtgtatgatttttgaattgtaataagaaagtatcactagtacttatatatattagggtatatgtcaaaccatgttattgtaatgtggaaatataagatgtatgctcaaattggtactttcacgtgaattcaatatatctatatattggggacatcactcaaattgaaaatttctgtacaaaccgtatttttgtaattttatgtatattgaaattattccttaattctttgaagtaaacttataacatcaacgtatgggctacttcttcaatgatcgcgtagatgaatagtctcactcttcacaaaacaactcaaaaattcatctactcgacttagcaaagaaaatcatgtgttctcccaatttttcaatcatgtgtgggattggagaataaatttcactagttattattgttgattaattttatcttttttcttaaaaaaaaaaaatcatttttgattctttattttgtaaaagttattgattgggtcttattctgttttgttaaataacaaattagactctgtatttttcaaaatagtacaaaatagaccttaaatttaatttttgtcaactaagtggagatttttttgttcatttgataggagttttgtaattagttttatacttaataaaattcaattgatttaccccaaaaaaaaacatttcaaaagattttaataattgatagcaaaattttataatatagttattaaattaaattatacaagattcgacataacacatttgatgatactagatactactggtacatttatctattaatataatttacgtattttaatttaataattgtgagaaaattacaattaatgtgcagagacaaatcaacaaataatttgtaatgataagattaactattcaaagtaaataatgagatgtaaaatgggaaggaacagagtatctaaaatcagaaataatcaaagcaataaacaataaaattaacaccaagatatatggttcaagtcctataaatcgatgtgatctgtgactctacttaagttctagaacaccaccgaaatttttttattgattgagcaagataggatactatacagtcaaaaaagattttctgttagattcttcaaagtgtttatctctcacactcttactcaagaatcttcttcatttacaaagattcttcatacaaaactcaaactcaatctctctcttttctctacctctcgatttctctcgtctgaactcgaactctttgtcctgatcatctattgtcttcgaaaagttttttctgtacctctcaatttctctcgtctgaactctaactctttgttctaatcttcattcttcgaaaatataagtgttcgtggtatatagtttaggatatagatcctaaattcggtggatgcatatattgttaagttagttacaatttaacaaacttaacaaaatcttcgtaacagtatctttacgccaacttaagataaagtgctcctgaagaagatgaacgtttcctggaagaaagaccaaagcgtatgctaaagggactttccgataggaaaggcaacaactggagtcgactatccgaaactctcttccaagagaaataactagccatctggaactctttttcggaggatgactagctttcctgaagactccttccgggtggaaccaatagacatccgagaatgccctttcggatggcatctatcatttcccaagacttcttccggatagacaagttagactttcggaaattcctttctagaagacatctaactttacatgaccagaacaacttttgaggatcttttcatttggaggaactataccacaaattccacttagtttcttcgaattaaaatattgatggtgatgaaaaaagaatgcaatcatcttgattggttttctaaatatctcagtatactaactttttagaatgatcaagtccaaataaattatgtttgaacttggttactatcactacacaaaaatgccacttttagtgacaatcttttagtcacaacaaaaaaaaaaattgtgactaaatgtgactt

SEQ ID NO: 307992 - DNA, 1681 bp, Cannabis indica
agaaggtataatgaagctgatgattaccaaataaaaaggtaaactaaaaaaaaaaaaaaaaaaaaattataagaggcaagcttatctcatcttagcatggagtgaatatataaatatatttatatatgagagggacaaaacagccacaccattaattcagaaaaaaaaaaaaaaaaaaccacaccattaattcaaaagcggatccatttgtctttttgcatggatctaattaattatgttattaataaaagaacttgttaatatcaactatacaaataaaataaattctatatagcggtctcttggaaattacgtaccttccatatattattttatatttttattaaaattatacatattttaattaattaaaattttattggcattttatatacatattttaattaattaatttattcttcaataaaacttactcacgagattagttgccttcagttatacatattactgtataactaggggcctttctctcctcttccaaataattattttattatattttggtaaatttttaaattttccttacaaatttattagggttttctttaattttttcttacctataataataaatttctacctctgcctccgtgtcagcaaatctttatgttgaagtcttttctttttttcttttctttttttttgagcacaaagggttatttagtcttattaatacaatttatggactatatatatatttaatttagaatagtaaatatattttgattttgattaatacctgttattaaaataaaagatgttaaatttgtattttgataaaatatattataaatatttactagcaatatataagatatttttataatgcataattttttttataattttaagagattgaaaaaaacttaacacgttaaaaatactaaaaaaattatcttaaatatactaaaacatgataaaaatacattgatagaccctacgagctatgagagttcatggaagaaatagaatttgtctttatataattatagtttagactttggttgccatctaactacgttgactgccacgtgaaaatcaaaagtcaaagtcctgaattcacctactccactcttcaaaaaaccaaaacaagtagaaactagtagagatcacctacgtatataggattatcatatctcatatataaaaaattttttttttttaaaaaaaaaaaagcatatctcatagttttgagaacgtatcgttatatataaagaaaaaaaaaaaaaaaaagacaggactataccttagaaaagaaaaaaaaaaatatcatttatggtatatatggactatatttctgtctctgctgtcaatgtcgttttaactcatctgcaagttggaccatattatatatgttactacctcaattatgcgtatatatcctcccacaattatattaatcctcaaattaattatattactacctaattaatcttcactcttatatatgttagacaatttatatgtataaactgaaacatatatgattaagtataaaatgcggaattaataaaacatatatgtactataactaaggatcgaaatacctccagccattgaatctttaagcttcaaacccaaaaactttgatctgcaatagaaaccgattgatgtgggtaatcgggcttcctcgctctctcaactctctttagatggattt

SEQ ID NO: 307993 - DNA, 3920 bp, Cannabis indica
gattaaaatgtatgatgaatctttgtgacttttgagtttatgttagatttagggttgagtttggtcggatctgtattttgggtagaaaattggttttacactaggtctgatgcaggcctgatgtttttctattgttgaaatgagtaaaggttgaagacgtaagtccgatataagttcgatagtggcccaacgttactcatatttttaatgttattgtatataaaaatgggtaccatcagaccaccatcaaactacccttagatctacgtctacaacttttactaatttcaacaacagaaaaatatcgaaccgatccatgggcggatgtaggtgtatagctggggtggccctgaccccctcaaaatttctataaacaaatgtatgtgttcttcttaatgaacaaaaattatatatatgcattaatttatagttcatcattataaaaaaaaagtcaaacgaaaaaagtagaaagtagtatattgaattattaaattgttttattttttatttttataataatttatatggtaatatattaattataaattaataatagtttgttactatatagaaaaaaaataattagagtaaaaaataaaattaagtgtattatttttaaattttactacaaatatacaagtatgctattaaaaaaaaatagacttcattgtaaaagattgtttaagtatatcttttatctcttttgacattcagaagaaattttttaattttttttttataaccatgtatattataattatttaaaataacttgtaaatttttaatagctcacattgccaaaaataaaatttaaatattttgttgcataagtgactattttttctttttcagcgcagaataagtaactgtttaaattttattttttggcaatacaaactattcggaatcttttaaaaatttacaagtgatcctaaataattatattatacacaatcataaaaaaaaatagactaaaaattctcctaaatatcaaatcaaacaggaaggtgtcaaaacacccctttaaagaggtgtacgtattataaatttattctattattttaattaattaattaagtgtcctaagaaagtaattaagtagaatattcctaataaaaactttgaccttaattttttttagttctttcctataattttggtcatgtgttgattatactgctttcaaaattctttgttatttatgtgaatatatcttttataaagtatcaacttttattattgaaacaaatgttaattttttattttatagatacttatcttacaataattcgccccccgaaaacttaatcctagctccgctcctgactgcatcagaccatatcctacatttatggatagcatcggatcactatcggacttacgtcttcaatctttgctcatttcaacaacagaatggcattggacctacatcagaccatcattggaccttcatccctaacctccaaattacactactattgtacccaccatcggaccactgttgtaccatacataaaaaaaaatacacaaaaaatgtagatttccctaaaacttaatcttttaccaaagaataaataaaaaatacaaagaaattacatatcgtttgttagtccgttcgatagtggtggtcgtgagtcgtgggccatcgaccacgcaccagatagaaccagagaaaggagggttgtgggtctcggtcacacaatagagagaactagaaagagagggagggtcgtgggtggtggtcaccgaagttcaacggtggtttcggtgatggagtttggtgagaactagagaaaggggaagagtgagcgagagggaaagagagaaaagtggatacacattaccaatttcacccaatactagtttacctaattaattttactctcaaataagcatgaaaaatcaaattctgtgaaattggcatttggtaaaattcaaaatttctaatatcaaaaacaaattttattttgagaaaattacatatattgctaattttaataaaaattttacactttaacattcaaagttggaattttttttaagtttttacaatattctataaagacacaagaaaacaacaaaaaagttacaagaaaataataggaaaacaacaaaataacataaaaaataatctacaaacaccaaaaacaataacaaaataacaagagtacaacataaaaatacatcaaaaaactataatttatgtaaataaaattttaaaaactataaaaatatataaaatttcttacaattgtagttttgaatttttttttttgtattttttttatatatttattattggataattaagattttttcttcttgaattttgacatatattaaattataccccttaaatttttaaagtcgttaaaaataccccttaaactatgagattgttggatttaaggatttttgtctaattttagtaaaaaagtctaacataaatgaaagttcagaggacatgatttagtacatatcaaaatttgaggagcatgatttggtatatattaaagtctggggaggataatttagtacataaacaatcactgaagtagtaaaattaaatgaaattagacaaaagttcttaaatccaacaatctcaataattcagaaaatatttttaacgactttaaaaatttaaaaaatataatttaatatatgtcaaagttcaaagagaaaaaatataattagcttttattattttattttcttaaaagaaaaaaggtcaaaaaaaaagtgacgaaacaaactctgatcagtaatgtacacgcacccggcaccattactatctacgggatggtgggccccttggatccttggatttatagaaagagatttaccatggtgaggtccactgagaaccatacactctcggcctctttttacgcatatttttcctatttcgttacacactacacatcaagaccaatcaaagggccgcggtttattatgtattgcttacattttctttgttttgctcaaagtgaagcttacatttttgtgacctaagtttggtgggaaaagaaaaattagagatcgaaaagaacaaacaacaaaggcataatacacacaagaaacaaaaagaaagaataattatcctattaaaaatatattattattttttttaacaaatgaacatttattgaatataataagaattttgatacatcatagagaaaagatagaaatcatttatcacaattagttttgagtgcacaaactgtaaatttatatgcggcattcataaattagagatgcctcataagaattgaactacaaactaacaaaaatctctaataaagatcctaaataatcataacaaaaataaaacctcctagagaaagcataaatcacaactaaataattacattcgaaaggataaaaaaggcaacccaaaagtaagagactaatccaatacatccgctaaagatagagcttctgttacatgattactgtaaaacctgcctacagaataagaaaacaaatagtaagaacacaatactagtgaaaaaaaatagataaaattaaaaagaaagaaacttatcttcaacttgaatacttctaaaaagaacttatcaaacttttgccaactccataaaataaaatttgaacataacatactaataaatattaacataactgaacaccattatacataacaaattaacaatatgaaacaacatgactgttaggtttatttttatgtatttttagattctattttggtgtgtgttttaatatttttatcactttattgtttggatttatgtttggttttgtttttattatgtttttaaggaaaaaatgttaagagatctctatttttggtaattttggtattttttaagcctttttgagacaaaaaattggataactaaaagaaaaaaaaaacttctacaagtttacttagatttctc

SEQ ID NO: 307994 - DNA, 2285 bp, Cannabis indica
aatcacgtaatacgcctatgttagttagggtgttacatggaagccgtaaacaagaccctcaaggaaactttgaaaaagcgtctaaaagaggcaaaaggaaattggcctaaattactcgcagaggtactctagtcacatagaaccaccaagaagacggccaccaagtaaacaccatttgcagtagcctatggctatgaagcaatgttgccaataaaataggaaccaccatcttataggaggataacctatgaacaagaaataaacaagaccttgttggcagaatccctcgacgaaatagaagaaagaaaagaccaagccaatctcaaattgcatgcctactagcagaaggttatcaggtacttcaaaaaataattcaaggagaggaaattcttcataggagaccaagtactctgaagagttttcttgaataccaaagatcgcgtagcaggagtgttcggaccaaactgagaaggcccttatcaagttacaaaaataataagtaagggctcctataagcttgaaagtacaatgacaacatgcaattagttctcctaccaaggtattggaatggagaacatctctgaaagtactatcaataaaaaatttctaagaacgctactcttcaatagtagttttgtcaactcaattataagagttaatttaaaaatagctaagtatccatcactatttatggctcatgcctggcatgtcaggcaggggtagccgtatgagttctagaagtggactttttattttgaaagcttttagaatcaataaatgtaagttgcacagcaacaacacataattaagactaattgatgaataaaaattttgttttagttcaatattgtgttaaacaacttgctaacgagataacttcttaaatttattctttatttttagttccaatttgtaaaatagggccctcccaagaaaatacacaggaaaggtctataagacttggtgaattgtaagagacaagagactataactctttttgttcacttggggggcatccacactgtacaagcatcgaacaagcactgctaagcttaagaaaaatttaaagattactataagaaaaaaattgaaagctaagtaagtgcaaaaagcatacttcagtttagacataaaaaagtaaatcggaatacttacatgtctagcaaaagaataaagctaagattaaagactgcctagccggtcatatgtccaaagtaaaatgccctaaggccatatacaagtagttttcaaaattaaaaggcctagaggccatacaagaacattatattaatgtaaaataatagcgtgaataactaacgaaaagtgtctaatcatctataggtgtagatgggatcgaattattaggaccatggactggagtatcgacctggtctccaaaaggttggtccgaccattgacttaacaacctggtcggccactacctccatgggctagtaggacatagcctcatcaaattggccaaataattctccctcaacctggccgaccacctggtttatcccctggccagcctgatctgctaatagcctactctcatagagctccctcccccgatgaagtgatttcctgcaaaagggagaccctatgtagctaagattaaccttagggttgtgtagataaacctcgtacaggaccttagaggataatcccaaataaacctccttcttaaactttagatgctcatcctcgagctccttctccaacttggaagtgtcagaaggaaacttagtcccctcttggtttcagagaccaggaaatcggtaggccatcatttaggttctaggactcactcaggtgattcgataggttagcctaaatctagacacgcacattcttctctgccttaagctcagcctccttggcctccaacttcttctagtgaacaccagcagagccattggcctttgcatgagtaaggctcacctttatcatagcctgaaatcaaaagaaaaatcaagttagaagtggaaccaacctaggtggccatgggagtctactggctagccaacctcttcatggtgcagctctagccagccacaagattctataggctagccaacccctagcaactcatcattttgaataaaataaaatttacaactagaaaatgagatgtccatgagggcactaaatgtcaagcactccaactcctcagcctctagctcctagagcttcaattcgatgtcaggcaatgtcttgccaatgtaattttgagcagcctcagtcgatgtccatgatggtttatgtgattatgtgatgaatgt

SEQ ID NO: 307995 - DNA, 639 bp, Cannabis indica
aatcacgtaatacgcctatgctagttagggtgttacatgaagtgttgttagatagactagtttcctagtgagaatatgagcaaacagagtatgattgttggtggaatttaattctttgctatcgtcatcttcaacagggagaacaatttcttcttcatcttcaagattaatgatacctttcatcttgtttgttaatgggtccatggtgatagcgacagatcaaatgtagaggagtttactgggaaatacagtatggatgttaatggagggaaggtgaataactgttgtaataactgaaagttagaaaccataatggacgaaaactgcctcagagaaaacacagcagacactctttaaagcgatcaaacttaaacgcaattcaagtttcaattttttttattaaaaaagaatcttaccaatgatattaataataaatttagaagagaagaatttttaacagtgcatcaaagtactagaaattttagaaaaatctgtttttattccattattacattgagtagattattaaaaaggaataattagatgaagcactatcttttgtaaaaatttgtttacatttaaagtttttttttacatgtttatagtgttttataaaaataacacgaaaacaacaaaaaa

SEQ ID NO: 307996 - DNA, 1206 bp, Cannabis indica
catggctcccaaggctgccataaagaaaattgtttttcttttgtaaacaaaagggacatgcaaaaaaggagtgcagccagttcaagaaatggatggatgacaaaggtaatccaatttccttagtatgtttctttatacactttctctctcctcaataaactctctctttcggcctcaccctaaaccaagaaaccccaacccattttgctgtgaattcaaccaaattcaaggaagtttagcaaggttttatgagattgtaccataagaaggattaaggtaatcatattctcctttttcttcctttaaattagagtctaagcatggttttattgaagtgagattttgattttagttatgttagagtttgtgcagtttagggttggttttggagtttaattttatattgtttgtgatggttttaaggaatttaaggttgctttggtgttgtttagccaagtttgagtttatgaactcaaacttagctcttcaatgaaaatttttattttagaggattgatgatgtaaatactggttgaattatgttatgatgatgttattaggtgttctagaggtttttgtttgatatggggtaaaattaaagttagactgagagttttatgtttcttgcagcaaaaggttccaccgtttccccaagatacagtaaaccgtttccccaagcagaaccccaggagacggtccaccgtttggggatccgattcactagattgtgtgattttgggggcgtcgagttttgcatttcttcaatatttaggatattgccttgctatttatcaataggatagctcttagttttgagttttaagtccctgagagtgacttatcaactcatttattagttttacatcattgtgacttagggccactaatcatcgagtaggagtttctacttaggttggccaacacacttgattgtggaattgaggtaagattagtataatagatgcatatatacatacatgtttaccgtgtatgttcagttgtcatcagaataacatatgagggtattggtgaagtgtgttacacttaatatgatatgaaaataaagcatatatgaacaatatgaaagacgaaataaactgtaaacatctcaaacctgtatatacgatgaaaggatcgaaatacctccagctatctttcaacttcaatcccagctatagcttttgtaacaccctaactatcttaggcg

SEQ ID NO: 307997 - DNA, 1571 bp, Cannabis indica
gggcacaaaacccaacacatttgacctcaaatatgacaacaaaaatgctcaaacaaaaaaataaaaataatgtttaaaatcgacgatttacggtaagcttttcaaaaattatcaagaaaactagaaccttattgaaaatgaattttatgcaacgaaattggaaaattatttttccaatagtttaatgatgtgaaatttgaggtgtaaaaacttacggaattgaaaaatgttgaaaaatgagaaagtttggcgaaaaacactcttttaggcttaaaacttataaaatcaacaagtagtgcacgaaaaatttgttcaatgtgtatttcttttgaaggaaacctataggaacactaaatacacttaatttgacatgttcaaatatataaacacacaaaataatcaaacatgcaaaaaatcacttgttcacttgttagaaaacaagtccaaaattcaccaaaaattcatataatgacagtaatcaatgtaggatcatgagtcctactcctatcctgttgctctaatgaaagaattcaattttgcctcaatctatgcttgatactagcatgaaagaaagcagtattaaaatctccatactgtaaccaagcaaccttagccttctgctgtaggaatgaagcatagtctttttgtgtttgaatcagtctctcccttgcctcctgttcccgtgtatgaaatagagcatctagtggctgtagctgaagcttctacaactcatctagctccaatttatttctactgacaaatggttgtagattatcaaatccttccttatttatctccttaagcttggtcttgaattgctttagcttggtgaccacctggaacattgcagttccatccattctttgtaaccagatctcttttaaacaaccttcatgttttggatgtggtttccacattctaaaatatttaaaaggcttctttccataagctacaccaggatatagtgttagtacatccggtgaatgatcaaatagcccttcattcaggtaaaccacctcagcatggtcatatttactgatctaagactgattggccattatcctatcaatcttagaaaatattctatcctccccttgttgcttatttgaccatgtgaagaaattcccactggttttacatcctccaattgacagtagttcacacaattcaaaaaatcagaatctgagtaatactttaccttgttccctatcctttctcccttatcatatttgtcattaaaatctcctatgaggcaccgattctccaccatagcaatttcacaaaggctcttccagaggagcctcctttcatttcgattgttagaagcatagatcacagtaagaaagctagaaaataaaccatctactgttgatacttttagaagcataatttgacttgtgcatctaataatatcaacaataaatctcaagggattccaagcaatagctatctttccccgcagcatgccaagctatattagatgaaaaacaccatccttcaaacacatttgagaacaaggacccaagttttggggcctttactctagtctcgagaagaccaataaaatcaac

SEQ ID NO: 307998 - DNA, 2309 bp, Cannabis indica
gagtgggaagtcagtagtgattcttgagaactagaaatacaacactgccactactttgaccagattggtagagaagtgtacggatgtttcgtgtgggagctgaactaaggttggaggcaatttcttctagcctcgtggacatacagagtctgagaggacgtataggatacactgcctattggtcaactaggacctttgaagagaaactctgtgcaagttgaaatggtagtcacgattgctagtcacaaccaataaccaattttgaggtcaagtcgaaactggctagtgcaaagaaactcgttcgtgcaataccaaccaatgatacccacattgtgaagaatatggctactgcagggcaagtcgcggtgcctatggagcacgaggaacacgagaacccagaggctcccaaaggggaggtggaactcaatgccgatgaagaatttccttatgggggattcgacgaggtaggtcaacgcagttactcatccttggcgaggattatattgatgtggagttagtggaggcattataaattctgtccaaatctaagccacagctacgctgggaatcaccgccatccaagcttaccgtcaaaaggctgaacaacatctacaccaaaggcctggttggagatgttgtgacatttttaccgagggagggccagttagctcacaactttggtgaagggatttgtgcctagtcagggccccatgctgagcaggacgctctcctaccccttcaccccttattaccagagggtggctaactactacaggatatgccagacacaaattagtccgaagaatatctagtcgcactatttgtacgagtagggatggggagtgtcttctcttcatgacgttaactggttttttgacctcaagtcaaacccccatcacaacgagtctgagtatttttatttttctcagatggaattcacatggcttatcgacaccaccgacaagaaggtttccaagattggtggatattgtgtttattattacatcgttgaaggggttgaggcggaccatctttcctttaagcatgttgagcccttctagcgcctctattcactttggcactcaagattagggcccatacaatcttggggctttctggagaagcttggggcataattatgcttgccaccgaggcaaatttttagaggcaaagtccaagaaaaagtcttatgtgcctaatgatcaaccttctgattgggatattcaaggccaggaaacacctgcccgacatgttgcttctccctatgaagcccctgtgagcattcgagaaccaattgtagaacttcccctggcactacaatgatttgacacatactccacaatgccacctttcatacatagcagagggctttaacgtcgaggtacatcttagttgctcctgggtgtaaaaagtatggtgtaatatgagactcatctagaatcttctatccgatatccttactgaccggtacacaaatcctatctttatatcataaaattttgtcagacaaaattgaaaagtcctttgccgatctggttccaagtctttctttgtacccctgtagctcggagtcaccctgctgggccgttttaattctttataatagattagactacaatgtgatattaacaagttctccaatcacgaactcaatccccgttcaggttatgtctccagcaaactttggtgaaatctttttcaattcacaaacttgtcctggacctcttcgacttacaacatacactaccgatttactttcccagggtggtaaagagtctcgcagttataatctttaatcagttctacccatcgtcgctgcctcatgtttaaatccttccaagtgaagaagtatttaaggctcttgtgatccgtatagacttcacactttttgctagacatgtaatggtgccaaacttccaaggcggaagccactgctatcaattcaatatcatgactggaataccactgctcacactccttcaattgtttaggtgctcaggcaataactctactagactgtatccaaacacaagctattccttgtttagaagcgtcacaataaatcacaaattactcctcactgactggcaatgttaacattggtgcaataattaacctctatttcaattctttcgacttaatttccgctaagggtgtagaaatcttttcaacaaatattccgtagcatcctgttaatcacaaaaaacctctaaccacaattgcagacatgggttgaagctaattctaaactgctttatgttgggctttgtgccctaaataaaactctatttcaatgtaatcttttctat

SEQ ID NO: 307999 - DNA, 1973 bp, Cannabis indica
tctctctctctctctctctaacgtgcataatctctattcgattctgatttctatgatttgggatttttgtttttcgtacaagtttgaagctctcatttatcctaattttgaattggacttggctgtaggattcttctgaactgtaaagtctttgtctttgatgatttttttatgaacatagaaattatagtcaaaattagggctttttgcaattgcaattagctagaggtttttttccacttagtttgaatattacgatgaagattagagttttggttgataaaagttgaactatgttacggattcttgagtgcagaaactttaaaattttggtctttgtagctttgcttgtctttagttagtttgattaatccatggactattcagatacatgggaatccattttttaacactgttttgaagttgtgtttggctaaaatgtaccatgattaagccattcctccttggagttcagcttgttatgtttggttagttttatcgttaattttgctctttaagtttctcttcgcagctttgctaagtacactaggtcactagtagcaccaccaaaatggtggtatttacttggtgcttaataatgattggcacatttgaatcgtagtctagttactggtaatttcatcaattggttcattgtggggttgatgaatctttttcaaaattctctgccaatcctgataaatccatgggaaaaacaacttttccaacatttttaacgattgagctttttgttctttggtaaatttatgaacttttagtatgtttagctcagagtattgtttaatttgccgattttctttagtacttgcttacgcttccgagtctttgtaatcatttgtttgtaacaggatgcttatggtggctacatggtcgcatttgctggtcgaaaatatgctgcaaggtccccccctgcttttgttgcaaatggttcctatactgtgaccagctttactcttgtaagagttaactttggactcccctccagtcactgctgctaatcttaatttcattatcattgtagaatctaatgaattttgtccgatgtaggtgctcgagtttaagaagggaaggcttcaaaacttgtattggaaaagagacggttgttccaaatgctccggaaattccaactttgtctgcctcaacaagcaggattgtgctattaaaacaaacaactgtaaaaaccatcaaggcactgtagattgtagccttggaatacaagtggcattctctggcacagataagcacctttcttctcttaattcttggtatgaagttgagaaccttcgccagtattcactctatggcctgtactcaaatctcaagggttctctcactggtcaatacaacaagatattctaattgtacttctgtagccatagatgtattttccttttctattttttttggcctgcatgttgtaattctttgtcacatttaggtctttttcactttgatttcattctatattgagttttttttttcaccatgtggggactttaaccagaaaaactcattgtgacttgtggtgtgtaaattttatgtggaacaagtactctttgcttacatattgaggaatttttgtgcttatgttattggtgtgtcacttgtaattttctatttaaactttgggtgcagtatgcctaatgtatagtgcacttttaacggtagcacttctctcatgtcttttcaagttagaataattagtaattttgattcctaaactttcgataatactgactttgctcggtttgttaagaatttcctgaatctttatattttcagaaatttagtctttctgttatgttttgtctcattattttgtttaaatgttgacgtgtctttgtaaattaacaacttttcttcctaaattttaacaattattaaaccgtacttcctcaaaataagaataagaaagattcaatattttttaataaatcttaaaaaattaattt

SEQ ID NO: 308000 - DNA, 2170 bp, Cannabis indica
taaaataatttccaacaatgttccattggagattacaagacaaaggttcacaaaatctagatgatgaataatataataacacatacacacgtatacacaaaaagagctacaagaaaaaggccttcgtgaaaaacttgaggataaaaagttctcaccattagggtggtaccagcaaagaatacataaagagccagggatcacaatggatccccgcactaccctctttgagcaccgacggtaacctgtaggaaagccagggggtagaaaagaaccccctccctcaaacattcttccatccacctttcattagccaagcgctcacgctccaagtccgcatcccaggcccaacagttcctggcttgcatacgacgatagtcacgacgacattcagtgcgcagccggagagcgtggagctcagcaggacgaagatgcataatcacgtctagcacgataggcccgcatcattctaccaacaatagcctcaccactaggtcgatagcaataagaaaaggtcgcagggctaggaggagatcgatccccaatatctgagtgaaactgatctccacttgaaaactgtggaaggggagaacctagagagtttgacatgttttagactaaagaaaaaaaaggggggggggaagacacatacaaaaggaaaacgtagaaagtttaagaggatgatacagtcaacaaggaaggatgcgtgtataaataatcttaaaaggagagggaaggtggaagggtaagcccacaagaaaccaaaacattaaatgccagtaaataaacacccctaagtgtcgagacgcctcgaaaaaagaccatacatgtataaataacaataattagggaaaaatagattaaaaataccaatcaaatattaatccttacaaaccataaaataaatgttgttcgtaaatattgttcctaaaatatatatatatatataaaaacatatataaaataaataaaaaataaagggggggatggtaaacaatggagagacattctcctcgtagaacaagttcctcaggccgcgtcggcatcctcatcctcgctggcctcatccgaatccgaggaagactccacaagatcctcatcctttttaaactcagcatatttcttggaaactagtccaaatcccaggtagcaggcttgccttctctgaactcagaatacagcttgatggtagactgataacttccactgagaaatgccttcttaacctggcttgtcaggaccttatctcttttgttaaagatcctttctcttgagccagagttttttgggcctgctctactgccctctcagcttcggacaacttgtcatttagagaagagagtttgtccttcgccaccttggcatcagaaaggagggtatcacgctcttggaataaggcgtcaatttcccgaaccatctcgaacaagatagcctctaaggaagcaaccttgtcgctcaaggcttgcttcttgaactccagaatggagcgggtgagatcccaacccctcttctccgactcgataccgctgctttactcttcaagagcttgttatcaacttccagggcactgactttagtgagagcggccgccttcgcagtgacggctgcctcataattcttcttataacaagaatagcccttggacaaaatttccttctccttatcagtctgcggggcaaacttcatagcatgggcacacctcaaagccgtttgacacatatatatatatatataagaaaagcaaacacacttagcaaaggatgaagaaataaaagggaaaaggagaatgggcacttaagcaattacctttattcccgagatagcagtgtccttcagaattgaatctcgtccttgagaaatatagaaatcatcatcaagttttctaacggcatccaaaagagatttgaagtaattctcgactgactcctcaaacgggacatatttttgaatcctaaaagcagggatttcgtcccactcagtctgggcccgtggaggatgggtagccaaaggtggggaacctcggctggagggaaaagttgagggatgtactaaaagaggagaaagggcaagttgagaagacgaagaagctccaagaagagaaaaagaagtctgagcaggagagggaggcgaggggcccaggttatggcccaaggtagtgttggaaattatttta

SEQ ID NO: 308001 - DNA, 1318 bp, Cannabis indica
aatgattaaaaatatatatttttttggaaggtttcataaatactttcaagtgtaccgaaaaactatttcggttactcacatgcattagcatttgtacaactttttgacttggtcaatttattcttgtcacggatcatgataatccagcaactaccaccaacaatataccataattttgcaattacctattttgccactacttatatcctcataatcttcatgtttcaatgaataatttgcatatatcaatataataatatgacatgttaatagtaaaattctcgacaaacaactctttaaataaaatcaattaatttttattataagtagaagaaaataataaattgcgttttatcttttaaaaaagtaataaataaaatataaatttataatattcacatgtatgacaagtatattattatggaacattgagtaaatcgtttgaaaaaaatctaattatattaaatctagctaagcctaacaaatctaacatatgaacttttcttttttatgaaaatagaaattggtttaaaaagaacttacttggacattcagcaaggctagcgtttttcaaggcacaagtagaaggtaactgaataagcttagtctcctgaatacccatactcttaatcttatcgtttccactatgtgtttgttgcataatgaagcacaagcactctggctcactatcttttatacccttcacagaatcacagcagtccttcgtcggagtcgccgcctttcccgtcgcgtaggtcaggcaaacagccagcttttgaaaatcactaccacacttctctggtatcgacacagcacactccaccacaatactactactcctcattaaaacgacaaatatcaccaaaaacgacacaaaactcatctcccttttcatcatcatcatcttcttcttcttcttctttgatcaaatttgtatactcactcacccacaatcactaaactacaaagatactgttggacagggtagtctacaattgtacatacatatataattttttgatgatcgaccacgtcagcatttgattggaatgaacggtcgtgatgaatgatgattaagtgtattaggttcttttctttacacagctcgaggcttttaatggacacccattgtgggtagttaggctgcatttaagtttcacactggaacaagaaacagaattgagagcaacttcaattcaatttgctttaaatgagctttcaatatagctgtactcgttcacacgtggcttacttccaccacgtgttcgaaggctccatgtgcttgttttgccgtttgtttgttgttgtgttttttttt

SEQ ID NO: 308002 - DNA, 1307 bp, Cannabis indica
tacttattggaagctcggttatacaggcccatggttccctcactagttgagatatactgcttgcaaattcagttaattgattttttttattgatgaatcaggtgaattttattccacaaaacttttatttgcaacctataagcgtggccttaataatctctatacaatactatttacaaactctcaaaccattctttatcttttagctttactttttttggcattacaagcactactctatttttgacattccatttaagctgctgtattaagtctactacctgctgcctcttctcattccatatcatgtcgttccttgctttccaaatcaggtaaacaagtgctgtaacaccagcagctttcacactcttcctaaacttggattggtttgccttccttatccattttaaagtggtgttcaaagtaacagcttgagtatgccatttaagccactctttcagcttcagtaagcactgctgtgaaaaatcacacctgaaaaacagatggtcgacagtttcttctgcattattggagaaaatgcagcaaggtgaatcagtcatctggtatttacaaagtcaatctttggtctttaacctgtttaacatagccagccatgttagaaagctatgtttcagggtgtttagccttgaccaaacttcattgtaccattccactttctcatgattttgtgcaaactagctatatcctgctgccactttgaactcactcttcgaaaactcctttggttgagtcttttgcttcactatgtccttgattgccaccatttttttccagcaccaactactgctttgtggagctttatactcgcaccagttgtgttgcttaatatatacacagtgaacccatttctcccacgggttatccttcttgtttgccactgcacatatatgcttaaacattgctacaacattccaattagcgacattcaacacccccaggcctccttcctttttcgggttgcatagtttctcccaagccactgaaccagcccctgccatcacatttttcccaaatcaaagaaagcatctgcatacgccttctatttctttaataacatttttggggataatcatgatatgactccaatacatatgaattgtgaggagaacagagttaacaagtactaatcttccagcaaaggacagatttctagtggaccaaactctgatttttcttgtcattttttaagcaagactgatgcaatcagtagcagttacagttaattgattttaattaattaattttaattctaaaattagactatgtcttatttatgaattttcact

SEQ ID NO: 308003 - DNA, 2633 bp, Cannabis indica
taatttcgaatttcgaattttgaatcacaatgctctgataccaagtagaaaatagtgattcgaattgttggggaagacatgaactgactgataacactaactggaaatgcaatatctggacgagtcacagttaaataattcaactcaacaacttcgcttccattttttgcgtcaatccttgacgttgaccgtcccgttgaccgacgcaaattctacatattgtagtagtatactattgaaaaatacagaaacaaatttgcttgtatttctcatggacaactaataaataaagtgtattttttctcattctttttgttaaagccaaaacacataaaagtatcaaaccctagctcagcaatcaacaaaccagatgtgaaatccagttgaagaggcatacattacctcctacacatatacaatctttcgaagaaaagaatcaattaaactcaatttcaatattcttatagcctacctaacaaataatcacatacaggggattatgttatcaacattaattcaaagttggcagaccttttcaaacacaaaaacagattcactaagtaatttcaagcttattttaatatgtctattattatgtaatcagaatgaatctcaacacccacaatggtatgcttaattaaggggtttatcccaactacttggtcagataggccttataagagactaagtaagaatttttatggggttctaaataagagcaactccaaagtgaactttaatacttaaatgagaggaataagaaagagaagttagattacttgtagcataaagaggtgtcttagtatctttgaatccatgaaaaactccttgtatacctaaagagagaagaatagcttgggcacccaatgatctcaaactcaaatattgtattgctggtttttacctaggtgaattctgtccattaaaataaacaagtcactaacacaattattaatgcaaaatggaaaacatttacatatcttcattgcaaaactaactgaccaaaagtttgaagcacatacagaatcaacatccatgaaaatcaatattcttttagctgctaaaataaggaacaaagctttgattaacctgagaatgctatcgataaccatagctgatgaagctaatgggatatgccttctgacatgttcaagcatcattatttctgattcatcacttgctgcagatgaagatgtggaagtcgagtgtagtttttatgaacataatagaaatattataattttttagttcttcaatccctactagactaaattaccaaaaaatcactataaatttttttctaaagcctagtttccacaatttaaaccttagcatttgcaagaattacattctaaaactcaaataaaattccactcaatttgcttcgggcgaaaaaggtagctaatctacgaggaggccttcttgatcccataccacatgcccttactaaggaagtcatgaaaaacgagacgagacatgcgaaaggagagacctccccttttttactaaaatctcaattcctccatacaaccgattcacgttgccctgccctgtaaaatccactaatttcaaagagaaaaaaccacaactaaaaaagaagctcaaaatagtgaactgggtcaatgaaatatcatccaaaaatgaaaattagacgaaacccagaaaataaatgaactaaagaatgaggtcaatagccatagattgattcgttgagtagtgtacctaggttgaaagaaaaagagggactagaagtcttcgaggagggagaagataggaagccagaagcaaagattgttgacgatgaagttccaagcatggatgccattattcaaaagccgttaatggtgtttgagatggagaagaagtagcattttgagggggttggtgcggctatctgctacatttcgaaatggcgggggggctctgctagggtttcgaaatgggcaggggaaaagaggcaaatgaaatatttgtgaaaattgggttttataaaagttaaaccttcttgcgtcggtggataaccgtggcaaatttattaacctcagttttaaattgaagcaaaaataattgaccttactttttcaccgaagtaaaatgtaatagataattttaaaaaaattcacttcttttctcagttcttcttttagcattggggaatgaactgacgctaattggaattttttagcatcagttatactctgaagaataaaatcgctacatattttttgcttcggtcaactattttggtgtgacgcgttgacgagcgcaaataagtctttttgtagtagttccactcaacctcttggcgtcctcctctcagcatcctaacccaaacgaccctcatccctggcaacccagatccattttgtcccgcccacccctgacggatgtacctgaggaccccaacccagaagaaaataaagccccaaccctattccatctttttggtcatagatcaatgataggtttacacatatcatcgtgtttaaaaggtatgtgtaaagaccgcttagtttaatttggaaattagcagttaatcacgtttaattatgaaattatttatagctatttaaaaaatttattatactgttattattgaattcagagatgcatttttatgtcatgtagtagtt

SEQ ID NO: 308004 - DNA, 1412 bp, Cannabis indica
acatacctttgcagcaacgatgaatatatcatttgtttctgtgaattaaagagagatgtctaataagggacgagaatatgattaaaggactgaaatctcatgagcagaatacaggtattgacagaagtaacccacaaattaagccttaccattagcatgctctataaattctacaagtgcctctcttgatactgattctgacttctcaccagtgcagagcaaggaatgacatgattcccagtcagcctgtgcacatgacttgctagaaaaatactcacaaaattggtactagggattaaagaaaaagatcaaagacaagtattcaaggtttcaaaataataataataacaataaactaagtgctaaagcttacctgcagtaataagcttccccacaactcccaatacaaggtacagttggaggcaatgggaacctatcagaataaggcaatttcaaatcaccattcatgagagattccacaacccctttaggaagttcaactttttttctgaggtgactggaagaacaagctcctgaatcttcaccattctcctcataagaatagtcttctccatctgaatacatgtcctccatatcacattcactgtggtttactgaaactcccaactgttgcagataaagttttcttccaatttgaatttcaactgagccaataaagcgaaaacagaagctgcagaccaaacaatccatctacacataacaaacagtagattagacagaatttaagttgagacaaaacagaaaaagacatgatatttgaaatcgttgaagaccttatttgaggaatgttgagcacccacaaccatttggtcctttaatataagctccccttctttgaattcagtctcggcatacacacctttataatgaaataacaataacatatactgaaagtgggttagaactaaattcaataagacgactaagagaaagaagaaaaacagaaaaatgaacctttgccaaatgcttcattttgcttgactttgataccggggtttcgcctcttggatataagctcgtcgaaatactcctgaattaacacagagagaaagaaagaaatttcaaaccatttgggcgttcgatacaagtgagtgtgtatagagtagtgaataatacctgagcttggagagatgaaggtggagcgaggagagaagagatcggatgaataggagagagagggtccattgaagtgtgaaacttgaactctgaaaatgaaaacttggtaagttggaacgtaatagtatatgcagccacagccgccaaaaatatcaaaccacctcctcactcactagctcaattttgctgtatgctccgtccaaaaatataaggggtaagttgaaaaatacaatttttattaatcaattaattaaatttatttttaattttatatt

SEQ ID NO: 308005 - DNA, 4506 bp, Cannabis indica
aatgtataaagcatggaaaagcttgaacacaacaatggtaaatccaagaaaattagagaacgtgatttgaaagtttaaccactagtagaaccttcaagtaagacggtgggaagcttggatcatcaaaacaaagcgagaatctcgagttttagaggacttgggtgtgttggcctcaaaggcggaatgaagagctcctcttgtttccttttttaaagagagagaatgtaaagtgtggaatgaaaggtgtttcaccaaataaccttatatagtttctggtgggcccctctcatttaacatgcagcaaataaccatgcaacctgcaaaaaacaaccatgcagaatgtgagtagccaaacaagagaaaatattttacaactaaagttattatataaaacctgctcgattaaggctctaacagtcaaaattgaagctggaaagtccctatctatacagacgtccacatagggacttgggggccaaatattatccaaatttttatccacatgggccagactgatgccacgtggagtacaatttgttaacaacaaggctaagtcatcatacacaacatatcagttgataggaagttcgaatacttaagcgggataaagagacaacaaactgaccatgttaaggggtttggctggacccccttggacggccctattaccagcataggccagccagcctccagtaaaggaagggtcggccaacctccatcatggcaaacacttgttgtgcctctacagcttacatcctggacaacacttttaatcatgaattaagcttcaacagcccatgaaaataggagataaacttcattatttacctattcctagggactaataaacatattatttatttattattttaatgtgtaataaataagtgatatctcctcattttaagggatatcaacctatcatctcttgtaagctctcctatataaagagcactaagctaaacctaatctctccaagtgatagaggtctaaagtctaagttctaaatccaaagctctaagttctaaaaccctagctctctctctcctctacatgccccaagcagtgtagaagagactaagtctttcatctctcctacttgagatttgcttcttgattctcactattataatcttaagagagccacttcagaattcataacacttgtgatccgagtggtattatctctaatatcaatacaaccaaaaggggatacggtcattacctgctaactaatggggtcaaacctctataaaaatgttgtgtctctttgatttgcttattcttattatgtacacatggtgatattaatcataaatacgactccgttgtcagttggccaaatatgaggtcaacaatgataaaagcttttttctttatgagtgacactcattttaaggtcacataaaaaattgatctcgttgagagttggaacaggccagttttgcaaacgatagatgatgaaaaatgtcaaaaaaattcaataactgttcggattcacctgataaggatagactccgaaataatcagcaatcgacacaaagcacgggtgtaagggcaagaatgcacccgcgttcatgtgaaatcttgacaaagcactacaacaaggatttcgagaaccattgggtcactcaattctgggttttctaacaataatttttggtaaagagtactcatccctaatcaactctacttggtgctcagtgataatgttaaatacaaggggtcttaactcaaagtcgcgatctcttgcatcttcactttcaatggtagcggtaagtaactcggttgccatgaattttcctccacgtttgccacgtgtgggtcatattcattgagtcttcttctagttatcttcatacaaggcatgctcgttccctacttaagtctgatcaacttggataaggtgaatattagctcacttcaactcaattcacctcaaaattgcccttttcagctcacttaaagatgtgttaagacaaaactagctggactgcaccttgcaataaaagttaggtcttagattaagactcacatgaaaattgtattttcgattttggaggtcttataaatggagtttaaagatttccaactagatcaagaatccttaaactaggctctacaagagggaggaagaaaaaaaaataaataaaaaattttgaaaatacctgatggggatgaagaacacttgagaactctagaaagcaaaagacttaggctcttttttcctctcttcaggcttgtggaatggaataagaaagagtcgagatgagttctctatttatagaaattagactcctctactcctaagccaataaggagttattttaaatttaaaatttaaaaagaatgataagagagaaaaatatcaattatcttttcttttcttttttcttttaaattttgaaattcccaatccaacatggaatagtaattttcaaaattcctattccaactaggaatcattgaagaacagaaaacaaatgctaagattgtcaaaactgatacccatctggtagtttcatatgaaatgagcttagttcatgtcatcaagtcaacttcacacaagtgtaaaattcactcgggggtaaatgtttacccaaaatctgatcttggtgatgtggaaatcaatgtttgacatgtgccaagaagaaaactatttacgaagttgagtagtcccatgtcatagcaatcgacctaggatgggtccctagccctactcttaagttgactctgggaactatgaaatgggtgtttggatcccgcctaatgtttataactcaccatccttcagtattctgaaccaagaagagaagaagaatccatgtctgaggcttggaaattgaaaagagatgaaacaacatcctggaagtcaacccgggctcttagggatttcacccagtgcccaggttaacattcttaactagggtttccgttttcgggtccgtctaagtaaaaatagctcaaactttgtagttagacatgaataatgcctatcacggacatattagaggcaccaaaatcaaaatcagaacacttcccgtttggagcaccaagcaccaagtgcccgggccacttggtgtgtacccagcgcccaggttgacatgttgtcaacctgcgatactttcaaccacaattttgaagatttacctcgagaattttctttgtctccatccaaaataaggaatcaaatgctttcgaaaaagaaatagattaacttcaaggccaaaattaggacccaggacccaagttgacctggtgctaggtcccaacgccaaggttgacaatgggtcacttccaactgtagtttagacaaagtcttctaagcatattctctgttttcatcaacaatctatatatggatgctttcaagaaataaacagagccatctgggagtcataatcaggacctgacaccaggtctcagaacctaggttgacatattatcaacctgggccatttccaaaatgttcttccaagaagtcttctaggaatattctttgttttcgtcaatagttaagatacaagtgttttagagaatcaaacaaaatcatttggtgggaaaaactgggacccatcgctcaagttgacattttctcaacctgggtcccaagtgttttctcataaaagtgttttgggcatcttttctatttttagaaataatgaagatacaagtgatctcaagaaacaaacgagaacatttgggagccaaaacagggcctaaacgcctaggtaaacatgggcactgggccttgcatccaagttgacatataacatggttcgcatgtttctgctccttcaacataaattatgctctagtcattcttcttattttgttcaaaaattggatatgggaccttgttcgcaatcttaatgccttagaagtatcaaaacaacccccgagaagccccccgaggagcacttaacgccaaggttgacatatagcatggtgcgctgggttttacttattcgattctagttctgtctcaagaatccgactatttttccgtagtaaacaagacctaccacttgtgaaaattaaagttcgtacttttctatttcaccttttcaacaaagtggaatatcagcaaattagtcgcaaatcgggaaattttgagtctacctgattttgcagaaaagaaccatctccaagaactggtgaatgattccacaaaaaattaagaagttgactaagtgatgtcaacatatcacttaaacattaaaaatacaagtccaacacatttttctacacatacagcgtccaggttgacgtcagtatgtcaacctaaagctgggtgctgaatagtttttattaaaatagtcataactccctaaatattgatctgattaacacaatttaatttgattcttaaaactcttccaaactcttctaagcatgtctcacacccatatctaaattcgaaatatttcaagtccaaaattcatccccaaagcaagtgtaattttcaccattagatcgtcatcaatggtcaagatcaaccaaaaa

SEQ ID NO: 308006 - DNA, 582 bp, Cannabis indica
gtgtgtatatatatagttgttttgtgagagattccttactgtaattggactaattaagaaacaatttctgatcagaagattttgtaataatgaaacatacatatcttttttatttgcccagcacatatagcaagtgggagtatttaaataatatataactgaatattatttatgagttttattggtttttttgtcgctctgacattgccaatcaaagaagaaaatacatttatatgtactgtatatatacatggttgtggtgattatgattttatttatagattaataatgtgtgcaactaaattttaaccaattatatttatttaaattgggatatttagaaaaattaaaataatatagtatatagagagatatgaaaataaaggagaccaatcacatcaaagtgaagcaagcagaaagaatcacggattgtagaaaggcacaaaaaaaccagcttctaattaatggatattatatatcctttcaccattcattcacggacgtacatattaaccaaaactcaacaatacatcaccaccatgcattcatatatatcatcatattcatctctctctctctctc

SEQ ID NO: 308007 - DNA, 2086 bp, Cannabis indica
ctaataaaccgtcccaaactactaacatactaagttgtgattttacttagccaaacaccgagttccatgttactgggcaccggaaatgcaaaattatgaaaactactaaatgacataaaatgcatctcagaattcaataataacagtataaatacttatttaaatagctataaataatttcataattaaacatgattaactgctaatttccaaattaaactaagcggtctttacatgttgagtgactgtaacctggtggatttaaagcataagggctacctatttacgtgggagaaagggtgtaattctggcgaatgggttgaagaacaattggataaggttcttgtgtcagatgactggcttaatttgtttcctcaagctattctccctaatcttgagttttccacttcagatcactgccctctgttattggttctttaaggtaatttttctttggtttctcatctctcgctttgttttgaaaatgcttggttgagggagccaatgtgtaagtagctggtggagagctattggacggggtcgggtttatgtagcattcaggacaaaattcaaaaatggggagaagtgttgggtaagtggggacatgatattattggtattttaagaagtgtattgctcaaagtaagacccatattaagaactcgaagtggtggagggattctgcttctattcaatagcataaggagggtattttttgaagtgatggctcagcgagaaatcttttggaagcaaaggtctaagcagcttggcttaattcaggggataagaattatgttgtcagctctcggaagagaaataaaaataattgtacaactcaactcaaagatcataacagttattgacctcagatttggctaaccgacaacagagtcgtatttaatattgatgattatcacgtgttacacaataagaataataaagtaaatgaacgcaagattttatagaggttcagcccccttagttagcgggtaatgacctactccttttttatttacattgatactaagagataatactactcaaatcactatagtaatgggatatgtagtagctctctaaatgttacaatgtagaaatcagagttggtaaatctcaagtatgagtatagcagtgggcgtgtgagggagagatgagttattagactttgagctagggttttatcttaggggtttagggtttgagtaaggatctttttataggagagcttaccccttcaaattccttaaaaatatgtaaaataagctattatttacatattaaattagtaaaatacaaatgactaaatccgtagtctgtcttgctctcccagtgtgaagtttgtgcaccaaaatcctgccaggccaaaagctggtcggctatgcatctgcaggatgcatgttggctgaccatgagatgtccagaacatggccaacctatgttggccatagggcaaccaggggtggctagttcgtcactatgtcatcctgcttgagtattcagacttctcggtggttgtagtgctgagtaggtgacttggccttcttgttggtgagttgtactgccacgtggcactgatgttggccacgtagacatgccacatcaaatgggcaaaaattaagataacatttgccccccaagtgcatgtgcgcgactttccagtttagttgggattgatgtagccttaactagataaatcttgcagcatatttagcctttcaaataatttctcttcactgtttgatcttacttgttgtagtaagttaactgcattgctctttttaggggtgaaaattggtcaattatggtcggtttttacaattttataactgaccggtcggttacagtttttatttttacgaaaatcgtaaccaacggtttagaaattataactgtataaaaccaatcgtatggtttttggcggtttttaggtttggcagttttggatagtttgtggcagttttggatagtttttggcggttttggacagttttgggcagtttttggtagtttttggcggtttattacggttttttacgattttggcaattttttggtttaactattttttaatttcaaaaactgaaac

SEQ ID NO: 308008 - DNA, 1838 bp, Cannabis indica
acaaaggatatctttgtgaaaattcctcgggcaggttgtttataagtcgacatgtggtctttaatgagaactcttttcctgcaacatctgttcagcactcacagcagcaggtaaattctcctaatccatctcattttcctactgctaacttttctactggtgttgcaactaattcttgtgttaattcaacaatggctactggttcgggtgccaatgagaccactgtccctataccacaaccccacactactatcctttcacctacaacaaacaccttaacccctacaaacccacatatacagcctacaccagcagacacctctattccaccttctattcctctcagatcaccctccctagatgctatcccttctaaatcaccacaactaaacactacacaccattctcaaaacatacctactgtcctaccccctgcaccctcagttggcactgaaccagtcccacctgcagccaatctcaggacttataacatgtgcaccaggtcacaatcgggaattagaaaacccaagtcatacatggccactaagcatccgttacctgaatcaacattgccaactgaaccaaagtcacttaaggctgctcttgctgatcctaaatggaatggtgcaatgaactcagaaattgttgctctacatcaagcaaatacctggaaattggtgccccctacagataacatgaatataataggctgtaaatgggttcatcgagtaaagttaaacaaagatggttccctaaatcgatacaagtctcgacttgttgccaaaggatatctggaagaagctggaatagactttgtacttttagtccagttgttaagccaacaactgttcgaactgttttgtccttggctgtttcaaacaattggaatgtttctcagtttgatgtcacaaatgcatttcttaatggtcctttaactgagacagtttacatgagccaaccttcggggtttgaagacaaggaccatcctacctatgtttgcaagttacaaaaggaaatttatggcctcaaacaagcgcctcgcgcttggaatgacaagctacggcagacacttgtctcatgggggtttcaaggatcacgtgcagacagatctctgtttgtatatggttccagagctaatcttgttatttttctggtttaagtagatgacattcttgtcacagggccaaactctactctcataaccaaactggttggtgatttaaacaaaagctttgccttgaaagatcttggacaggttcattatttcttgggagtggaaatttatcgtgacaatacaggaatgtacttgtctcagaccaagtacattactgatttgcttgtgagactaaacatggaaggagcaaaggcttgtcctattccagccagtgcagcaactcgactctctttacatgaaggagaaccgttccacgacattactctataccgaagtacattgggtgcattgcaatatctatcccttactcgtcgtgatgtggcgtttatagtgaacaagttgagccaatttctgcaagctccaacttcagttcactgggatgcatgcaaaaagctactacggtatctcaaaggcacaataaaagacactacaagaaaacccacttttgccagcgcatttttgcgccggcaaagctttgtcggcgcacaactgcgccggcaaagcttatctgggaagcttggtcggtaaaagactttttaccgacgcgtagaataaatgcgccggtaaaacttccttttaccggcgagaaatcacgccggtgaaaaataagcgccggtgttaaaaaatgcccttatccgctatgaacctgctttgataagctttt

SEQ ID NO: 308009 - DNA, 1649 bp, Cannabis indica
aacaaaaaaatataaaaaataaaccttaaaataaaagatgtattaattacatttaggaactaaaaaatattttatttaccaaaagacccaacttttatttacgaaagtgtacttccgtttttcatacaaaatcttacatgaaaaattttaaagctctttaattcccacatttttcttctaaaaaataatatgtttcaaatattagtgctattgttaggcgtgttcatttaattaaatccgcattattttgtttaaaatgcatccgatctgcactaagtattttgtatccaatctaattcgcacaatagctaaaatctaatctaatctaattcgtaaaaatacgaattagatcggttattttggatttgttacttttttatattatattatttaatatttatgaaaaaatatatttttttttcacataactagcaaaaaaattttttttttgttttttatgtctccaacaacaaattaaaaataaataaaataaaaaataaaaaattcataagaagaaaaaaaattatatataaagaaatatttaatttatttttacattgtatgtacaagaaaaattatatataagaatggagtacagatctataaagttttgaaatataattatattatatgtattagactcttgaattctattttttttacattaaaatataaattgtatatataattttttaactttttataaatatgtgacaattggattggattgattactgttacatgttaatcaacatcaaatctgcacaaatgcggatcttgaattttccaatccaattaaaccacacaagtgcggatatttgcactttgcggattaaatttgattggatcgtgcggataggattggatcgtgcggataggattggatcgtgcagattggattatatcggtcattttatgaacactcctagttaataaagtgaatcaattacaacaacatattagaaattttattacaatgaaagaaaatcatgatgtattacaactctattataaaatatagtacaagaataatataagttattgattaaatatatattagaacaaatatatatacacgatatattatgtatatattattatactcatattttgaacaacaaatatggtcaggacacgtgtacaaaaattcgaaagttaataggcttgcctattaaaaagaattcatatgacattaatacgcatcgcgaactaatgcttgtagttcaaaatacatataagtcttaccttaaggatgtatcaaaattctgaccatgaaaataaaacacaagcgagaccgataacatatgtaactaccttctcggaaaacactgagtataaagtatgaatgacgagaaggcatattattcagagacaaatccagcaagatcaagctaggcgcaagactgaatgctccttcacaagaagcacaagagataaattttgaagaggctaattcatgagaattatacaaaaattatccaaaattttatttaaggataaaagctactaggagcatatttaacgagccactcattctgctagaagcacttaaaagatatatccagattcactcatgtgatttgcgaagcacagggccgaccctagacataggcgggttaggcccgcggctagggcccactcattttagg

SEQ ID NO: 308010 - DNA, 2749 bp, Cannabis indica
aatgtgaaatgactgttcaaacaagttctccttctcccggatatgcattgttgtatttctagttcttggagagtaaaggcatgcactatgctcctctccgggggctcactccctgaaatgcaccttcctgtctatttatgacttagctaattcttgtgggtgaggtgtccttgaaatccacgtaccacacgcagccgctgccacgtattttgggaaaaatctgaggtaacactattaatgtaaatattaaaatttatgtatatatattaatttaataattattacaaaaaaaaattgttaaatatttataaaatgtcaacaagtgaatcataattaggagcaaatgaaaaggaaggtttatggggtctcgaactttttatatataaatttttaaattctaattttttctcccataaaatatatatatttttttatttatttatattcttacttttattttatcctcataaattttataatttttattatttttttacgtaatttcattttggagaatcaccccaaattattttttaacttttctttttcatttttaatgtttgagttgcttcaataattgctatgtgggttgcattgtggatttagattacgattaggttgttccgtgggttgtgatgtccaactaaggtacaaccagctgacggacacaatcagctgatggatggctatagctgacaaataaccagttgaaagaggatcaactaatagacaaccggctaagggacgaccagctgagggaataccaactatgggacaaccaactgagggacagtcaacatagggacgaccagctaacaaagaatcagttgaggacaaccagctgatgaagggccagctgagtgacaaccagctgacggagggctagctaatggacaaccaactgagggatggccatttgaggaacgactagttgacaggcgaccaattgacggacgagtagctgacaaagggcaagttaagtgacattcagttgatggaggactagctaacggatgaccagctgagggatggccagttgacggacgatcaattgacagagggctagctaagggaaaacaactgaaaaacgattagctgacagacgaccagctggtgtatgactagctcccagacgaccagttggtggacgactagctactagagggccaactgagggacggacaactaacggagggccagctcaaggacgattagcttatgcacgattagctgagtgacgaccagctgacggagagctaactaacagaagaccagctgagggatgcccaattgagggacgaccagatgacagagggctagttgagggatgaccagctggcggacgactagttaacagacaagcagctggcagacgattagctaacaaagggccaactgagggacgaccaactcatggagggccagttgagcgacgaccaactgacagacgaccagttgagggatgactagctaatggagggccacctgatttacttatcatttatcgtgtattcctatggtatttctcccactatatctcaggcttacaatgtgggactagtctataaaaattcttttaagggttcttgtagactaagtttggtgagcttcatctttaccactaatttttcttcttttttcctttttgttacccttcacggggagtgtaggctttatatgagttatctcaacccttttcgaggttagtactcaccgcaatgagggagtgttagctcattgagctttctcaacttctcctatgagtttctatcatttttttgagggagccctttgccacatggcctttctcgaccatttcacttatgtaactttccattgagggagtaccgaatcttagagaattctcgacctcttcttagctactcatcttgtttgagggagctttttgacactttgactcttttttttgtaacatcttctatggtgtaacctcttcgttgaatgagtattaactctgagagtgatctcatcctcttatcggttattcgttgtatataagggagcttgtggtcccttaggctccgctcgaccttttccaagatttaaaattgtatttggggagtttgtggcctcataggatgagctcagccccttacgctgtatttgtggcacttagaacacactttgaatgttagagaatcaatactccttttagagaggcgtccctcttagagttgtatttgaatttcttttttattttaatattttaagggagatgatgattctgtgaaccgactcatcctcttgctttcaatattttaaaggagatgatggctctgtgaaccaactcgaccttctgttgagttttgtttcgttccctgagcaacgtttaggactaattttgaggaggatccccctcattattatgagtgctcttccttgtgaaactatcttttggctttcacttttttcttagactttaggggtggtcgatccctgtagttctaagtagttttttttttttttttttaactttttggaaatttcaagtgacaagagtcatgagatgtatgaagagcgatgaatgccatagtgatttcgaggagcatcttggatgttttatttttacagaccatagattcacttgatgtgttggcttatgagcatcgagagtgacatctaatagacctagcttgtagggatttgacgagctttttgaagaacactcattggtgtcttctcttaagactctatttccttcctcaacacagtgtatttctcatctctt

SEQ ID NO: 308011 - DNA, 1333 bp, Cannabis indica
aaaaaatctatcgttgaaaaataaaatttttagatttaaaactgtagtctacactatagggcacgattttgactcgttgcctataatagtatagggcacggcttaaaactgtcgcatatatagtataggtgacgagttaaaactgtgccttatactcaacattatatatacgcaaaaattttacaccgacgggaaagatttttggggacggttgaaccattgtatattctaccctttttgcaacagtcaaataggcgacgattataaagatcgacgaaaatactttacccgaatgtttataacagtagggaaaaactaatttttagtagtgcatctaagctttgaattgtcccatgcctaccaactcctcgaccccgaaacctgttagatccacctgagcctcttcctcctttgaactgactagagttttcaccacaagtaccatctcaattagattagtctcctctgccacctaaaagccacaagtcatgttgtggcaacattagcattaagactaataagatttatagggacactcttgttaataccaaacataatgctagtctttcaacttcactatcgaagcttagaagatatcttgtaattcttgctaggttgtggagggtctagctttaatttgcacaataataggtaagtatttaatgtcaagatcatataaaacattagacactaattgtttttttggatatgggtcacctgcaagaggcaacgctccggcccatttgcgtttctaacaaaggtaagtagccattaacatggctccttttggcagtttggatctttgtgccgtattcatgcatcttcgctcatgaatgcacatcaaataactcttaccacagacttaaagatgagtgacatcacatgacttctgtggcgatgctctctcagactctcattcatagaatcatataaccaaccaggacaagttggtcgtgcataatctaagtctcgaattctggattaatgattattgtctctccacctgaggactcattaatttggtggataaactcaattagtttcacctttgttttgttaagacaccaatttgaacagtgaccacgtacaatggaaaatacctttgttttttcacaatgtgtatttgtttctatccaacttcagagcaaacgtttgtgttttagtacttgcaacttgtggtccaagcagaatcggtcctgagttgaaataggccataggtaaaaaagaattattgggttcttactataaagataaatggtatttttaaaaattattaaaaaatatatgtatattttataaaatgtatttttttttatttgagcccctaaaatga

SEQ ID NO: 308012 - DNA, 1825 bp, Cannabis indica
ttttttgttctcatttttaaaaacaatttttttgaaaacaaaaaacagaaaacaataacaaacatgctcttagtttgcttgtttttctaattcttatcttggatgtgtttccaatggggggaagatgtttcaatagggttggagattgctatatattaataaaaatgcatgatttcttcaaagaaataatataatatctaagggtacttttacaatgcgcctatgagtgacaaaacaggttttgatatggcacacaaatgcgacacgaattttacaggttatgatcagaaaaattagacgtgagttgaaaacgaatcgacacgaatggatacaaaataaaaataggttaaacacgatacgacccgttaaacacgaatttgacatagttttttttttaaagaaaataacttaaaaaaattaattataatagtataactatgtaaagatatatatttagtgattggatgttgagttaaatttttttaatatacttctttaaaaagaaattaaaaatattttaaaatattattttttattatatataaataaaagtatataagtttccaatggaactttaaaaatacacagactattttaaactgtcagaaatactccactatagctgacaatttaaaacagtcacgtaactttattagggacggtcctaaaaaaaactaacttgaggaccgacggtataagccttttgtacttgtggttgacggtttaaaaccgtccgataaagtatacccaatggtttcaaactgtcggggattccatagcttttaataaacccccaattcagatctaagttcaaatcattaagtctctctcaaaaatttgcatatcccagatatctctctctctctctctaaaccgtgcaacctcactctcctttctcgactctctcgttcgaacggcaagcaacacccacaaccacctcatccaccgaacctccatctctctcgtctcttctcgttctcggtcccaatggcaccaccactgccacccaccttcgagttgatgacccaatcgtaccaccaccgccacccaataccacctcgctcagtcttgctcctcctcgtctctttcgattcacggtgatatagatgagagtttgatatatcttttcacttttcattagtgttttctttgtagaaatcccactaatctcttgaaaatcaatgacagaataatgatatggttgagtactttgaagaacaattatcataatttgccttcaccgttaatggatgagcaaaagttatgatatttgtaatgaatatatatataattactgtattgaatcaaagtgtggtcagatctggttttggtggtgtaaatctggttccatggtgagatatggttctaaatgtataaacagttgcatatgctgctcaatatccccattggttttctctagtcgggaaatagttttcccaacggtttttcataccatcatttataattttactaagttttttggacgttcgaataaacgtcagtcttagaaactaacgaaaatactttagccggattgttttttttttttttgagataaaaactgttgtattgatataaaatcattatacataacagaattgaggaaggaaatatactccaaccaaattcaatcaacatccaccaaaaagcattaacaaatcaaagaacatgaatgatttgtgccttaaggaaattagatacaagattgtaaaataaaagaaactcaaacaactttaagaaattttatatcaatgaaatcaaaagaaactgcatatccagccactttagaaataaaagaatgcgagagcatcaatttcttgtagtt

SEQ ID NO: 308013 - DNA, 3337 bp, Cannabis indica
agtatccaggtcttattttttattaaagacctgatctcatccttcattgcaccattccatttgattctttcctttgactccattgcttctttgtaagttctgggctcattctcacagaattcatacactgtgaatgcatagtgaatgatatctgcaaatccgaatctcttgggagccttatgtgctcttctggttctatccctgatgaactggtattgcaggatgcttggatcctcatcctcttccaattccaattcttcttgacgagtcacttctccaccttcatcttctacttccaactcagtttcagtagttgtacctggggtcaattcttggttgtttggtgtcaagcccttcacaagttccacctcaaactggttactatcatctttcttaagtttggtgtttgaattcgcttccagtgtatccctgtacactttgtcttcttcaaatacaacatctctacttatgaaaaacttttgatgatttccactctctatgctccacaatttgtaccccttcacaccttctggatacccaagaaagacacattttctggcccttagttccaatttatcttgcttgatgtgagcataggcaatacacccaaagctctcaatctatcataatttgcagaatgaccagttcttgcctcaactggtgtcttacagatgaggcacatctgttgattaaatagcaggttgtgacagtcgcttctccccaaaaattccttggcaaacctgtgtgtattaacatgcatctgaacctttctattatggttttgttcattctctcagcaagaccattatattgagggttcttgggaacaattagatgcttggctattccttcctgtttacagtattctttgaagaaatttaaacagaattccaagccattatccgttcttaatttctttagcttactaccagtttgattttaagcaaaattctccactacttaaactttgaaatcacctcatgcttgtgtttcaaaatatgaatccatacatatctagagtgatcatcaattagggtaagacaatatcttgctcctcctctggaagtggctctagaaggcccccaaagatctgattggagatattccaatgtgtacttggagcaatgcaaacgagttccaaatttctgctttgttaatttgcctaagacacattgttcacagaattgtagatctctttcaaccttcttccctagtaatccctttttgatcaaaatctctagtcctgtaagactaacatggcctaaccttctgtgtcatagcacctatcagtttatcatttctttggaagcaatggatactaggttcttgcctatactcccttgcagaacatacacaccattgatcacttcatgattacttttgctccttgtgtaaccttaagaactccaccttcaacctatactgagaatccacctttgtctaatatagctactgaaattaagtttcttttgatctctgggacatgtcttacttgatgtagttctctaattaatcctcctgtcagtttaagtttcacagatccaattccattgattgtgcatgatctgttgtctcccaacttgactgttctacctgcaatttccttgtattcagagaactgtgttctgtcagggcacacatgaaatgagcaccctgaattgatgatccaatcgagatcagaatatcctatagaagccaccataacccctgcactttcataaccatcatcactggtatattcacttgatacaagatcaacatttccatatttcttggagccaccagctgatttcttggttagttcaggacagtctcatttgagatgagatattttgtgacaaataaaacacctcttcttaaactttgagtttgactttcctttggtggagtgagtttgatgttgattccaattgtatctaccttcaattcttttgacatcaaagcattgtgtacttcttccaatgtcaatgaatcccttgtaaacatgattgtatcgaaaaaaatgttcatacctgtctaatggtaaagaattcaagactataatggcctagtcctcattttcgatcttgatgtcacagttctcaagatcaagaattatcttgttgaaatcatccatatgatcttcaacactcttccctggttgcattttgaatgagttaagttttttcttcagaaacaaacgatttaccagagactttgtcatgtacaaagactccaatttcttccataaaccagcagttgtggtttccttcgaaacctccctcaggtccttgtctccaagacttaagatgagtgcactgtgagccttttccaagatttcactcctctctgcatcaatcttgtctttgatcttgtcatcaccaagaattgcatcctgaattccttgctgaaccaagagagctcgcattttcaccatccactaactgaaatcatttttcccaccaaacttctcaatttcaaacttggcattccccatttctttccctgattgttcttcacgtttgatcccacgcaagcttggttcaattcaagcaacaagaacccgtctagctctgataccacactgttgagtctaacactcgaatgtcaaacaaccaaatccagttacaatgattatgaatcaataatagaaatatagctctttattaatggtgtctaattcttacacaataaaccgaattgtgtcttagtttcaagtggaaaaatagggactttatataggttagtccaataggttcttgaactggaagactgctcaaaacttcagtgatttccacacggtctttatccacacacagaacgagctggtctacctgtgaacacagataaatgttagcatttataaaaggacaaacaataatagtcaagtataaagacatgcaacatatgagggtgacaattgaagtctatcctgacccctagcattttaaacgcataaaactccttcaatttccaatcccccatattaaaaacagtgccttctaccctgttgacctcaaagttggcccatttactgaagcagtaaaagccattgtcatggccaatattttcattgcatatgtttcaatataagcgcaacttgtataaaatgctctcgggcctacttatcttacactacgcaaggcatagtatgcgactagaccttatcaaggctgcatcatctcgcgagtttggttcaagcgaggtcaactctcgcagagtcattaactaattgctcatccatcccttgaggattggatccacatgtcaattttataggagactgatctcgagtttttaagcaaaaaatttgcattataccaaatttaaattaaaaattatttatataaaatatcta

SEQ ID NO: 308014 - DNA, 1254 bp, Cannabis indica
aacagaataataagaggaatatgagaaaattatatatagataatttttttagagagatagtagacatgagtagaaatagtagcaagagaaaggtatattacaacaagtacttgtgagtataataagtttagggaagtgaatcaagagagaaaaaaatcatgagggagaggctcgattcttgacaagtgaagtggttaggttttgagctagctaaaggacatccttaaccataccctaacctaagccttacactacatgcttgataaagtcctattgatcaaaggagtcaagtttagactacattagtggagaggaatgcactaatccaacttatggagctatgataaatattaaaatcaaagggtagttgaagaggaactcaacgttttggttgaatgcacttgtatgcactattgactaggtgacttttgggagatattgaaaatatccagtgaattgaatatgtaaaggccatcatattaggcaaggcaaaaacaattcaccattccacctaattccatttttttgagagcaacttgtttgctaggccattatgaatcatttgaagctctcatgtgttgagttgtgtataatctgttcgttgtgttttatttttgtgttgtcattgttcgaggacgagcaaaattttaattttggggtgttgataactcgaagatttagagttattttgatatcattaaacttgttttgtaaaccaaattgtagagtaattagtgtctattttatgtaattgtgtttagtttagtgtgtctttgtagtaaatggtaatctgtttatgttttcaattgttagagtgacttatgtaactgattgcatgtgtgttaagcagtaaaagaggctaaaataggtgattgggagcttttggaacaaaaagaaaaagcagcagggaaatgtgtattctatttcatcattgctataagactaccacgtagcaattggtagaagtctgaagagaggtgtgactgaacaccaactcggtttaatgaagcttagtaggcaccgaggtggcctaaattttgtacaactcagtcaggtggatggtgtggcccattgaagggctagatggacattgacttttcaattagggtaaaggaaagtaccctaaaataaggtagccgtattttttgaaaggaagagagagcctacacttttaaaaaagggaattagcagtatcattttctggaagtacacttatgattgtattacttgtttgtgattgtgtacacttgcgca

SEQ ID NO: 308015 - DNA, 1885 bp, Cannabis indica
caaggcgggtcgagcttgtctcattcagtcggtaggttcttcccttgctacatatgttgcagcctcgaacgtaattccaaaaacaatcgctagaaaagtggataaggagttgacagacttctggtggggggatacagaggcaaaaaaaactttccatactgttgattaaagctccctttgtcaatcaaaaatgcgagggggcctcggatttaggaaaatcgaaactatcaactcagcctttattctcaaatgggactggaaagccctaacagataaagagagcgtctggggaacaattatccaaaacaaatatctaaaccacagaaacttcttcgatgtggagatcaatagcagagactcaagcttttggaaatcgatcctaaagtctaggtctcttctactcaaccatgtgtgcagaaagattggcaatgggaaagagacatctatttggtttgatctgtgggtgccttccgctaatagaagtcccacaccacttttggatgcaacacatggagtggcatgggtgaaccaatttataactgaagacgactgttgggatgaagagatgatcaaaaactggttcaaccgagctgatacgaaagccattcttaacattcaactcccgcaggatgatgtaaaggatgattggctttaaatgggggaaccaagtggcttgttctcaattaaatcggcttgtcggtttgtgaagggagaaaactcagctacctctgtcaacccaaaatggaaaatgatctggaactccaaggttcatccgagattgaagctcatttggtggcaaatggagaggaacgcattcccaactagagggaaactttcttgtgtcatggaattaaattctatatgctgccctgtttgtggagaggagaccgagaccttcttccacctgatgtggaaatatacttatgctaaagccctacggtttaactcctcactgggattacgagtggaactagtggatgctcatgactgggagcagtggaagaattggttcttagaggataccaatagaccaccaaacatcaccttcttagagattatggttattgcactttgtgtaatggaagctatgtggaaagaaagaaactctgttgtccatggtcaatcaaagaactcgatatggcaggtgctatccaacataaatagaaaaatcagggaacaacttcatgtagtctccaatgcagtggaggatttctgtgcttggagtccgcctccggcgtcgtggctttgctgcaattgtgacgtttcttgtgatgatgaaggaatggtagtagcaacagtggttcgcgatgaccaaggaaggatcgttacaatcaaaactgagagaaaccatctaacagaccctttaattggagaagttgttgccgtttgcatggctgctaaattgatgatagacaagaaggttgcgcacgtcgtattccagagcgacaacattgaaatagtcaaggcattctccaatgcgactgatagggattgcaatttcaaattggtgaatcttagaagtcgctttcaacagctctgcaagggattccagaattgggaagtaggacatgtgccgagaagaagcaactttatggctcacaacattgccaaatgggcgcgggagaatagtgttactgggatcattctctgcagtgacctgactgccgaggtgctgagtgattatgtcgaatggaacaagcacgcaggctaagatggtgatgaaaactctttgttctgactgtctggttttgatgatagtagctgtcttagtttctgtagtttattttctgctgtaatttcaatttcctgatgtttttcgtattttctatcctgtagacattttgcttggtttttttaattaatgaattggggtgtctaacacccc

SEQ ID NO: 308016 - DNA, 2229 bp, Cannabis indica
ttttgtgtttttatttttcaatgctccttatatataaaatgcaaattacaaaaaatgatgagttgactctctaaaatttgtcaattttagattatttattttgtggtttatttagtttaaagtaattttgttttaaaaaaaaatttaaatctttcacatattttaacatattaaaattataaattttaattttttttatagaatattaacatattaattaattaatatatatttttttaatatattaaatttaaattttattttttacaacataaataaatggtttttaaacaaccgcgcgaggcgcggtatcgttacctagttaattatgagtctaaattttgtcagaaaatatttttttaagcatgtaaaatgaaagttcctatttacaaagacatgtaagcatttaaagagtataatgagacacaacctaacataatgattaaatttttaaaaatataaaaattcatgaaatttttttaacaaattatatattttagagaacagacttactattgtgaaagtgtgaaattgttaattattcaaaaataaaaactcattaaaaaagtgttacacaactacgtactgtatatatataacaaacccctcactcttcgacttactaaagtaacttaaaagaaccatagtaaattttgaaagaatcacttttcaccatattgtgttccacccattattgtttttttttttttagaaaaaaaaaacgggttaagtacaagacacaacacaagacacatattatatataagacctctcaaagcatcttgtgaaaaagtacactacttgtggccaaagtaaggtagaaaagtaacactctcaagcccttttcttttttaaccatttgcattgagattgagaatcattataaactaatgtagaaaattaattaaaatacaattaaaatttttgttttatcaataaagatataaaaaatatactcatttggtacttttcatttttaatgatgtttgtttagttatctgtattttgaaattgtacacattttatactctacgtacttttaatcaaatttcaaatttgatccaattactcttactaatttaaattttaatttaaatttaaaattcaaagacaattatttcaaaatagacaatatcaaatatatattattgaaaacataaaatgcccataaaaacatatttgtttatgaaaggtatcatgttcataacttaaattttttgaaagcaccatgttcataactttgaatagcttagagaaagaataaaaaaaaaagaccagattgatgcgttcatgaatcatcgagctgaggtggcatcattttatatttttagagtggttggttttattttaatttttccaccttacaatataactcgtgttaataagaacccaaccgtgatggttttgattttgacaaaagggagaatatatataatccttagccaaatcaaatcaagaaatgtaaatattggaacagacagcagtataagtatttctcgactgggtttcctgaaaaaagaaaatattatacaaattacaatccatatacatatgtaaatagactttgactaataataattgtgttattattattattattattccaataacacaatagttgtattgggaaaaatgtgagaagcagcacgagggtgagcaaaacgggccgagaaagagcgagaaaggttatcgggctcggcccagcccattccttgatcaaaattgttggagtacgtagtgggatcatacgaataggatgatgaaagagtagtagtagtcgtagttgttgtatcatattcatcatcatcattataattactcttcttctttttcttcttcttgattttattcttccaaaacgcaacccaaccttgctgtgttattatgtcgtatctgctgctttctcccaatctgatcacacctgcagtccttgatgaagaagaacgactataccattctttgattctcatttgctcaataataataataataagaagaagaagaaagaactggaaacttgttagttggtgtgatgaagagtttggttatatctatatctatatatatataatatatagatagggtgacttttatgattcaaattttatacgtattgtttaataaattagtcccaacacggtgttgtggagataatattttattttattattttttttaaaaaaaaaaagaaaagagacaactaggctaagtaacttttattcgtgagat

SEQ ID NO: 308017 - DNA, 1206 bp, Cannabis indica
agtgatttgtaaggttcatcagacaactaagtaaaattgtctccatgttgccttactaccttgacattgtttcagattaaagtaaaaatgatagtaaaaaaaattatttaaagaaaatattgtaaaataattagtaatttttcttcatgaaaatcttacgctactaagttgtaccttttaaaaaatacgacttattaataatatctttgaaaatataacttttacattaatgtacgtagttctcttttatcatattttattcaattgtttttatgaaatgagtgacagaacagttgatagttggcaaatagatataaattataatatacttttcacttttttttaccttaataattaaaaaactaaaaattaaaaatattaattattatattaaaagaaaaacatttcattctattaaagtatataattcacatctacttgtcaattatcattctttgtgccatgaaaatttgaatagaatgtaataaaagaactaccttaatgtaaactttatattttgaaatatattattaacaagttgtatattttagaggcatcacttagtagtataaaaagttaagtggtaaaattactaattattcaatattgtaatttaaaaaaatatgtgtatttctgtaacgatttttttggggtccaattggtgcgccttagatagctctaactatggaaaaaagatatgatgaatgtaatatagaattttacatattacattaattgatgttacaaaataataacaatgtataatatatggtgatgcatgcatacatgtgtattatgatcatgtagacatgtatttatatttatgtatgtatgtatgtatgaatataattatatataaataataaataaagtttgtgacagagcatttaacaatgacagtgcaaaaagtaagggtactagtactagtgcatgcatggcagccgatcccataaaacaaccgcaattatagtgtaaaaactttcaagctaggggtccgcgcgcccttgacagtaactactcatgcctcctcctgctactacctccaaaacagccgtaaaggtgtttcataaaatgcctcacaaactaaataaatataaaatatatatatattgtatattgtcgacaaaacaagacagggccgacctataacaagggcatatataacttataagagagagagagagagagagagagagaaggtggttg

SEQ ID NO: 308018 - DNA, 1186 bp, Cannabis indica
ttttttttggttcaaactccataaaacaaagtggacaagattattagagctaattgtcatcgaatttatttatttatttgtctattttgaaatgcaaataaacgagaagtaaagcaaaggatcttgacaactatcaatacctggacacgtttttgcaagattaatccttcataagatcccaccactcctaaaaaatgcttcatcctttccaaatttacctataaatttttataaaataaactattaaatatatgtactcgtgcaaaatctattaagaatacaaactttacacatatcaaacaaaatcataagatcggtcactttaagaacacaaattcctatcagatagtagatataaaagaaacgtttaaatcatactcacctcaaaagaatttgtcaggtaaccacccattgttacaaattccattttatagattgtcagaagtaattcaatagccccctgagagatgtgaagcacccaaatcaagaactattataacaaacaaatattggataaagtaagaaaagtaaaagacaaaccatggataagacatacatacgtaacactataatatcttaaatagttattgtccatggaaaaatgtgttggagaagaaaattcaaaagagagacgttatacaaacatgcataaactaaccaatgtgacaaatcaacagtgaataattaaagattcatttattaggttcatgtaattttcagcaaaaaaattatatgcaaaggttaagagatcatcatataagtttgagtgactgaaattttaagactcaaagaaaaagaactttgctcttgtttaaatctcattttgtaaaattttagaattcaatgtataagaagcttatgaggacaacctcagatatttccaacgacggaatgtgaggtagaaagtcatttcccacaaacaaacacatcaaaacgaaatcatcaatttggcgctccaaatctcctttaacatctgggatttccataagatatgctaaatactccctgaggatccaaatgtgaagaaactgtaacacaaaatggcaagaaaagaatatattagaagaaacactatggtggcatttggttgggaggaatgaaaacataggaatggaataaaatttaaaatgcataaaataaattgataaaaaaattattaaattttttcttatcatgcattggaatg

SEQ ID NO: 308019 - DNA, 1187 bp, Cannabis indica
ttaaaagggatgtattagtgcacccttaacttatttcggcatccagtaaaaattttttagtctaatttttttcatattcatgtacgttataactatttaagatgtcctacaaaattttgaaaaattcggaataatttacaatatagaaaacaatgttcaaacagtctattttacacgcgtataaaataaaatagtcacgcgtacaacacactgtttgaacataattttcggcatgttaaactttttcaaatttcttaaaattttgcaggatgtcttaaataattataatgtacatgaccatgaaaaaaaatttgactaaaaaattatttcggatgctaaaacagataggagtgcatcaatatatccattttaagggtgtgcattgtagaaatttcctatattgctttatataattatgtttttgagcaactattgttttatatatagttggatacaagacataatgtctataaaattatctcttaggcatgatatatatatttgaggccctttaattttaaggtgattttcaactagacactaaaaatttaaattaatccaatggaacactaaacattatcatatatatggaattgtctatagtattatattattattagtgagacactttagagtaccacactaaaattgatttttgatttttttttttagtttttaataattaatttttcttaatatatattatttatattatatataaaaataataaaaattatacatttttgtgtgatttttaattgtggttggaatagaaaaaaaatattgttaaaattgtatatttttagtgttagttcaacactagatttagtatttactattggagttgacctatagaaatattgtgttttaggaatatgtcaatctctcaagatcaccctccatgcatgaaatcaaatctagtttttttgttttataaagaacaaaataaaattatcaacactactgaaaatactatttttaataataattttttagttacaatataaactattttcaactactttcagtcgcaacaaaaataatttgttactaaaaagtaatattacttgttattaatattgtgttgtggttaaaataaattgtaatttttataattaatactcttaattaatcatgaacttttaatgataacatatgaatgataatttatatttagtcacaatttt

SEQ ID NO: 308020 - DNA, 2180 bp, Cannabis indica
ctttatttctcacattgtgcacgaaaggaacgggcacagcccatacacaaatcaagatactgaaacttatatggagcatttagttgaaaggtatgtagtaagtgttattcacttgaacaattcttaatgattgtacgttacgtaactgtcttcctcttaagcctattcttcatgatctcaattggaatatcagcttattaacatgatttatgttggaaaaacaggagtatagcattcataatactgagtggattatatcgtcatatataaaaatagtgctctttttactaagatatttcttggttaattggggagtcaggtttggcatcacacttaaataccctgaacaaccttttctgcttgctaaacctctttcctgtctacacaacttgctgtgcaatcggaagaacaatgattctggtaacctttcttgcttgatttggttttcatatcagaataagattctaatgatttgtgtcaatatattatatttttaaataacttgtcaaatgcattcttctattgaatagagtagatatacactagaaaagattctgatgactggttactatgcaactggctataatatttaattgtgtattatattgcctcgtatttagcatcgctctggttacattgcttatacatgttatacttgtattgactatacttgattgcaaacggctaagaacaacgtgtgaatactaaataatatttgtttatgcagtggatatttcaacttgtagacagcttagtttggtattgaaatgatgatgaaatgaagtagtgaactgaaccaaaccttgtcggaggagtgaaatattgtagggctaggtgtggagcctggcttcataaaaaaaataaagcagttaattgtctgactgagaaggcttctcaggattacaatacaatacagtagttgctttagttctttcctcgtgtagtcttcttgaaatatatatatttttatacaatttggtatatggaaaggtatggaaggtatctcgcatggtgaacccaaaaaaatcaaaactatagtgtgatagaaggtggcatatagtgaagatgagacacatgccctcctatgttcgtcttaagaaatcttgacttcatgggaataaggaaagcatttcttttgcatgcatatgtaatgtataaacccattgcattttagggttagttcagggtcactttaatttgttgtggttccattcccactgtctaaggtaaacatgatgactggccatttatgagcttgtaagacccgttaagtcctctaataagggggggtaaaagggctataagtaggtgtttgctactgcaaagagctaattcgttcataacacagttgactgattctatagataaggcatagcatccttggctcaatattatagcacatagggctttcgtgcaactacagcacattgctattagagtctagctttgttaatgctcgacgtagtcttgaatctttgcatatcttaaaagagatagagagctcaaatgtctaagattgacgtcctcggaggcagagaaaaaccatggtaaccaaacaagtaaaacagtttttttttctgtttctgaaaattgaaagtgaaaggagtcatcgaagtgatacatgaaaatatgtgcacatacaccaaaagaagagagagggagagagaaattaggacaggaaaaagaaatataatatcagaaacggaagagggacttcactattgttaggcaacagtacagcacgggccagtaacatcttgaaaactttgaaaggagcgaataagtagcatgtcatctagaatttttttttttcacttttaagggattgagtttcttaataggaaactacgtataacagcaagatgtgctacaaaattaaaattcaactgaggaaataagattacatttatagaaagagggaaaatagaagggtttttttttttaggcaatatgagttgaccaaagaagaatgagggaagctgatagcaaacatgaattgagttgtaatttatcatcttacaaaagaagtgctttcatcatagggcaaatttcacaactttttcttctcttttttaccttgagagattatcttgtctatgaaagctttttctttacatttttccttcttaattttagatttaatttttcagctctctctctctctctctctctctctctct

SEQ ID NO: 308021 - DNA, 3700 bp, Cannabis indica
gaaagttcatatttagggtgttaaacaacatacttgtgagtagatctaagatcctggtaaaataatttccaacaataaattcttgatctgcttattggaagctcggttatatagacccatggtccccccactagttgagataatattgcttgtaagactcatataattggttttgattaatcaattataattctcaaattagactatgtctatttgtgaatttttcactaagtaagggcgaaattgtaaagaaagagttttaggggcatatttgttaattatgatactttgtatggttcaattaataaatatgataaatgacaatattatttaataattatttatagttattaaatagttagaattggcatttaaatggttgaatttgaaaaattggcgtttttgagaaaatcagatgcagaaaatgataaaactgcaaaaattgcaaaaaagtgaggcccaaatccacattgccagggccggccacttttatagggtttatcatctgatattttcattattttaatgccaaataattcaaacctaaccctagtggaatgctataaatagatagtgaaggcttcaggaaatttacacttttacttttgttttccttcagagaaaaacctgagccttctctctctatacctagccgccaccttcttctctctcttccctcttgaattttgaaatacttagatattagagtagtgcctgtttattttataatcgttttaaaagttcatatttaggatgttaatcaacatacttgtgagtagatctaagatcctggtaaaaaaaattccaacagtaaagcctatgaccgtgttgagtggaattttttgcgggaaatgatgtcgagaatgggttttcataaccggtttatagaactcattctagctactgtgtctactgttcggtatatggtggtccatgatggtaaggagttgggtcccatttgtctagacagggggattcgacaaggagatcccctctctccctatttgtttctgatttgtacagaaggtttttcccaactgttgaatcattttgaaagaaatggagatctaaaagggtgtaaagttgctaacgaagccccaattatatcacacttgctattcgcggatgatagctacatttattgtcaggctaatgaaagggaggcttctaatgtgttgcgtctccttcaaattttcgagttagcttctggccaaagtgtcaactttaccaattctagtgtcttttttagtgctaacatctcgaatgccatgaaaacaaggctttgtggcattttgggtatggatagggctaatgaacagagcacttatttggggctgccttgtactatggggaggaacaaggatgcaattctaggctttcttaaggataaaatgcagcagcgcatacaaagttgggagggtaggctcttgtctaaagctgggcgtgagatcttgcttaaaacggttgctcaagccctccctagttatgccatgtttgttttccttctgcctaagaagacatgttctcacttggagggtttaatgtccaagtattggtggggttcttcatcaaatacttctcgtgggatcaattggatgagctggcgtcatatatcgcggcataaaaacactggtggcctaggctttcgtaaccttagagactataacatgtctcttcttagaaagcagggttggaggctcttgttgaatgagaactctcttgtgagttgtatttataaagcccgttatttccctcgagaatccttcttgacaacttctttggggtcaaatccaagttttatttggaggagtatacatgagtcataagctttggttaaagcgggagctagaattcgtattgctgatggtactgtaacaaatatgcttaacataccttggctgccatctgttgataacccgtgtgtatcttcctctcaccctgctttggttaattgtaaagttcatcagattatgaaaccggggttaagggaatgggatgaggagctcatatatgatgtcttcaatccaagggatagcagtattattattaatatcccactgagtatgtcgattgttggagatagatggtactggaatatgaagccatctagtatatattcagtgaagagttcttaacatcacattcaatgttcgaaaggggagtggagcacacaactggaatcagacttgtggaaacatctctggaagctccaaatttcccaaaggttgttcattttgcttggcgggctctaagaggatgtctccccactcgttcccagcttaaaagcaaacatgtacctgtggaatggcaatgtgttttctgcaataacgatattgaaactatcctacatgttttgattatgtgcccctttgctcaatcgtgctggaatagatctaccattgatcttattccctctgctgtagtgagtttccatgactagtttgcagagttctggtctaggcaaagaattggtgcggttgaagaactcctgatggtgggatggtctatttggaaatcccgtaatgaatttctttggaagaatcgttcaaggtctgctgctgaagttgtttcctttgcacatagtgttcttgatcaatggatttgtgctcagtctcgtcgtactgaaccgctgctttacgagaatgatagtgttggcggcaaggatttttggtctaaacctgaggaaaatatgatcaagatgaatgtggatggggctacttttacagcagagaatgcttttggtacgggtgctattgcgagaaatagtgatgatggagtcttggatgcatttgcaacctattatactggtggtccacatgcttctgtggcagagatcatgagtataaaagaggcattaagctggataaaaaacaagtgctggaacaatgttgttgtggaaactgattgcttagtggcaattcaagcattaaatagtttggttgacatgccttctatatttggccttcttgttcaagagtgcaaaagtctccttctgtctttggaaaatgtcaaaatttgtcatgttaaacggtctgctaacaaagccgcccattgtctggcgcgtggctcttgtttcttgtctgaccgtattttctctgagagcagtattccttcttcacttcaaacaattgtaatagcggatttagctatttaataaagtttctacttttattcaaaaaaaaattgttgagctatttttaataatttaatatgtggatttatttatttgagctaatattctaaattgagttaaataagtgatctaattaaatgagcctaataaatatcttattttttatggactttgtaatgtataatactcaatagtaaacctaattagggtttatggggctctaattagtttgttattagtagaaattacactatatagaaaaattataagagtacttttttataacattaataaataatgctaaggttttttttttttttacatttatatggactttttttataccatatttttgttgaaaaaaaatagaaatctcatatttgtaaataatgataagttttgccaaaaaagttgttggcgccagaagtcaccgaaaaagtcaccgttcccgaaaaagttgcgaacaaagtcactggtgccggaaaagttagtgtcactaggaaagttcactgaaaagtcatcgttgccagaaaaatcaccgaaaaagtcactgtcgccggaaaaagt

SEQ ID NO: 308022 - DNA, 2990 bp, Cannabis indica
tgtgagtagatctaagatactggtaaaataatttccaacagatgcctccgcttaagtctccgggccctgatggttttccaattaaattctttaaactttattgggacatagtgggaagccaagtggtggagtttgtgaaagaattattttgttcggggaaattctacaagctggttaataagagtttcattgttctgatcccaaagaagtctcatgccagctgttttgatgatttccgcccgatttgcttgggtaacactatctataaaattgtctccaagttattggcgaaccggctctcctctcttttggataagcttgtttccgcgttccaagcggcttttgtcaagggtcgtaacattgctgaaaatttcattattgccaatgagatttttcatgatatgaagcagcggaggggaagggaagcctatgttggaatcaaatgtgatatgtctaaagcctatgataggcttgagtggagatttcttcttaaggtattaaaagcttttggtttcaataaccacttttgtgatatgatcatgttctgtgtcacttctgttacctttcaggttttaattaacgggggaatcaccaaaaaaaattctcctaaacttggtttgagataaggggacccgctatcccctctgttgttcattttgtgtgtggaggttctctcaaaactattattggcaaaagaagaggaaggtcttattcgggattactaggttggaagagagggtttttcgattatgcacttgatgtatgcagatgatcttcttatttttgcaaaagctgagaatggtaatgtgactgcggttttggatgctttggataaatactgatattggtctgggcaacagcttaacataagaaagtcgaaggtgttcttttccaaaaattgccctctccgacgtcgtgaatcagttaaaaacctgttgggttttgaggaaatggatggtggggaaagattcctgggtaatcctttgcttctcaaaggcaatagaagtaaagatttcgagttcattgttgataaaatcagttcccgctttgaggggtggcaggcgcggctcctttcccaagcagctcgattgacgttgattaagagtgtcttggcggctattccgatctatactatgtctgtttttaggctccctaagaaaacaaccaatcgaattgatggaattatctgaaggttttggtggacgggtcaggctaaggaagggcgttatctatctctaaaagcatgggattctctttgtaagcctaaatcttgtggtggtctgggctttaggaaggcggaagatgttaatttctgtctgcttgctaagcttggttggattatggcgtcggaatgtactagcctttggaaatcaattttgattgacagatattgttttgagacagcctttggggattcgacacttccttcaaatgcttcgccggtggccaaaagcatttgggcgaccaaggatttcattgtcaagaatagtgtctggttgattggttgtgaagctagagtcaagatcggcaatcagcaatggtcgggtttcgatggggatttttttgactcggatgtttgaatccgatggtgtgtgatgacttgtatgtgtgagggatttgatgatggaggatggtatgagttggaatattcatttggtcgccacttggtttcgtccaactttggctgaggccattctcaagattgcccttccctcttctcaacctttggatcatctttgttggaaggtaaatgcttcggggcagttttctctcaagagtgcctattgggctctgaataattctcgttttgatcatgaggatgttgtttgtaagcatatttggaagaagcatattcatgagagactgaaattgttcctttggaggcttgtccaagatgttctcccgtttggttctaaattggcttctgtttttggatctacaattggccggtgcatgctttgcggttctgagggtatggatgttggttctcattttgtctcggggtgtgatgttactagatccctttggttctcctccccgtggggtattagaattcagagtttcaatttggtgggaggtagagagttggtttcttggctcttagatccaagtttcctagttgattgtggtggaaaggtgttgtatgagttttttctttatggtgcgattttgtatcataaattgtggaatgttaggaatcatattttccataacaatggggtgctatgtttggcggaggtgcggaaggcaattgatcggagttttgcagagcataaacctctcttggaggctgcttaagatatcgaatgtaaccaaaagggtatttgtgcagttcggtggggtcttcctcggccggctagaatgcgatgttatgtggattttgcttctgcaggtgatgttggtgcggttacagatgttgcaggtgaaatctttactgcagctgcttctaaggtgcaggttcactcggtggtgcagggtgagctcgaagctgtgcggtttgggctcgatatggctacgttgttggaggtggatgtgggcactttcttttcagacaatcagactttggtcaaagctgtggttgaggaaagtccccctctttggcaattgcatttctcttttgttaatgttctcaggactgtagttatgaggaatgtagctttttgttgggtctctcggatgaataacatggcggcccatgctcttgctagatggggcttgtctcatagttgtaatggtctgcttagtttttgggaagtgagtccccatgtgctcactaaacttttggttcctgtttaatgaagtttatttctttagcaaaaaaaattaaacaaataacgcctagttatatattaaatggttaatttacatttagatactttatattataaattattactatcatatcatgtatagtttaatatactcacacttcaatagcttatatttaaaatttaataactatttagtatccatcaatatttttttaaaaa

SEQ ID NO: 308023 - DNA, 3481 bp, Cannabis indica
ataaaacaaaacaaaataaaaatctctaacctaagcctaaaaatccatctccaccatcctctctttcacctccctctatcttttttctctacagcttaaaactgtcgtaccaaatgggcaacacaccaccgtcgacaggccctagacccccttctctaaccctctcacactttatctctctcccattgtttcaatctctctcacactctctctctctcccattttttatttctctctctcacgagctcttcacccaactccggccgagctttttctgaccacgtgatggtgaaacagatgtgtttatcgaaattttcagaaaccaattcaaataagatcttaataaattaaataagtaaatgatagggtgacctgtgctacgtttcagtccaggaagacgttctcgtgtgatggaaaatggtatctctcactcgtgacgtcactacattgacttgggaggaattcgaagatatgtttaatgctaagtactacaataaaggagttcgtagtagcaagaggaaagaatttactgagttgattcaaggagaggatatgtcagtgatagaatatacaacaaaatttgatcgacttgctaagttagcttcaagtatagtacccatagattttagcaaaaaaaaaaaaaagaagtacttgtctggattgaatgccaagattgagcatgatttggtcattactactaatgataccatcacgtatgctgagatggtggataaggctctttgagccgaaggtgcatttgagtttttacaaaagcccctggggacttctagtgcttgtgggaccaacactcttcctacttctggttatgttagggatagtggtgattccaacaaagattagaaaagaaaaactcatccagcaccaagtgactcgagtctgagtaagagatttcgtgaaaacaaaacagaggtggttgtcaaacttatacttatcctgagtgtcctcgttgtaaaaagcatcatctaggtgaatgcaacagaagaacatgttttcagtgtggtcttgtggggaatttaaaaaaggacttccctcaattgaagaaagcagagtcaagaagaggagaaattactatcctagctcgagtgttcgctattacataggctgacactgcaactaattcgtcgataacaacaggtcagcttctcatcaataattccttctactcaatattatttgactcttaaatatatttataggtggcagttaaaatgattagtaagtttaataggaagttggttatttctaaaaggtagattaatttttatggattaagacatttgacagaaagttaagtgttgatctcataaagttagaattggcgaatgggacgtcaatctgggaatggaaatctttcagtttagggatgaggagccttttgttttgtaggatccattcatggttctcagattctaatcatttcagctttaaaggaaaaggatttacgacatagtagatgtataggattgttagcagatgtgttagactccagcaaactcaaaacatttgagccctaagttcttagggccattcgagatgctcgagaaggtcgggtaggtagcgtatcggctagccttaccaccagtgttagtatacataatgtatttcatatttcaatgatgaggaaatatgtgtcatacataatatatatattcgtgattcattacatattcagcatgtaaatataatctaagtctatacaaacacgtatattacgcattaaaagataatcatggcaacccatcattacaaattacgattattcactcaatacctaatcacataatctcagtgcttcataaagcactctaatcacacatcaccacaatcacataatctcaatgcttcataaagcacccttaccactcgtcatccacgagctatctatgtcactatcgttgtccgataaagcaaacggtaagtaagaaacctatctgcagtttcaacaagtaattactcataacggtaatgaccgtatctttatttaatctcaataacggtaatgaccgtgtccttccctcgatcataatcgagtcacaaacgataataatcgttccacatcattatctcgatcataatcgagtcacaaatgataataatcatttcttactattacctcgatcataattgagtcacaaatgataataatcgtttcttattattaccttgatcgtaatcgagtcacaaacgataataatcgtttcttaccaacacgcttagcagtgcataaaacttttcttacctcaattcaatgtcaggcgtgcgggccgacctgggtgaaaacaaagtttgacgatcccaatcctatgtcactacaacaaaaaaattcaataaatgccttaaacaaatttcgggcctaattcccgtaaccggacaaaacgtaatctccaacaacctcaaaataggccatacaacatctaaataacctaaattagatactaggtaccacccagagccaaaattgaactcgaagaaaacctagaaatttttttcctgcagggcaatcggtcgaccagttttgccataccagaaccaactggtcgaccagttttgacagggaagaaatttttgggttttcttccctcaaaatgatcaaatcaccaccaaacctaaccaaaatctctagaacaattcaatatcacataaataacatatccaaatcatcaattcaccacaactcatcaaattattcaaatcaccatagaaaagccaaggttaagcttttaaaccataattacaactccaatcctaacagccatacaatacctctaattagaatctaaacaaaccctaaaaacaccctcttatcacagctcaacaccacaattctaaaaccctaaaaccctaaccaaaaatcatttcaaaacttatggaaaatcaaagaaaatgataccaagaacttacctcaacttgggtaacacctagtactatgaattttgccaagaaattgcttgaagtgggctgaattctccctaagcttcagctggttcccttgagttgaaagagaggagagagaaaggtgatgggtttctaatttttctttctttttctaaacttttattttatctcatgcatatacacttaataatattaataatataaaatcttatctaatctaacaagataataccaaactattaatcaaaatcctaaaatcaacttagcacatttaccattttgcccttaatactacacttaaacccaaacatacccctaggggtaacttaggtaattcctaactaatctgctaaactaacaacttaatgttctaaactagtacaatataattcctatttaatccatactttattgccgtgacatttctgaccactccgccaaactcccacggaggtcgggcgcccaaaaacattttatcacataaataatgtttattattcccacaatatctgataaaatcttcgtaattaataaattacgctttattaaccacttattaaatttt

SEQ ID NO: 308024 - DNA, 1488 bp, Cannabis indica
aattcatgcaataaaaaccttgatacacaaaaagttttaaaattatacatatagtcatatataaaaatatatataaatcaattatttatcatacacggtccggtccggtttaaccgttaactatgtattacaaaccgcaaccgaaccattatgccgtaaatggtccggtttaaccaaactaccaaaaataattttcccgattacggtctacaatggtttagattgtcacggtctgcatttaaaccgcagttttccagtttatatgaacagccctattgccagcaacttggtggtcgatcttgtccaactccctactaaacggttcatagcatgtgtatcttccaacacaattttttcagcctcaaaacttaagcttggtgttggcttcggtgagttgaatcgtcgttatcatttgttcttttatttcttagtttcctaaactcattattatattgtttgcggtatgattaggctgctgctgaggctggctgactatccctaaacttgattgaccaagggcacatggctgctaccttgggagggctgacggaggtacatgccatgttaaagcatgcaaaggaacacgtggaggctttgaaggacaatgtcttggcctagaagacgtggagggaataagattaaaaggcagtggctgatgcggagaaggccatgaaagagggtcaagacttgatgatgcatgctcagactcagctgttggcggctaaataggcctgtcttttgaaggaggctgatttatgcaaggcctagctagagaatgaaaacctcaaaatgcgtctgtctaagttcgaggaacttcatcaagctgatttatagtatgtttccaatatgtctgcagagttgaaggagctttatttgcttcaggactctaacaaattggttaatgaagtctcatataagaagaccatttgacttccttctccagccacctgcaagcactgcaagagcgctatgaggatgggggtttcatatgttggagattgaacaacttccagcctcgtcttcactttttgcctgatcttgaagccactatgaagcgctacatggagaaggaaaaaaagatagatccaactctgccagcaaagatggagggatctcgtcctccttatcccatgtttctcacaaaatttcgtgaaataattactatttaactgttttccattgtttgatactatcttatgtggaagtccatatcaacaacaatattcgtaacaacgaagtccaatgtctttttggtagtgattgaattcatgggttcaacttccacccactaggtgaagtaatctactgcaaccactgtgtttttaacccctctttttcctattgggagggatctgataagatcgattccccatattacaaatgaccatgggttggtcatcatggtaatctcatttggtggagccctgggcatgtttacaaatatttggcatggataacattttcggacatagtctatacaatcttttt

SEQ ID NO: 308025 - DNA, 1505 bp, Cannabis indica
aaacccaacaccatcttcagtagtgcacgtcaccagacacggtgtagtagagccatccctcgtgaccttcttgtctatcaatcaataagtgttctttgtcactttttactcgacacgataatattaaggttgaaatggtgtatactgtgtgcgagtcaatattctgagaatgttggtcccatttatatggtcttctacaaaaagggagacttgatgttttgcactgactcatttaacccaacactgacttatgcaggcacctcttggtttgtcatggaaaaagccaattcttcaaaagctatgggagatagaaaattttgcaagaaaagaaaatggcaagagactcttgctgttactaggggccacccccagcgacatgacccacaattgatgcttggttggtctcgcacacatcatccgtccatctttccaaagattccttccgtggggtttgtgttccccacaaaaccatccctcttgaaccccatgccatgtagagggaaaaggagatacacagggctttggaggagcatttggaaatggagatgggattcgtgcacaggcgggccaacgtgctttcaaccgtgaggagggcctcagaagttcttcacgctttaaccccagctgggccaacagtcgaagtagaggctctagagaagcatctggcacccaaggtagggagggaagttgcacctttggcagcaaaaatcttagaccgagtggtagggaacgcctctaagttgtctttggagacttgggcaacttgtagcagtgtcgatgcttttgccttagcccatgtcgctaagcaacaggcatttggggtaaggttctaaacctcttcactctagcttctactgttgtatatacctttcttatctttcccctattgtaaaaggtagctctgttggcagaaagggttcttggagatgttggtgcgctggtcacgaagctagaataggccaaggtggacaatcgtgacttgcgcacttccaattagacccttctcggtgaaaatgatgaggtcaagcttcaaatcaaaagcttgaacaaggagaactagcgtttggaagataattacgcccagtagactcgccttatacggggcatgaggaccgtccacgacctttatagagagaccgtggagaggatttttggggtagagtcttccaattcgtccagtagcattcatccttgagtacccagatcatacaacagtttcctcttcttcctttttttttttttttttttttttaactttctccccctctttactctttttattatgtggagacattttaactttgccctaactgcgggggctgtttgtaataaccttaggtttttactgttgggttttatgccctaaataaaactctatttcaatgtaatccagattattcaatatcaataaaataacagaagtatttttcattcatttgtgtatgttttggttcaccttatcaattgtttgtctatttgatttataaattcattcaaaccctttt

SEQ ID NO: 308026 - DNA, 1274 bp, Cannabis indica
ggcataaaacccaacagtcatcgtcttcaagattttcctcctcgtcatcctcatcaatcgaattctcatcaacgtacttctcactttgctggttttttctgggagggtggcttcccacttccgatgtctctccttccccaacagtacctgattgggtgcgtaaagtgggagatagattagcatcatccatgatagcgtccccatcatgagcggtaggtttaacaacggtggttctagtggtcaccattgttgcagatttgaacgttggtgtcaaatctttcttcagctctcaatgaaagcactaaaatgtctatcgagatttttggaaactgatttaaatattataaaagctagagaaaagagattaaatataaggattttgacgaggatttctatgtggttcgagtgttaacaaactccaatccacaagtcaatatatttggctataaaaacgttcgagtattacaaaagagttcttgtctagtttatgaacactagctcttagcctttgagtgtaagaaatcaatctcgaaacctttgtaggaagggttaatgttatatttataggctagagtcaggtagggttatacctaaagccgttaaggtttgcatgtaaatatggcccactagtggggtaaatacaagtaatatattgatattggtacgatttggtgtggcccaacctgtgaggtgacaattgttcgtacatgggtggattgcttgatggtgacaggtggcatgcgtgtgtcgccttcgtgtacaatagcgttagtgtagtggaggttggacaaaggcatgtctctcttagtggtgtgcacactctcatagtctgacataagggacaaagtcctgatattgtgggattcaatgccagaggagcgtaccacgccaaccttggatccgggatgcctcttgaattgctcattcggaagtatcccctgagggcattcggatacatcctgtcgaaacttccttcttatgagtgagtgagatacctttccagagcctaccacactattaaaaaaatactaatattttaaatatagttttaattttatcatatatttacattccatctatttataaaagcctaaacccattctttttcggtaaagctttcagtattacattctacattttgtcatttgcttaaacaaagcatttaaataaaagtatttgaaacaatatttcaaaaaaaagtatttgaaacaaaaatgatatcatcttgagttagtaaaatatatatgttgacgaggtttttggcaactaataaa

SEQ ID NO: 308027 - DNA, 1628 bp, Cannabis indica
tgatggcgctgagtcatggactagacccacataaaaacacaatcaagattaatgtagatgaagcactctttgaaagcgataacaattatggttttagaattgtttcccgaaaccatcttggtcaccttgttgcagcactggccggtttctatggcgaaagatatgcagctgaagtcattgaagccatggagattaaagatgctctcagttgggtaaagaccaataattagcaacatgttcaaattgagacggacagtcttgttttagtacaagctattcgaagcaaccaagcaatgaggtccacttttggccttttaatcaaagacttccaacttttgttatctactctcccaaatgttaatttatttttcattagacgatcatcaaactgagtagcacattatgttgctagacattctcggtatcaatctgatcgtagcatttttgatatttctatttctggtgaactcttaaatcttttgtattcagaatgctaaattattcaatgaagttgatatttcatctaagaaaaaaaaatacatcctaattagcatcttgaatattggaagtaaacataatgatatatttttccatatttatcttttttggcctgaagttgttttatattgttgaagcacaatgctgtagtattagcagccttatggctggcaaaaatgatgaggctatcattgcaaacgataagtgtgagattttaggccgagtccgagtgcaccgaaaacccatcaagtctcatttcctctctccaggcattataaaaaacagctacctttagtgatagctttttaatcacaatgtagatattttgtgactaaatgttacttttagtcataacaaaaaattacttgtgactaaaacatagtattttttagagttgtcactaatttagttttagtcactacaagtattgtgactaaaaaagtatttagtcaaaacaaattataatttttctaactaatacctctagagacaaaccttttaagtcacaacatagaaataataatttttaattagtcacaactatttcacttttagtcacaaaaattttgttataactaaaggtaattttttttgtagtgaagacaaatcaatgaagacagagcttcagcataaaaaagaaaagatatggatataatgcgcagaccttaacgtaatcctctaatggactaaccgtcccacgagatttccaattcaacataaaggcatattctggtgtagtaacacaacctataactaaacttacccatttcttcccaagccaagcttcaccctatatatcttgcaaaatatcttattttactcgatcatacgctttactcatataggttgatcgtaggcgcgttcattggaccacatttaatatttttaggcctatctagatccgatccaattatatattggatgttagattttactatccgatctaattaatttcagtcatccgatcgatccaatatccattagatgttggattggatcagttctatccgttggatgtatgtcatgtatatttattggtttaatatttaatattttatacatagtattttttagattggatcggatccatccaatattttaggttcattatggattggattggattggat

SEQ ID NO: 308028 - DNA, 1085 bp, Cannabis indica
aaaaaaaaaaaaaaatcttatgagacaaatgaaaggttcctattgtaaaattttgctatgattattatgaagatttataaattaggaagacagaatttacaattaaaaatatttggttaaaatcaataaatttatgagtaagaaagatatataaaaatacttgtctctagcctgcaggttaagttaaagtcagagaaacgtgttttgtactcttccactttggtatatatacatacatacgacccttgttttccaacataaaacctgagaatccatgtgtggttgtaactaacactaaataatcataattcaacagatttttgttttttttttttttggaacccctaattcacatttcttaaagtttgagtagttactgtgagttgcacattttaaattcaaattatgacttttctgaattatagtaatgtgtattccaaccctttttcctttgaccgaaaaaaaaaattgcacactaatatttgtaaggattatggagttaaaattattattattatttgaaaggaacaaatttattttcaagtggataagtagtaagacaaattttaactgtaatggccctatattattattatagacagtcaaagaaaatataacgcagtcaaattatacattccaaattctaccaaacttgaagattctacctatattatgtaacttaaattcttaggaaattcttaatctaaaacacaattataaattacatctccgttggtttcttaaccagtcataattaatgatcatataatgagaaattcttaatatgtgtgggtccaaactccaaagtataaatggtaaaaaattagttccatttatatactgtatatatgtatctatacaaacaatacaataccagaagaataatatgaattaatggctgaaaataaccaattttatgcattgatgagatatattgactcaccaactaggccatctatgctgcatttatatttcatttaagcaagagttccaaggatacgtcgttaataatttgataactatgtgctaccttccattaaatattaataaaaataactttttttttatgttgttgtaaatttatt

SEQ ID NO: 308029 - DNA, 1165 bp, Cannabis indica
gactccataatcaataacacaatcagccttgtttatcacttccaaacattgttaaggggctttgccttttgtctaatgtgaacacagattccgacactaaccataaccaataaataaaatactacttagaaataaggacttggcaattgattcattctatagaaattagaaactattactgcaacaaatttggaatattattgaatagttcatgaacaaatcctctaattattaataaataacgcaagagactcgtcattaataaacagtcacaatattaagcattatcacactaatctgggcaagatgaagaagctggttctgctataaataccagtgaatttggattcttaatccccattgcaaaaaaatatacagttagcctactagtcttagtatagttagtagagatatttagaatcaattagagaaaatgtgcaaaatataaataataggaagccaaaactgactccaaagacatagtataccaagaagctcgatgggaaaattttaagaactaaagatgttcaaattaacaagaccctgaacaattcgctcaacacgaacacatatatttgttacgaataaaagataaactcctaaaacaaaagataataaggtaataacccaaaaaagtaactaaaaataagcaaagtactgcatcacacactgaaaggagctcctaatcaaacagactgaaacccatgtcatcgtcactctcttcctttggttcttcctgtaaaaaatacaaacaaacaatacatgaacaaaattggtgttaccaaaatagacaattgatattataaatggcaaagattaattgaaaaacattagtttgattgaattcatgtgagggactgggttaccttcttctcctcagcagcgggagcggcggcggctgcagcgtcgccaccagctgacctgggaacagcatcaactgcaacaccaccacctccggcaccgccactcacaataaggtcatcaatgttgcgcttctcggcaagcttagcgaacaggccaaaccagtaagattcaaccttcaagttagcagcttccaccaaggaggcaatcttctcagcctgttgatagaaaatcgatgttgaaaaccataaatcctatctatcttctccaatcaaaaatagtaatctaaagtaataaaaataaa

SEQ ID NO: 308030 - DNA, 2561 bp, Cannabis indica
taaaaaaggaaagtctacctattagtaacctgctattacaggttaaaaaaaatgtaaccatatggttacaataaaaatgtaaccattgaatagtcacccaaaagatatatatattaagactttaatcctacttttagatttgactcctcaaatatgcagctaaagttttttttagataagaactctatttgatagaacattaaaaaaatatcaaaagaaaaaaatgagttcaagactcaatttttattcattagccaaactcgccccacatgatttaagtaaaacctttttattccaatttttaaataaaagtcaggataaaagggttttacaacccttttatcctacgtgattcagacgtacaaagaagaaactcaaaccagacctcacttactaccgccttctcctcttcgccaaaatctccattctccaccattttcagccgtagccaagagtccaagtcagtcagcaatggcagtcgcatattttgggtgagcttgaccaacttgaatctcgattcctatatatatatatatatattttgttatttgcttaattgattcttttttctatgctttacttggcactaattttttatttttttctttgattaatttattgatatctttcctattttatttttgatcctttgctaaaaaagaaaaataaaaaaagtgataattaataggttccatctctccaaccgtggaattacaaaatgttttacttttagttacaaccaaaagattgtggttaaaagttaaaaagttgtgactaattgtaaaatatcactactatgttgtgactacaaggtccgtatgtagctaaaggtattagtcacaaaaatcacaatttgttgtgactaaatatgtttttactcacaatacttattgtgactaaaactaaattagtaacaacatgtatctaaatattatgtttctgtcacaagtagcttttcgttgtgattaaaagtcatttagtcagaaaaaattatgctgtgactaaaaggttattactaaaagtaatatttttttgtagtggtcactctgtcactctctcatcgacaactaagtccaagtttgtgttttttttctctcttttttgttgtttatcttgatttgttttaaaccttgaatgaagataaatcttatttgcaatatggattggttcaatgtattacttggttttatgatttacctatatattttgggagttctgtaagattttgtcatagaaaaatttaaacagaaatatagtaaagatacttttttattgatttgttgttgtcttccttctttttttgggctcatttttacaaatttcatttacattactccattttatgcattattttactttgtaagacgaagaaaccagatcgaaaaggaagaagaacgttttcattttcacctagacaaaaatatcactacaagaaaagatagtagtaggggcaacgaaagtcacccctaaaaacctttataatcatccctaaaatgtattagggatgacaagttgcctctagcatgtcgctcctaatgtttcatcccttatgctcatttttagaggtgaccaaataaattgcccctaaaagtgatgattaggggaaactttttttcgcccctcaaagtgttaaaaaatcactcatattttatgcaaattaggaacaaaaaaattgtccataaaagtgtaatgtcacccttattcatatgcaagcatgataatatagcattagtcgaccctacattatttaacatcaataattaaatttaatatattttttccttggcattaaaatcgcaaatactccatttgtaaacagttttgaatttcaattacaaacaaaaagttgtatatcaaataaattactgttattcatttttaaactttctagtatggataccatatgtataaaatagtgtacatatatagtatggtaatctaacaaaaagagataataatgacctacattattcttctatctttgagtacaatggctggcttcgccaacaacttctgatctagaagcatagggatttagggggaaaaagtaacttcctattagcaactacattaaaaccagtaaatataagcacactcatcgggtcagataccatagtcaatgaaatttgaaaaaaaaaaagcatttatttagacaatagattgaagacacctataagctaaagtttcagcttaagatgataaaattatgcaactaagtgtcacaatttcaagtgaaacaaaaaatatctagatacaaagatgatggaagcttaccgtagctatgtaataataataagtacataataaaaactacctggttacttctgcgtcatcatcctccctatcctccctctcatcgtgctgacttttttgtttttgtagtggcatcgatgcataggccatgaatacgatgtcatttgctgcaaaaaaaaagatgaagatctaggcatgtctttgtgtcaaggataggcataaggcgacataggctaatgcgactgaggttgttgaggttgctgcagttgagggccatacatgtaaggatagtgatatggcggtggagg

SEQ ID NO: 308031 - DNA, 1453 bp, Cannabis indica
tttttggtgttgtggttggagtaggaaataatttttgacaccaaatttggtgatagtgtaacaccaaatttggtgtctctttggagatgctcttatgtacgaaagttcctatttatgattttattctaattctatcttaaacgttaacgagatttcgagatgctatgattgacgcttcacgttaattttcggtggtcggtgtaccagaagatccttattccttcaagtattgttggctacgccatatgccacgtcatcatatcgttttttaattaagaaaaacaaaaatataaaaacgtttgtaagaacttttttttaaataaaaaaaaaagacgatattaagcagcttcgatgaatgtgatgtatgcttcaacaaataacaacctcacttagcgaacgcggcatttaataaaataggcattgttaagtggtgaaattacgaaaatgccattggacttcattgtggtcaaaccgagtagaatcctgcgacccattggtttgtcttttctatatactggtaaccgtgtatattgtaagttataactacattttacttacaaagaacacgactttgattcaacttgtagtttataaatttctataaatcctttttgttcgaaagaatctatcatattattttgttctttaattttatatttcattgcgctttaaatattattttttattgaccataaaagttggaagtcaaaatttaattaagtcataaattattttaagtttcttttatagtctatctctgttccctagtccagctttattacatttttttcagaaaaacaagtcatcaattttattgaattatttaattataagctatggcgtgcatattaagagctaatatatcaaacaatttgaagctcttaattaatatgattgacggttcaattttaagttcttaataatgttcactttccctattttaaaagcaaaagtcattcaaaattcatctctaatcacatttttatcttcatttattgttggaggatatcactatttaccttcattgttgaaagcaacactatctgccttcattgttgaaaggaacactattcatatgaagaaaaatattaatgcctacataccctgtatatcttatgtcaagtacatttatatcattttaatatagaatattgtatattttaattatttattttatcaatatgattataattatattttataattttttatttacattatattaataatttaaataagcagaaatatgcatcatacaaaaaataggaaaattacttaaatactatttttttaacttttttttctaaatttacgtttgaatttctaaaatagttgtcagcattagttgcaataggggtttctacacgattttttatttacaatttaagttgcagcgctagttacaatagaagtttctatgtagaattccgtaaaaatacaaaaaaactaattt

SEQ ID NO: 308032 - DNA, 2282 bp, Cannabis indica
tgacaataagttttatttatcttaagctttgcaccattgatcaagagtaactaatgctaatgaagaaacttgttgaggagaagttctttttttattccaaaccagattgttgcatgctttccatattgcccaacatagcataatgattcgacactttgtttccatatcagaagcttggaacacattgcatagccacattcctactgtggtattagcagcagtatttaccgtggggtgcatatgattctagcaagattgagcgaaagagcagctgatgatggcatgagaaatcgattctggttggcttttacatatggggcaattcggagagatatctacatgcttggtaacaagctgtaaacaagtgggaaaggcattcgaaactaccctccacatgaagttattgacttttggagggatttttagctaccaaagtgtgcgctagaacccagaattattagcaccatcttgcttgtttgttgatttctgtagcaaataataagcacttttcatcgagaaagtgtcattgctttctcctatccatgaccagcaatcatcaccagcagtgacatatataggcagcccaaaaatcaaagatgcatctcacacattaaatatatcagaaacaatctcacggtcccatgaaaagctatcaattttgaagagggattttaccatcttattatgcagactcgggtgagttgttgtgacaaactgattggagttgtcaggtaaccaaggatgagagagaatgcttgtggtagtccctgatcctataatacgtctggcatcaagcttaacaatgtattttgcttgccatatactcctccagacaaagcttgggttgttaccaagtttagcagcaagaaaatcaaatcgaaaaaagtactttgttttgtaaacatggctaacaagagagtttggtgagacaagtagtcgccatccttgcttagcaagcattgcaagattaaaatcatgtacacgacgaaaaccaaggcctctaagatctttgtgaaccgccatcctgtcccaggacatccaaattatcccgttacctttactggatgttatcttccaccaaaagttagccattaatttttcaatctcagtacaaatcttaataggaatgagaaaaacactcatagcataagtggggagggattgaatgaccatcttgagaagtatctctttaccagcacgggacagaaaatgaccattccaattgttgattcggttcaccaccttaggttttaggaagccaagaatttttgtctttttcctacccatggtattaggaaggccaaggtacatgctgtattcatcagcttcagtcatctctagcgttgaacatatttgattctttagcatttgatcagcgttagggctaaaggaaatggttgacttagtaacattcaccttttggccagacgccatctcgaaagaataaagcaaagcgcaaacattcaaagccgcagcagtagaagcttgacaaaataagtagttatcatcaacaaacagcatttgtgatattgtaggagccccattagcaactcgacagccttgaagaagttgattagcttcagtttttttgatgattgaagaaaacccttcagcgcagataatgaagagatatgttgaaagatgatcaccttgacggatacctcgagttggagtgataggtcccataacatgattgttgtgaacaatagtatatctgaccgaagtaacacattccataacaagtttaacccatttctcatcaaatctcatagggagcatgacagcacgcaaataatcccattcaacacgatcgtaagctttgctcatgtcaagctttaaagccatgaatcctttttttttctcttcgtttctatttcaagtagtgcattaattttaaagccaccataatattgcctgaaatgagtcgaccaggtatgaaggcactctgtgtttctgaaataacagcatcaatcagagaactcatacagttggcaagaattttagcaccaatcttgtaggatacattgcagagatcgattggttgcaagtctcccatggtagaaaagtttttctttttgggaataagaaccagatttgtaaagaccgcttagtttaatttgaaaattagcagttaattatgatttaattatgaaaattatttatagatatttaaataattatttatgttgttatatttgaatttagaatgcatttttacgtcatatagtgaaatttcataattttacatttccggtgcccgggaacatggaactcggtgtttg

SEQ ID NO: 308033 - DNA, 984 bp, Cannabis indica
tctctctctctctctcatacaaatgatgagaatggtggtatttataggtcaaggatatcttatccaaaagacggtggctgcaacgactaagtagttaattcggttatgacttaaccgacttaactagctccttacagaaagatctccaagtcatctctagcaatgagctctctgaatatgaaacatgcttcctacttcccaaacagatgtcacaagcttacgaagaaaattttagagggacatccaagataggcccaaagccaattggaacaagctatccagaaaccccttcttggaagggaccactagccttctagaactcttttttggaggacgactagttttctgcacgacttgacttgagacattttcatttagaggaagtataccacaaattatacctagttcctttaaattaaaaagccacagtgatgaagaaagaatgcaaccatcatggttggtgttctatgtatcttagtatgctaatttctgagattcatcaagtccaggcagtgcctaaacttgttgactgtcaagaccttagtccaaacatcaacaagattatcttctgatctaacattgtctaatccaaccaatctttcttctatctttttttttatccaatagagccttatgtcgatatgcttgctcatttcatgataagtcgagtttttacaaagatagataaatgactagctatccaagtaaatagtaacttccccttttatttattttagttcatgcaaaattcctagaagccataatgcctcgttgaacgcttctgtggtagccataaactctatttctattgtggaaagggcaaccaaaatttgtaactgggcttttcagcaattacaattctagtttttcaaaacatgtaggttgtggttgatcttttagtatctctgttgtggttaatcttttggtatcatgaaataaatcatgtgtattaggtttttttccctaaatgaaatccatttcaat

SEQ ID NO: 308034 - DNA, 1704 bp, Cannabis indica
aaaaaaaaaaagaacaaaccacatcacatgtctggaatttaggattatccctaaaaataatgttatcatataatacacagagatgccaaataccattgtaagaagaagtgtagaacagagatgaagttattctgagcattttcaaatatttctaaatgaaaactaataaaaaaattggccatcataacaaacaataggtcgaaagaacatcaatacagcagctcctgattttgtttttacgaaataaggtcaggacatggtaatggaaaactgtggccggtgacacagtcacacaatgacacattagagtctcaaatgtgttaggtggtcactataatagagccgcacaaacaattattggccaccaccaataccattattagattatattgtgttcagtgtatggaaagaaaatcaaaccaaagaactttcaacccaaaagtgacgataaaatattgtcatgttaaccttactttttgagcgagttgcatgaaagcatctggggtaacttcatctcttcccttctgaaacaactcatctattgatttgcatagcatggcatttttattcacctgtccaaaacccaatgatagacaaaatttatagcaagacttataattctaacacgtgcaaattgaattttgaagaaagctctaccaatgcttgaaaataaaaccattagcaaaaacaaatgggcaccataagcttaccatatatatataaatatatatatatatatacacacacacacacatatgcattcctaatcctgaaccttgacaaaaataattacaataaagctacattttcaagttttctccgtcatcctattttctcagcaaataagataataatagaaacccaatatagaaaaccctcaagagatagagaaataggaacaaatttgtaccaatctcttgcgtttggcttttggagaagtgagtttccgtacagtcttaacaaaggcaatgacgaaagtgataccggcataggcgagaggaagagcaagaatccatgggagagaactagtcccaactctaggaccaggaattgcctgagtcaccgaacccgtgaactccactacatccaaggccttttcctgaatccaaggcaaatcttcctccacttcctcaaattcttcctcattgctcttattcttatcctcacttttctgggtcttagccgagacagagggattgttcttagaagctgcgcaaatggggctcctgggtgtgagacgcaaggaagaagaaagaggaattgatgagggagaaggaggagagacaaagaaggggggagggaatttgggttttggacgaggaagtaactgggaagcgaaggagcaggagcaatgagaagaggaagaagctaaagccattgcaggcaagacggggcgaagagaattgggttgggacgatagggatgggataggcgacaatggcgagtgtgtcgccggtcgaggcagcttccaaaacccactaatggacgcgcttcgtaggttacattacatatagtggtcctgcccgtagtcgattttgttttcgccaagtactccattagtttattcacgaaaaagagaagaattaacggttttggtttctaaagttgttgcaatagagttttctataagattttttattgaaatttagattgcagcactagttgcaataagaattttttttgtagaatttcgtaaaaatgcaa

SEQ ID NO: 308035 - DNA, 1740 bp, Cannabis indica
gcttgaacaagcaattcttgaaataaagagtgacttaaaaacgacactggaatgataaaccgcttcttttgtctctctccaacataaactgctaaatggcctttcgggacatctactgcatttgatgttgttttgctcgagttagacaaagaccgtcgaagaaatttctttgttggggctactccgggcaaatagaaacccatattggtataataatttttgaataagcaagaaaagattacaagagttgagaaagaaagaaattttctttgctattgagatgagtaagtagtacttgacttgttggttaagactactaaatatgcttatttatagttattagacttgtctctttttaagtgagaattttgcaagctaataatgaagtagttggaatacaacacatgggaatgtcttctaactactcaaataaaattcaatgaatataaaataacacattaccccaccacttataatagaactttgttaatttgtaattaacttagcttaattaatgtatttttagaaacatggcataccctacattagagagaatgattatacctacctaaacagatttatttgctacattaaatgaatgttgtagactgatgaagaaagaaaacaatttcaagtcatgatgagagtgtgaaatcaattaattaatatatgtgattgaaaaaaaaaattattgattgtcaaacaagtttttataacaaatgtgatctaagaaaagacaacccaaaatattggttttgcaaataataataatattcatatacaaacaaacatatgcatctgaaattaacttcacatggttatgtttgatcctcagctctgtactccaaaaaaaaaagtacttaaaggctttactgttgattaggcacatgtgtttgggtccccattcttttataactagaatattaaatattgtacattataggaccttctttgttcctagttcaacaactacttgaccatataggctaatatatatttgaagatcttctgacaagattcatcttattcataaaatatttcactaatattttgaagtaataaaaataagagaatagtgacaaaaagcaaaggaataaatgatttttgttacccatatattaattttattaatttgttaataaattgacattgtattcatggaaacaaaaacttgtcaccaagttaaggataataattaggaaaaaaaaaatgggaattaggtatttctcttatgcatgagattgttttttatttgaatcaagttaattgtgaaaagtatatatattaatgtgtatctatatatatttaagacaatgatgaacacagtgtagagatcacatggtgttgtctcttttgactagtggtgaagatggtttgtactgctgctcatctggtccccttttactcatttcatactagctaaactaattaatattatactaatccataaatttgtgtaaatttcctttcataaacagaacagaggtatcacaaaacaaacataattaagtagaaagtactgtttttcttttaaacaaaagtcatatggaagtaatggaaagtggagaatacacttgtgatctgtatggcacactacaaaaaattataattacctttagtaacaataagttttaatcataatataaatttgttaaatttgttgtgaccaaatgtgacttttagtcaaaataaaaatttatttgtgactaaattaatttaattttaatcacaataagtatt

SEQ ID NO: 308036 - DNA, 1635 bp, Cannabis indica
caatcattaatttgtaatcctcctgatctctctgaaatgattttgcatctgctgggaaacaataggaaacgcaaggcgcacacttggtatcaccctgttcctactgtgaccaactttgaacttcctccgtgtcctcttcagctgaatggagagcctaaggtggatgaaaacccccaattctgtattgggtctaacgaggaacctaaagatagcggtagcaagaagattcagggaagaggcaggaagagctattctaagcgacactcgggggtcaagactcgaagtgggaggaggaaaaaagaggctgagactgctggagatacagttaggaatttaagcgagatattgaataattgtgtggaggttactgtggaatttgtgccaaattttggcaatggcgaggaggcggccgtatccatgcccccaccgtccttatgaggtgcttagcctggaactgccgaggtcttcgtaggacttcggatgaaaggacccttcgagggataatccttgattgtgatgcggacttaatttttctcttagaaactaaggttggatcggaattaatgataaatataacaaggagattgggctttgctaatgttgtgtgcataccagctgacgggattgctggtggattctgtgtagcttggcgaaatggagtggagtgcaatgtctcgcaagtgttcgaatctggattccatttggtgcttaaggagggtttgggtaacggtaactggagtttattctgcatctatggcacgccataccattctaagaagagggatatttggcagggactcacggagaaggtggaagactgtaatcagccctgggcgttgctgggagatttgaatgttatccttgacccttccgagaagattggtggaaggccgtttgacgcgagggagggtcgttttcttgcctccttcctgtttaacacgggtggaatcgatcttggttgtggaggagatgtctgtacttggcagaactcgaggcgggcggaaaatagagttcgaaaaagattggacagagtgattgcaaatgctatctggtgcactctgtaccccagggcgtttgtgcaatcttaccctattcttggttcggaccatgcccccttatttcttaattcttggggggctcccccaaagttgaaattcccttttcgtttccttgaagtttggacttccaattcggactgtgaaaaggtgattaccaaggcttggcgttcttcggtcagtgatcagagtgagggcaatttacagaggaagtttactgtgacaaagaatgaccttaagagatggaatgctgaggttttcgggttttgtgacaagaagctgagaattttacgtacgcagttgagtcatatccaaaaagagaccattttgaaagaatctgtggagcgtgaagcggaagttcaattggagatacttgatcttgaagagaagatgggcagaatttggagacaaaagtcgcatgaaaactggctcagatttggggatagcaactcaaagtttttccatgcctcaaccattatcgtagcagacgaaatcacattgggggagtgcttgacgactcaggggagtggctgaaacagagaaaggaaatcagagattactttttggagcatttcagaga

SEQ ID NO: 308037 - DNA, 1037 bp, Cannabis indica
aaataataaaaaaaaaacatttaacttttcacataattagtttaatatataatatatccagctttcctaccaatctaaccttgagacccatttaatgtaccacggaatccattccgtgaaattatatcacaggacaaaatcgtgtccctacaaattataatatatatatacgaggtatttttttttattttacaaatcaaaatagtttttttctttttattatttttacagaattttacataaaaatctcatagcaactaacggaacaatttaaatcgtaactaaaaatatccacatagcaactcacattaaatccactaaaatcgtaattaaccatacgtgcatatgcacgtaattctcccctagtatacataaaaagtcccattttaagtattttacgtaaatttctaaaaaaatattcttctattatattccgtctattttctaagcacaagtcacatcaataaacggttacaaaaacagaagaaatagagaaaattaacacattttttttaattctcaccacacaaaaatattcaataacaaaattttacaaaatccataatttggaagaaatagaaaaaaaaaaccctagctacttgtcatattataaagttagcatatattctttttaaaatattgtcttatgtgttggtgtagtattgatatttgaaatttatgtatgttttttaggtacttatgtgtatatggccccagaagttataaagtgcgaagcatataatgaaaaatgtgatgtttatagctttggtatcattatgaatgaacttattacaacagaatatccttacatccaaatccattatggtcctgctcaggtacttctctgcaaaccaaatatacctataataaaacaacaattttaggtcaaatctaatgtgtccaaaagtttagggttattatataatttatatcgctcctctcaagccaatcggagtcttccaccaaaaatttaattgagtttatatttatatatatatatatatactaggtgattgttacgtgtcaagccacgtagt

SEQ ID NO: 308038 - DNA, 1952 bp, Cannabis indica
gtcaatggtcagaattgttggctctaaaactcatatatacctcttctctttatatatatatataaaacacatatatcaaaacccctctttctctttattatttaacaaaactatctcatttaatgaaattttaagtttgattttgaagtccgtaaaagaatttttagataaaaatcatgagcccagcaaattcaatcaacggtcaagatcgagatcatataatcaacggtccacgtccatcgccattgaagatcaacagagaatctcattcgattcagaaacgtcaacctgtgataatctacactcattctccaaagattatccatactcaaccttgcgatttcatggctcttgttcagaaactcaccggaaaatccagatccgatgacgacgacaatgacgaccaaaatgacgacgatgacgatgatcaatcttttggatctaaacgacattatgattctgctaattcttcttcttcaaacgacgttaaattagaggattcttcttctacttcggttattacgacggaggagaattatattggaaaatcagtaggcgaagcttcggtggtggcggcggcggcgatttcgagtagtggtaatattaattctggtccttattttggtgatgttcctttgtttactccgaccggcggcggcgatttcttctgctcacctcggcagcctggttatcgattttccgatacgacgtcgtctttgtcgtttccgtctccgaatttgggagcttcgcttaattcgccgtcgtttcttgagttcataaaaggattacctgaatattaatgattatgattattattattattattattattatcggtaattaagcttaatataattttataattaatgtttggttaattgtaattttaggttctcttaattaattaattttatttttatttaattgattattattattatttgctcattttctgaacgtatgaaaatttgaaatatttgtgttttaagttttatttcttttgttttgactttcttgtcgtttttttaaaagtggagtcaaattcaatgatatgaaaatttctataaaagaagataagaacacacattggtctcgtaataccgtggactttttttgttctttttttagaaaaagatatgaacatgaaaattcaagcaacattaattgtctaagctaaaaaattatatattttgaaattctcttacccaaaaaacacgcaagtatagtttggtaaaatatattttgccgttagacgatgaactatcttaattatgactaaagattaatttagtgtagacggtaacattttgtaccgaaatataagactcttataactaatcaccgagagactattaaaacaattaaaagaaatggaaagagatctacatcaaactattcaataagcattattgaacgatgaaattgagatattattagacacagaagataacaataattttataaaatatatttaggaggattccatttagtatcttaaagtgttcaacaaaaatatcaatataataattggttattagcaatgaaaaatacatatgtatatgatgtatatatttttaattatggttgggcgacgtaccactactatacatgcacgtactttttttattatggtggagctgatttgttcattattaattaaggtgccgtttggtaaaacttttgtttttaaattttttaatcacaaaatgaaagtaaaatttttgtttttaaaaaatttatttttaaaaaacaaaaatgcgttcttaaccacttttgtttttcaattttaaaaacagaaaacaaaagtgtgtttcacttttatttttattttttgtattttatttaagtcggatctaagtctggggtcggattcggattcaagtcaaaaatcgggttcagcgccaaggccgtggggaggagatttgggtacgggtctggtcgtaatccaaaag

SEQ ID NO: 308039 - DNA, 1296 bp, Cannabis indica
ttttcttttttcttttttggttattgctaattatggatcatattactaacttatattgctaattaacacaataaatcattcaatttgatccaacaaattgatgaacatactttgttgatgagaaaattctaagacgtaattaatttgaaggttctttaacttatatgttgaaatataatatgtgcttaaaagtataattaagttaggatattggatggactaagatagaagggaaactgcaacacaaaactattctcctctttcgaaaagaaagctaaattgcatgttaatttcctaaaatcaactaaagttgtatttttcatttcataatctctagataatttatatatttataggttctatatactaacaaattactaataaatatgtcaactttaaactaaaataggttaggacagtgttcatggacaaaacccatgcaaactaagtgagacaatcatcccacgtcaaatttgactcgattcagaattatttagggcttagttctaaataattttttttttgctcttatataaatattaatctggtcaaatattattagattgtattatttagtgtagtggtaaattcatatgtaaattttaaagaaatcacgagttcaagactcaacatcttcattttatcttttgtattattgtcgggttttgaacttagcaataaatttaaaatgtcattactctaaaaaatattttaacataattatttattactttattatagtgaattttgtaatttttattagatgttgatatccacataatataagaataagtattgctataaaatactataatttttagtatcaccatgcatgagtgacgctctataaatagtcattaatattttataattattattaaaagtaaaacaagtgaaatttgtattgaattgtaccaataacttatgatactaaattgctaggcaccataaatattcttatcatttcacaataaaaatacataattgctcaacttaaattttatttctggcttcgcctattatcgtactctgcactcaaaatttttataccatatgtagtaagaaaaagtaagagttttataaaattttatgaaatagacccaataatactccactcaactttaaatacaacacacacattcacacaaaatattcttggacccattaatggtgaggaccggcccagctaataagtactccttagtgtaacattagggaaatttacaaaaatactggaatttgagttaacttttacaaaaatactatcacacggaaattttttcaaaaatactgtat

SEQ ID NO: 308040 - DNA, 2277 bp, Cannabis indica
gggcataaaacccaacagtacattcacttctctctttcgagaccattacttgagaggcccgagccttgtgaagcaggtggcgatgggcatcgtactcgtctagatggtcggatagtttcatcgatagggtcagtcacagatgacatcatccttctgtgagcatttatttggttttctcttctaatggtcacaaaaactcaattatctctcatggtttggtcttccaagccttagctatttccacctagatgatgcctagaggctgaaggtgggggctctcctttggcagtgaccaattggtttctatctacggggatcttgatgtctcgtagatattaggaaggtcttggcatcttcgaatattattgaaaaagtaagaaatcaacatagctttaaactttgtcgttcctaatatgacgctaaattgttgacggtaagaactcgtcaataatgttaatagtcagaaactcaatgaagtatatcaaagagtaagaaggtagatgagatctaagagaaacttaagaaaaatttggaaaataacaatggtgaaaagtgagtatcttgtattatcagcttaagggctatggctacaggaattcccaacctctttgaatgaggggtgagcctctatttataggtaaaaaatcaggttacgtgtggtccctggagagacaaatcagcacatagtatgttggtctgatggcagtaattagagtagtagttgtagggtgttgttggtcgggtgtaccaagtgtttcagggtgatagcaacacaactactcgctcagtccttgtcttcacgtgtagtctgaaattgtggtccttctctttcttgtggtccatgttttttggtctaggttttgtgatctttatacacacactcttatctaagctcgatgtcttgtctcacctattcctttgacatggactaagtgctcgggtctataacaaattgcatctatattagttgaatcatttgagcattgttgaaacaaaggaaggtaatgaagggtcttcaggtgatcaaacacttgagtctttgcaggtcaccctcaaagagggtcttcacgtgtactccaacgggggtcttcgcaggtaacccaaaggtgatcttcataggtcccccaaagggggtcttcggaggtctctcaaagggagtcttcgcaaggggttgatgcatccttagtggacttaatgttttgaccataactttcttaatatgactcaaaattggatgattcgagatgtgttagaaagataagagagagatataaggcttttgcttttatgactggatctaattctaaacgtatcattgtctaaatccactaacaagttcttcctggtaagttagtcttactaactttactcgtgcccaccgacctccatttaaaatacctcaaataatcacaaacacatgataatccttttaataccctcataagagtgatgtctcctaattttaaattactctccatttagaataacttcgatatttcatcttacaaaatttcagggttaacaaagctaattatttgcattaaatatgcatatatgagatactaaaataattatatcaaattctaagttagttaataaagttatatatatacatttaaaaattaatttattttttttagcttttgagatttgcggtgtagtgagaaattataaaaattgtatatacagtttaatttgaaaaaataactaaattcaccactcgcaacacaaatacccagtaacccagctcaattatataccatattcatagggaaatttcattaattgaccctaataaaataccccatttcaaaatatataccctccactaatttatacaaattaattccactattactcatttgtacccaaaatacccctcaaatttaattttcctattctctctctctttccgtctttccctctttcactctctctttctctctctgtcgtttgctattccctctctttccctctctctttctctctctgtcgtttacaactttcgaacgctgccccacgacgacgacccaacgacccaacaacgcagtccacgaccacgaccccactccggccacccacccacgaccctgacccaaccctctctctatctactgttctcgttctctctttctctctttctctgtctattgctctcgacattggaacccaacccacccacacccacggccgacattggaacccaacaaattttcagaggtcgtagccaccaaaaccagaacagaggtcgtagcccccaaaaccacgaacagtcaa

SEQ ID NO: 308041 - DNA, 2207 bp, Cannabis indica
tgatttaattgatttttccatgactgcatgaagcttttcttccctttgaatgtttcttgatttccatgttagattgtaatcctttcggtattttaatcatatggtagtcttatgatatgtaatgtgtgatttctagacaaaaaagatatgattctgacttttgttgtgattcttggctccttgagtcacaaagaacacgaagaacgtgtttgagttattgaaaaaaaacacatgtttggatcctgtacacatcctggtcgactaaggaggtcttgttcaagacttggctggccatgggtgtgccatgggtgttcaccatggggtttgttcggccataggggcatactttaaaagctggtcgacctatgcctggaaatggaattcctggctggccctaggctgggtcatgggacctagccagcccttctaaggcttgggaaccctggctggtcaaggccaaggttccaagagggtggcaagtcttttgtcctcttttgacctcggctaaggtctcgtgacagccttggaggcatgtacaactgtagtcttatgcatggttccccttgggaacgctgtataggacttggtagtgagtccattatagtcaattgaacaacttagtactccctatttgtctaagtagatgtacttaagacggtacttcgctgatacccagccttgtacaatgtgatttacctggtaagtacccttgggtacaatggactagaactttttctgtagctttgttaggttgctcatctcgccttgtctcttccatgcaagtgattccgagtgttgatatggggaggtgacaactgttgtgtcataggtcccgccatctttgcttttgagagagagcatttagtctgcccccttactccttttatgtgattctggactaacagtcatgctagaaaaactaatcgtatcatagggcacctccatatgactctcatgttgccagggtggcaacgatgggcaaagttagagttgtagacgaggccacgtagccacgtgtttatggagatctagaggtcaaccagacagaggtgcctgaggttgaccaaggggctgaaagtcctgacattgagtttgaggttgaggaggataggccagttagaaggaggagatacaagacctgtattgtcctctccaacctccctttgggtggatatgatgcggatgggctacccctgaatagactaggccaacctttggtgttaggtatggatcatgtcttgatttagtcgttagagcctcaggttttggatgctagatcacaaggagataggtgggtctctcttgcatctattatttccaccgagacttttggaaggataattgttaaagaactagtgcggggtgtctagagtgaggtacccacaagggattagaggacacatcgacttgctctcagttggatggcatggtcagagcaccatattgagcagggggcggtgttgccattacaccaatactttcgagaaattgttgcttactttgagatttgttcaacacaaatcaccccaaaaagtataaaatacctctcgaggatgtttgttttatatgcagagctaggctggcctcaacctactccatatgagatttaataatactttgatttgaagtctgctccaaagtaaaaccggactgggtacttgtactttagtcaggtcggccatcagtggttgggtgacaccaacaacacagctatgttaaaagttggtggttacgcccagaactacttcatcgcctaggatgtccaagggattcagcatagccactttcaacaagggccgacatgcaagcgctccatccttactttgtagatgagggattgggaaatcacatccggtccctcccagtggacatgaggaacataataggttggccaatgtagccaacttctagaagtacaacttgtatcctccagcttttggagttgtagaggcggagggcccattagttgttgtggatggagccccagctgctgaggaagtctgtcctgattaaggacaagttcccgcaatagatgacgatgtgcctctgtcccgaatagcccgaggtctagagaggagacagagggccctatgctagcgcttggcttgtgggggcatagtcggggatgctactcttcaaattaggcctggagtgtaaagcccgcttagttaatttggaaattaccagttaattatgattatttatga

SEQ ID NO: 308042 - DNA, 1239 bp, Cannabis indica
aagccctcttcaactgtgtagtcccatacctacacagtctcagaatcatcacacttgaccttcctcaggcgatgtgggattgcacagcttacctgatatttctccttacgaatcacgggactactgactgtcacattcactgttctggttttctctatacatgatgacatctggaaaagatgaacaaagtagtacgtgtatgggagagtgtgccccggtaattgctccaagagtttctcgtcggaccctacattcaggaataatttgctcctggataaaagatcgagaatgcaaaaaaggaatagagagaaaagatgttgttgttcgacaccaaaagaatcatggataaaatatatgggttacgacgaattctgcaaggaacatcactagaacccttataactgacaatcattcaaaagcaaaaaacttaaaaaattcctagttttttgggtttttgcacatggaaaggttgtcaaatcaacaatatccctatgttctataattttccaatcaaacaaagataataaaccaccctacatggcagtgcatgagattttgatcaactaagaacccaaaaaagccccagaatcatggcatgttacctaaaacccactaccccagagtctagctaagtaggaaacaacaataaagtcatgcgaatggaacacttacttgtacttttagagactgggggtctggatttctggaatgccgacgcctagaaatctctcaacctccttataagttcgtcggggtctatttgaatgtctagtgatggagtcactgaagtaattggaaatgggtcgaagtcaggatacaagcattcatgaatctttagcagtccactgaagaactcagagcctaattcaaaaatccactaggaaaatattttttggtttgggaaaaactctctctgaaaaacttgaaaattagaagaaatggctatagtgctaaacaatctatatgtaaagtatttataaggaaaatggtgatctatgtgccttatttgagggctcaaattaaaactaagaaaacccaaatcttattccgacagtccgagaataccaaatgctgtataatgtaattttggagaatcgaggagacatgtatttatggtgatcttcgcctcgagtaacacactgacatgaccaatcgtcagtacacaaccagagaaacacgtgcaccaacataacgaataaggcacacacgccaataattgttttgttggaattattttac

SEQ ID NO: 308043 - DNA, 1141 bp, Cannabis indica
taccattcttgtgcggaatcacgttaaggaataaaaatcataacaataaaaaatcaagcttgagcaaagaacaaaaaaccaaccttccattcttgtgaggaatcacagcagcatgctggcgtgaaactgattgatgatcaagcacaaaatcacaggcaggggattgcctcccaaaaatatgcctccgcctatcaagatttatgcgatcaagaacttcgccatccttcataacctcaagaaaatagacaccagcccgtggttcaatagcccaatcaggtggctgccaggttgactggcctcctccaacttgggtcacaggctggctctgtcctaccaatggtgctgcctcctgccctgatgatggtttttgagaaacatgggattgcttttggtgttgagcagtctgatgttgcaaattcaaaaccggttttgtttgaggcctggaattggatttcgaactagcactgacagatacagcaaagggttccaaggactgagctttcttgaacctatcaagtcccgttcttccgtacatcctttaaacgatacggtctaatgctaagctaatgccattgagtaacgtctccaagttccgcccgtaaaaccttcttcctataaaaaccaaccgtagttcaataaatttatataaaaataaaaaagaaacacgacttggactggtgggcaaaattgagagaaagaaaattactcgagagtaaaacctaacagggattataagctttaaaagaaataataaaaaattaactaagagcatcgtcgtcccagagtgtccatcgattatcaaattaatccaaacaagtctttgcttcaattgttaagaacaagaagaatgaacgttaatcagttaaatttgacgatcagcggaagccaaaagagggggtttaggagtttggaatttgaaatcgcataaggttagagaaaatgaaaagggttatgcttaccagaaaagaaggtcggcgacggagaaagccacaaactcctcacttgtcgcctatcgactttgccttcatgtcctctattctattgatattcctatttgttcacctctctcttcagttctccgccatttcaacacattagggttacttcaaccttggaaaaaaaaaaaaaaaaaacgagtact

SEQ ID NO: 308044 - DNA, 1476 bp, Cannabis indica
tttttaatcacaaatatttttattgtgactaaaagtaaatttttttatagtgctttaaacaaattaacaatcatatatactataggcaaaaataattgtttgagcagagatgcttccctttgttttattagtgctctgttatcttaattaatagaaattaataatacttctttcaaaaaataaagtaaaaggaaaaacaatcttcactatgcgccaattggctctaggtccgaatttaatatttttttaatgatagataaaataacaaacaaattatgccccttaaaaactaaataaataaaatatgattacgtgtaaagtttttaattagtcgtcatcacctgtaccatatattaattaattattagttctatatagctagctaataattaatgtggtcaataaatatataagcatatatattaattaattaattttggttatttggtggttacgtaggcatggagcaatggaaggatatacgctgctcctcatcgagtagtgatgagtggaagaaaggcaagatactcaactggcctatttacgtaccacgaaggagttatacacattcctaacgagttagtcgatcaccaacatcctttgcaattcaaaccttttaatcattatggcctacttaattacttcagctcctctataactgctcactcttcttccaaggcctactgtggtctttgatcatcatgaaacaatattatatgttatgtaatattgtaataatttgttgtgtggaaataattactcaaataacagcttcttaattgccttattctaaataatacaattaaaatgtatataaaaactttttttcttttgaattatgacaatatatatactactacacctgccaaaaaccaaaaattgattgcacgtacggtgtgcactatacactcctttattttggaggttcaaatcgatcatataataataataataatctatgttattaagaaaaatcgaatacagtgattaattaatcatgtaatcaacctgttatttttttggaaggtaaatggaaaatttcaatttaataagttaattgaacataattcattcatgcatatattatttattgactagaattaacaataacaaattaattaaaccgttttgcaataaatatataggaaaaaccaaaacaccatcttcaactaaaagactcataaaccaccagatgcgaaatatcagaacaatttaaaaaataatagatttctatcctaagtgagcatataataaatcacacctagctatcaataaaaatcagttaaaaaaattctattaaatttggacaaacacaccccaattagaaagaaaaagaaagtaaggccatttcatttcgacaaaagacccacgcccaaattccatagctttgagtccgcaatcccgatcatgattttcctacccccaaagggaagggtccttccctttttggccagttgtgggcgaggagggattcga

SEQ ID NO: 308045 - DNA, 1396 bp, Cannabis indica
tagtattatataaaaatatgatatataatcaaactcaatataatacaatacaatacaatacgacctaatacaacgttccaaacgaactcctaaggtgataagttgaaccaaagtatattccaagaagtaagctttaatttaaatatatgattcttcttctcatacccgataaccttctcttgattacatctatatcactctaatataaaagaagaaataattttctttcttttatatctgagctgattacgagtactttagtagtggtatatcagccaatcaacgtctttcaagatgtaaatattaatctcgaattctttattgaacgagccaaacgttagctttgtaaattacaaaatttgatacacgtgtcatataactaaacctatttatttattgcttaaatatgagtataataatatattatatcattgtgtataaaaaatatgtataatttaagtatgtctcaattattatttatataataataaaacattgctaaatgcaccataatacccaacacactcaactcaaacataagatatattactattttcaaataattcaaattattttaaatataaataaatgagactcaatatttatttaaactacaataataatatagagtgttggatgacactttaggggtattttagcatttttcataataataatgtacattgagaaatattaatagcatctggagtgactaacacaattgttaagaccacatcgctgttagtataattaaatattaggttatacatatatttatttaataatatgtttataaaaaactactgattatttatatggtgccaccttaacaatggtgctctacaccaatactatttaaagtaagagtaccacacataaacttggcacaaacttaaagcacaataatgtgacaagtcactttaacaagtattgcgttcggaaaactaatttgtaattaaaattaattataattcgaagtaattataagatttgaggtgtttgttcaactaaataattatacagtaactatataattgaaatgtctcaattacactctcctataagaattagatgtaattatagattattaccagctttaaataattaatactaataaattatttaattactaacttatttgtcaaacataaaaataagaattcatatgcaaaattactacttaatatctaaacacactttatattttaaactagagtataattattagttactctaatgtgtaattactatacccaagtaattacacatatatatacttccaaaaccaccctaaatataatgaacattgttatgggacaataaaatacctaaatcactatgagctaggtagggatgcacacgggtcagggaattagcggggagtgctctctccgtc

SEQ ID NO: 308046 - DNA, 1830 bp, Cannabis indica
ggactactacctttaaattttgtcttctgaacttaaattgctgatttttggtggaacctggaatgtttcaaccataataacatttttcttaagagcaaaggtttatggttattgatgcatgtaaaaaaccaggagctttgagaatttataaaccgggaagagtgaatcaattgaaagaaagcaatgtggatcatgcgctcattcattagtaaatgagcattacttaagcttatttatatgaaagttcttacaagaataaaaagttgctctaactgtcttagcatataacacctaattactaacagtttggttagttacaaaatcagttagaacatcggttactctagctgaactttcatattgtgctagagtagcctcttttgtcctctatattgtgtatcatagtttaaaatatttctaaaactgaaaatctggcattgaaggggttgggatttacattggctcttctgtggcatagcagcaaagttcatctttttcagtgcttctcatcccaacccactgtaccctacaatctttaggtggtaggtaggagtagcaataaaagcttgattagaacacaaactttaacattattagactttggacattaaaacattcgttagtcttttttccgaatacaagtcttttcattccatcaactactttattatatgctatggaaaatcgcttcttacttgggcagcaatactgtgcagtgggtggtgtatttcttgctgagaggctcaatagtttccttggaaagaactggaagagcttcgctggccaaaactattttgatccaaatggtgttttcctctctgtgctttggtccgggcctcttctcattattgcaatcataattttggtgggtgtttgttactgttagcaattgctttaattataatctttcactgctgctttcttttcctggctgttggacaaagaaactaaaagaagaaaaaataactgttcttttgcagatcaatacactcttttccttgtgtcatctcattgttcggtggaagagagcagaactcagacatcgagcaacacttgcccgtaataagcaagaataagcttcatctcagttgaaccatttttcctttggattttatatatagtgagctttttaaatctagggtgatgttcaatattacattgctgatgcagagcaggatacaaaattttgaatcttgtagatgataaagccaaagttgatggatgtttctctgatgacattctaattatttgagcacaaaatcatttttgtataattattgaccttgattattcaattccttacttgtaccacaatggttgatcaactaaaatataccataagaactattcgaatccctatctaaatcataggcatttatctttattcgtcttatcttatcacccataagatctcgtcatagatggccataaattgctgctttctaaagataatgacaggtcaaaggctttgaaggcctgtaggtatattttggtgctatgctgaagtataaatttgagctaaagcaagcaataataggtacatccatgtatgtagagctcgaataaaagaacaaaaatacaagaacaagataggcaagactccataggattcaaaggacacaaaatcaaaactacaagacatattgccattctcttctctacaaaaggtctgagaatggaactttgttgaactctttaaaaatgaaaagcaaaagggtataatatgtttatatatgttagatattagatgtatattagctgtaaaagaattagatatttagtagatatttagtaaatatttagtctcctagctttgtatataaatatgta

SEQ ID NO: 308047 - DNA, 857 bp, Cannabis indica
taaattagtaattatttattactaaaaaaatggtgcacgccacattgatatttgatacagtaataaattagtatgtaataggcttagctgtcaaatactgaagaatactaaattggcttctttttgaaataatattaattagtaatgaattaggggtgcacacggcttgagactttgtgtgagggactcggtattaccaatagtccagtaagtttctttttgaaataatattaattattaaattagtaattaagtataataattataacccgaccaggaaaaaataaataatcaaacccgaaacccgtttggcatcttttcgggttgaacccgacccgaccaaacgggtttttaggtgattggtttttttggcggtgggtcggggcgggtagtcgggttttccaggtttacgggtctaaatgtgcacccctacctgatgcctcttcataacccgatgcccaatgatttattaaggttaactaactcacctgatgcctcttcatacaactctcttgattttcttcaagaaagaaaaaactattatcagcaaacaatagataagaaatcattgggctacgcctcccacaaacaagatccgtaatagttttttggccaatctcatgcttgataatagatgaaagatcatcatcacatataaggaaatggaatggggaaagagattctccttgtctaagtccacaggtaggaataatattctcaataatgtacccattaacattcagagcatatgaaaccgttgtaatgcatctcattaccaaaaatagatcaaatgtataattcattcttatttataaagaaaacgtaatctaaaacaaaattatatatttctttataca

SEQ ID NO: 308048 - DNA, 1527 bp, Cannabis indica
ttcaaaataaaacttattttgatagaggggaaatacaacgagatgtagttttttcagtttacaataagatttttgacccttccatctaagtgtaataaacctgtacagtgttgagccaagcactacaccaacttaaaatctacaagcacttaaaaccatagatcacacaaactggcaatgtgaaaaacggtggtctatgatctcattatctgccttacacaagacaccatagcaagaagtgacctcaatactcttgactttaagtgagctcttccaatggtccttgtccagtctagactttgacggggtttttccaaactaaggtgtttcaaatgcagttttgcacgggcgtatttcagactggtccttcttagccaaacttttctatcttctaggataatgcagaaacaaccatccctcaatcaactcagcagctctacaagactgaggacatttctataattcttctgttaattggtgcattttatgcaaatagaacatgagatgtttgggcgaaattcgaggtggatggtataggaaggaaatgggatgtttgggaagaaaacagtgtggaatgtgggtagtgggtacacttgctattatctgggccattgccatatgattagagagataaaatatagactcttcaatgatatgaaatctgaagtgggtgctctttgtgatagggtaagtgtactgtattagggataaagtatcaggtgtctgtatgggtttcaacactagggatgtcaattttttccctttccccatactcaatgagtggtcattatgtggttgtctttttataataagctattatatatatatatatatatgaaactaatgttgaagaagaaaaatggggacagagttgctaatttgtaatggtataaatttgcaggtgattgatatgcttcttttcaaggcaacagaagagttgaataacatcttggagcatgcaaagcagcggcaccatctcatcggacagtacgtggttggtcagcatgggctagctcaggatttgaacttcaaggatcaggcaacttctcctttcctcacaaatttttacaagagcaactacttttgaacaacttcctttctttactgttgttctcccatgggaatttttttccttggggagtgaagttcctaaataaagatgtgtttgaaattgcttttatataattctggtgaacacagaccattcaatcttcttcttcttctttttgtttggtggtctctaagtgaaaagcatatccttacatttgatgaaaccgttttgttttcctccaatacaaccaattttctgtctcttctagtgctgatgaagacatggtaatttactaaattattatatgcacttgcatatgatgctctgctgattcttttgtttgtatatatatatgcctaattgtgggattcaatagggaaatttgattatttatgtatactaattgggaaaattaattctctaaacttaaacatttcaaaattttaaaaataagtctactttacattaaacccaaa

SEQ ID NO: 308049 - DNA, 648 bp, Cannabis indica
taaaataaaaaaatatataaattactatgtaaatttaaattacaatttaaattactgcttcaattattatgtgaatttttataataataaaaaaaaaattaaaaaataaaaataaataactccattaattttgtttaaaaaccatccttattctcatgccctcaccacaacattctatttttacttcgctaccgcaaacgaggtttctagaaacaaaattaggaaaaagaatagaaaaggcaaaagaagctacatgtcacgcgtcaaaacattttccatccgtgagattatttattttatttttttacacaacaacagaaatgagatagcgtcgaagataactcgcgttttttttcttttaagaagaaaaattaaatcgcctttgtgagaaaaagaacaaccgacttcgtctttgtttgttttgctcctttattgagttgaacgacttgaaagccaagcctctcaaccaccaaacagtttagttctctcagaaagtgattggttcatggtaaattgtaataatatatcttgtaaataattacatggttggcggcttacctggttaactgctctggtttcacttttctagcacttccgggaacattcattttaccatgatggtactcttgcctctctctctctctctct

SEQ ID NO: 308050 - DNA, 924 bp, Cannabis indica
aaaataaaaaattatatagatatcttcaggtgagattggttgtgaatttggtaaacaagttccagatgctgaagatattgagattaatgagcctcctgttgttaatgatgtggtatggttgtttttttttagttgctcaatatttacttatataatgattgactttctattttatacgtatatgtatctatataaatgggttcaacatatgttggagtagattctaatattcaagttgtagaagatgatcttgttgtgattaaggaaactcctattgttgaaaaaagaaaaactaagaaatcagtagctttgacatctccttttatggagtttgactcttcactttcaagttctaaaaatggatctggttgtggagttgttaagtatgtagctggtttgtgtcctcttgatgataagattggagaagatgttgactataaatacgagaataattttgacttatggctacgtgaagatcgttgaacaaagaaagaacagtatgttattttgtttaatctttttttgtttcttgtttgtttatttttataatatttttttttattttgtaatatttttatttgtttttttttcttttagcaatgacaaggacaggatttacttgaaggacaaggataagataagtttaccttttcgttttggtgtggaagatgttgcatcaaatatgtggtttcataaacttacatatcttggccagtatttaactgattctgtaagttgtattttaaataaatttttatccatttagttgtttttctatgtttttggcattattttttggtttatgccaaaaacattaatgtttttgtttatattttttattcttttatgctattaattttagggtaaataccattttggagcctgtgttttataaaagttaccaattggaccctctgttttgtt

SEQ ID NO: 308051 - DNA, 3139 bp, Cannabis indica
gttggaaaagaggcaagccttgtttccacattgcctaggccggcccctttactattaattaggtctattaaaaaaaattaaaataaatatataaggaaaaataggaagaagaagaagagaaagagaaagagtttggtctctttcaaattaacaatatattctctcttctctctgtaatactctctttactcttcttcttcattcgaatatatatctgagaataaagatcgaaactttgggaagaaaaactatggatcatcaagttattatgcagaggccgaagaccaagatcgtctgtactctaggacctgcatcgaggtcggttcccatggttgaaaagcttttaagggctggtatgaatgttgctcgattcaacttctctcatggatctcacgaataccatcaagaaactcttgataatctccaacaagccatggaaaacactgggatcctctgcgccgtcatgctcgatacaaaggtacaaccttttctggtttttgacatctgggtattttcgattttgatttttgggtatctgggtgttgatttttcgatccgtatttttgggaatctgatgggaaatttcagtttgtttgtttgttttgtttagtgtttttgtctttttgtttgttttgtcgtttttatttgcttttttgttttgtaaatggattgtctttgattggttggctatactgttttcaactgataacacttaaattttaaagccttttaagatcagttgatgatgaatttttttggttcctttgattgattttgagtgttggttaatttaaagtttagtggaaaaagaaatgtagtgatcaactgtggaagttgttgtggtccttagatgcaaaatttgtttggtagccctgatttttaagtgggaaaagatatgatttttcaatgattttgtacttatgattatacttacatcaatggttattatgcttgtactttaagaatctcagttgcatctgcaatgtttggttggctattgttttcaactgattaatagatgatgaactttcaggttcctttgattgattttgtactaaaaacttactgtttaattgattacttatgagttgtggttaatctaaaaattaggggaaaaagaaatgtagtcattttgaagttataaagatttgatttttcaatgattttgtacttgtgattatacttacatcaatggggttattatgtttggtttttttagggtcctgagattagaactgggtttttgaaagatgggaagcctattcaacttaagaagggcaatgagatcacaatatcaactgattatactctcaagggtgatgagagtactatttgtatgagttacaagaaattggctgtggatgtcaagccagggatggttatactatgtgcagatggtacaatttcgtttacggttttgtcatgtgatgtgaagaacggtttgttgaggtgtcggtgtgagaattctgctgttcttggtgagaggaagaatgttaatcttcctggtgttatagttgatcttccaaccttgactgagaaggacaaagaggatattttgcagtggggtgttcctaacaagatcgatatgatcgccctttcttttgttcgtaaaggttctgaccttgttgaggttcgcaagttgctcgggaagcattctaagaatatcatgctcatgtccaaggtactggtttttgctctctgctcttcgatgagttgaatgaaattaagctttctttctatttattgtgtcttaattgggtttttgtgtttggaatttgatattgtgtaggttgagaatcaagaaggtgtggctaactttgatgacatccttgccaattcggatgcatttatggttgcgagaggtgatctcggtatggagattccaattgagaagatttttctggctcagaaagtgatgatttacaagtgcaacattcaagggaaacctgttgttacggccactcagatgttggagtcgatgattaagtcgcctaggccaactagggctgaagcaaccgatgttgccaatgctgttcttgatggaactgattgtgttatgcttagtggtgaaacagctgctggagcttatcccgagcttgcagttcgcaccatggctaagatctgtgttgaggcagagaacaccattgattacggtgatgtcttcaagagagttatggaacactctccggtgccaatgagtccattggaaagtttggctgccactgctgttaaaacagctaactcatcgaaagcaactctcattctagtcctcaccagaggaggaagcacagccaaactggtggccaagtacagaccgggaatgccaatattgtctgttgttgtccccgagatcaagacagactctttcgattggtcatgcagcgatgaagccccagcaaggcacagcctcatctttcgcggtttggttcctgttttgagtgcagggtcttcaagggcatcttcagctgagacaaccgaagaagcactcgagtttgccattcaacatgccaagtctaagggactctgcaagatcggagactcggtggtagctctacatcgcgatggaactgcttcggtgatcaagatcttgactgtgaagtgagtgattcatcatcagatcacttgaatttttggatgttcacattctcaatttgtttcttttttgttaaaaagaaaaaaggtcttgttttattgctgttggtgaaaagggggttttttttggaggtggtaattaaggcctcggatattttgatttatttttttgttatgaatttctatttcaagatagaaaaaaacattattattagtcacaacccaccatttattatatatatatgctccggtgagactggtgagctgaattaatcttaaattattatttgtcatttttctacttgaaattatctcttctgtgagttacattacaggcaacagtttgtgtttgtgggttgtattcgtgtcgtattaagcttagttagttattaaaggtaaataccaaatttgatccatttcgtattaaaaactaaaactcaaacttaacccgttgaaacaaggacagatcatatttaattttagttaatttatcaactcattaacatgtttaccgtcttttataacacatttatgagcaatttaacat

SEQ ID NO: 308052 - DNA, 2249 bp, Cannabis indica
ttgcacagcttacccggtatttccccttacggatcacgggactactgactgtcacatatgatggcttggatttctgtcgagatggtctggcagattgagatactgcaacatgatctggggcaggttgatcaaaatgggcagacagctgagaaatagaagaaacaagaaaaaaattttgatattcaggtgagataacatcataattgacaaagggaaaaatagtttcatgaaaaacaatatcccttaacaaaaaactcgattagtgttaagatccaaaagtttgtaggccttcatagcagtaggatatcctaggaaaatacaaggggtagacctaggtgtaaatttagacctaccttgagaaagagtggaagcatatgcaagacaaccaaaagctttaagatgttcataagatggagatttggaatgcaaaatgtgaaaaggtgttttaagcttgagattgggagtaggagttctgttgatgagataagcggctgttgcaatgcattcatcccaataagataaaggaatgcatgattgaaacagtaaggctcttgcaacattcaagagatgttgatgcttcctctcaacaacagaatattgttggggtcgctgaacacatgagtgatagtgaacaatgcctaaagaactaaacaagtcaatgaattgcaattctttagcattgtcagatctgacccctttaatttgcataccaaattgagtcttaataagttgcaaaaaattgggaataaccttttgtgcttcagatttagcttttatgaaatgaactcatgtatatctactatgatcatcaacaattgtaatgaagtacttgcatccatcaatagtaggagtattaaaaggaccccaaatatcaacatggattaaatcaaaaatagcagaagaaacattgtgattggacacaaaaggtaattttctttgttttgcataatgacatattgaacaatgaaaatcatgagatgcattggaattaaattgcaaggctttattcaaggaatgatgtttgatacaagctgaatgccctaatctgtaatgccagatagtatctggtgtaatcttagaatcagtaatagaaaacacaaaaggactatgatttgcaacatcagattttagaaaataaagcctgcctattctctcacccatcccaatcttctgcttcttcaaattgtcctgtatttcacaataatgagatgaaatacaaaagagtaattgccagaatcagtaagagatataacagaaaggaggttgcaatgaaaatctggcacataaaggacattaaacaaggataggttgggtgaaagataaacagttccaatgcaactaactttagcatactgagcatttggtaacttaacagatgtaatagatgaatcatagtaggtatttttgagtaaggaaaaatcattgcacacatggtgagtagcaccagtgttaatgatccatttagaaatggaaacaatagaatccttaccagaaaaatgagacactaatggaggctcagttgtggaattagatggggggtctgaactcctttgggacaacaatgccatgagcttttgacactgtattgtggttaaaccagcaataaggtcttgatccttgccagaattatctccactattgccatcagtagtctcagaattggtagaaaagtttgttgcagaaggctttattgaagtgttgttacctcgattgtcatttctgctaggaaattttccatgtagcttgtgaccaggtggatagccatgaatccgaaaacacttggacatcgtatgacctgtaatgccacaatgagtacataccatctttggacgatgtggctgaacatttcctgcaaactgtccacaattagaactagatccagatccattcttgtcatcctcagaagcagtattagataaacatcgctgactttcttcttgtataacagaagcataagccttattgatgttggggagtggatcttgcatcaagatctgagatctagtgctgctgtatgactcatttaatccaacaaggaattcaagaacacggtctcctcctgatattcttgaattgtttcatagctccacacatacaagcaggctgtggacgatactcctgaatcaaatcccataaagattttgagtctagtgaaactaagtagtaacagattttcggaaaccctgaacccagagattgcttcgtgcgtatgcttcgaatacacagggtgtcattttttttgatttgaa

SEQ ID NO: 308053 - DNA, 1549 bp, Cannabis indica
acataattattaatatttataacaagtaataatttttaataattattaagttaaatcatatggaactaatacttaattaaccttaattaatagcgatataatattttatactaagaatgtgtaacaatgctccagtaccaagaaaagaaagaatgagaacttttctttgtcattaatgaatttacagtatagattacaactatattctgtatacgtatacatgaatgtcaatgctgcaaaatctttacaactagtgttcaaattaaactgtttggagagaggcttgagtaggtaaatttgacaaccattctagtaaagccttgttcacaagctctggaacttcatcatgtgggcagtgcccagcctgtaagctaaccagagagctattcgggtagaactctttgatccgaatcgccttggcagggccaacccatgggtccaaatcaccccacagcaacaagagtgggcaactcaacttgcttaagacactgtctagagtatattgagtttgattcaccatgaacctactcatcaatctgtaaaaccaagcatatcaaagttcaaaccatgagaaacatttctacacaccatgaaagttatgatatgagatatgagaaggaacaagtttaatctgaacctgtaataaacttctccagcattgggatctgctgctggcattgttatagattccacaagatagtcatccacattggtattatttacatacacctgtgtataataaaatatgtatgtatcatatgaataacctgagctagagttgttatggtgacaatttttgcatctgtttgaaccattttaaaaaatagagttcgatttgtcatttaacattataaattttgcaaaatgtgatagagatcgaaattcggaaccccccactgcaatggggtgagagaagatcaaacattaaactaattaagaatgagcacatttctgagtttaaatgaatgaaaggagaagcctagtaataactgactcacacttttaatacggataaaacccgagatggctgctttgcttgccagaacagaaatccgagtactaatcgctgaaaaacttccttcaatggcttcagtaaaactttttgaaaggttgattcttcagttttattagtttcactatttggatttccaaattgtcctgcagaatttagcagggcaaccccaataacttgttctggcaacccagcagctgaaacaagagctgtaaaacccccaaggctgcaaatgcattgtgattcatatgatcaatttttacaatttccaattcaaaagctcagacattcatatataagagaaacttttcacttagagaataattagattgaaaaatgttgccattcaaacaagttcatcccaagttaagtagaaaacctagccattttattgtagattattagtattattacctgtttccaactaaaactgctggctctttcacaatctctttcaaaaaatccaccacctggtctttccataccatggcatcatattctataattgccttctcactccacccaaatccaagcaaa

SEQ ID NO: 308054 - DNA, 2911 bp, Cannabis indica
ctaggaaatcaatgaatttcaaaggaaaataaaaaaatcatgtagtgtatctccttgtatcttgacatgctgcccagttagcaactatgtaagcttcaagcttgaccagagaagttgcagaggaaaacaatccttctcgaggataggatttcacatattgtagcaccctttatgctactttaatatgcctagacctaggagtagctaagaattgacttaacttgatgacagggaaagaaaaagcaagtcttgttatggtaagatattgaggttgccaatgattcttttgtaaagtgtaggatctgctagcttatctatttcatcttagcaaatgtcaaattaacttccatatgtgtgtttactggtttacactctagatgtccttggtcttcaagtaattggagagcataaagcctttggaatacaaaaaacccttcatctcatttggccacttctaggccaataaagtacttcatcttgcctaggtttttagtttaaacttgttgttcaatctaactttgagggcttccatctcttctacattgttactggcaaggatgaaatcattcacacagaataataatataataaaattttctctaaagtgtctcatgaataaagaatgatatgtagctaaattctaaaaatctttctctagtaatgtagtagaaaattttttaaactattttctagaagcttgctttagaccataaagagacttgcttagttttcatactacattaggtggaaacttctccttaggactatacccttgaggtaaagcgataaacacattttcatgcaagtctcatacaaaaaagtattgttgacataaatttgatggagatgtccaccatgaattgcagcaagagccaatatgagtttaactatcacaagtttagtaacaggagcaaaagtgtctatatagtcaattccttcttgttgattataccctttggcaaaaagtcttttcttgaacatctcagtgcttccatttgcattatacttaattttataaatccatttagaactaatagcatcaagtaaactaacaatggtccaagtgtgattattcctaagagcgtgaatcttttgcccatagaattgtcctactcaagtatatcaactgtttaacaaaagaattcaagttttgagtgactagaaatagacaacagaacaacaggatattgaggagacaatgtggcatagtcaaatacttgagaaataggaaaagcaataatagtagtagatgcttgggaaatataagagattttattagcagatagaaagcgatgataatcttgaagatatgaaggtttatgagaggttctaacaggtcttccatgagatgaggaagtaggaatggaagaatcaatgtcagaagtaaaagaagaagatgaagtagacattgggataacagaaaataaaatcatgatattcattaggcgaggaatcaacattgagataagaatatatatatatatatccttatgaaaagaaaaatctcaaaaatagggaactttattacatttcatatcaaaaagcttataagccttcataccagtggggtaccctaaaaacactcaagggacagctcttggtgaaaatttggatctagaaattggtagggttgaggcataagcaagacacccaaaagctcttaaatgatcataattaggaggtttagattgaagagcctaaatgggtgatacattcttcaaattgggtatagggattttgttgatcaaataggtggcagtggcaacacactcatcccagtacactaaaggaatgtaggattgaaataataataccctggctacatttaataaatgttggtgttttctttcaatcacataattctattgaggcctacgcacacaagagtggtagtgtatgatgcctaatgtttaaaaaagctctccaaattgtaattctttggcattgtctgatctaacactctttatggtcatgttgtactaatttttgaaaatttgaatgaaacttggaatatagtttgggcatctgatttggttttgataaggggaaccgaaatggacctagaatgatcatctacaatggtaataaagtatctacacccatcaatggttaaggtatgaaagggtctccaaatatcaacatggattaagttaaaatatttttctgtaagattgtgatttgacacaaaaggtaattttttctgcttagcataatgaacatggaactaaaaaaatgggtacaagaattattctaaaaattcaactttttattcaatgaatgagttttgatacaagaggaatgaccttatatatagcgccacgtagcatcttttgaaattttagaatctattaaagatgtaaatacaataggagcattgctagaaacagtagtttttaggtaataaagatgctcaattctttcacccatctcaatttgtaggttgttctgtgtgtcctgaatcacacatttagcaaaggaaaatatgaactcaaatgtggaagtctatgctaaagagctaatacatattactttggtacaagtaccattgggctatttaacaaaaatgatagaaggatcaatgaaagtatttgaaaataatgacatattatagcaaacatgatgagctgcacttgtatcaataattcatttatcaaaaatattgggattgatagtaccaaaaagctgtgacgccagtggttggcgtggatggcctgagtgggaagattctggttgctcttgcattttttagacaacaaagctatattttagcactaagttgaagtgagggctgcataaatattttccaatagatgattggtcctccttgctttgattgatcatttgtgctcctgtaaaattggcactagcagaaatttattaaaatttgaggagtcattttgattagaaaatc

SEQ ID NO: 308055 - DNA, 1813 bp, Cannabis indica
agcatccgagccttaatcttatcaatagcctcattggtcctctgcactaactctggaccaaagtacttccgttctcctgttttgtcccaatgaattggggtgcgacatttcctaccatataacatctcatagggagccattaatggaaaagttgttagtactaaatttacaataaaactaatatatatttttcaagaaaaaattagaataaaaattaattgtttgatagaaaaatacttataaaattcatctatacacaattcacaacaattaatcagtaaaattacattttgtagaaaaactaaattagaaaaagagaaagatattagaacagagcatagagagagaaatattctgttattaatttaaaattgtgtgtaaatacaatagtttacatgcctttatacacatgaggaagaattggacaactaacagctttataactaacttaaccgaatgtgaaactaactataacaactctaagagaccccctcaaggtggagtgtgaacattctttacaaccatcttgaaaatgatgttgttgaactgagaaggatagagtggctttgtcagtatgtcggctcacttattgatggaggagacatggttcattttgagcatactattggtgatcttttctcatactatatgacagtcaatttcgacatgttttatacgctcatggtagacgaggtttttagatatgtgtatggctgtagtattgtcacaaaatagtgttgaaggcatgttgattgtgacgttgaaatttggagaataaaatgtaaccgagttagctcacatgtagtattggccatggctctacactcgactttagcaaaggatatcgatacaatttgctgctttttggacttccaagagattagtgattggccaaggaatatgcaagatcctgttatggatcttctggtgtcaaggcaggcaccccaatttgcatcagcaaaggcttgtaatgtgagtggtttggtgaatgttgtgtggaaaaagagaccttggtcgggtgttccttttaggtattgaagcactcttgtagcagcttgcatgtgaggtttttgaggagcttgcaaatattggctgagcttgttgacaacaaagctaatatatagtctggtgatagtgaggtagattagttttccaatgagactttattgtgtaggattccttaagagttggccattatctttgctgagttttgtgtttagttccataggaatggaaacaggtattatgccaagtgtgccaacatcttgtaatagttgtaagattaatggtctctgagttacagagatgccttttttgcatcgagcaacctcaagacctaagaaaaaatggagaatgcctagatcttttaatttgaattgagcatcaagtgtagcaatgaaactagttagggtagtagtgttattggttgatactatgatgtcatcaacataaattagtagtgcaagaaaggctccagattgatttcttataaacagggagtgttcattttgagattgtgtgaaaccttggttaatgagggtagtgcttagtttagcataccattatcttgaggcatgtttgaggacattgaagctttttttgtaatttgcatactaaatttttaggtatcactcatttgagagtgtaaccttgaggtagtttcatgtaaacatcgtcatgccactactacaatgttagcctttagaggctgttttttcacctctatttataaaaagggaagctaaagggtgtgaaaatacccgcttttgtcgaaattgacatttagaggaggttttttgataaaaaccgtagg

SEQ ID NO: 308056 - DNA, 1684 bp, Cannabis indica
ggtcattaaaaatacctctgaactattgagattattagatttaagacttttgcctaatttagtaagaaaagtctaacatgaatgaaagttcaggggacatgatttagtacatatatcaaaaaattcaaaaggcataatttggtagatattaaaatttggagagtataatttagtatataaataatcactgaattagtaaaattgaatacagacaaaaaccttaaatccaacaatttaatagttttgggaattttaagggtcaacaaaatttaaagaaaatgatttgatacatatcaaaatttaagagacaaatatcataattagccttaattaaagcaaagctcatacaataactcttcattttctctcttgatattgaatacattttttattcatctgatttatatatataatcaataaattaattaacttgtatatataacggtcaatctttactataatagccccatacatctttctatattttttaaaataatataataataataataataataataataataataataataatatatagtttgcttaattctcgtttgacaccaggtgtgttagatcgaattaaagttatatatatttatatgagttgacacaataatattctcaacaatttaactaattcaacaaagctcaatttgaggattatttgtttaaagaaaattgaggattattcttattcatacatacatatattatacacacacatttattatataaattgattattatcagagaccaatcgagtgttctttctatatattatataatataataataatgaataagagggtagtcaaataatttgttgtttcataactaaacaatgtggctaattatataagtaatttattaaaaaaaaaatttgttggtcatggaaattgttgttgagatttatgattaacactagttttcttttttaagacaattttatttggtttgctttagtgttctctggcgtagcttaatcgaactctctgctcaaccatgactataatgttcatgataacttttatttttatagtatatatgtgtgtgttattaatgcatatatttattaattaggtaggtatagaatggtggtacgttaaaggaattcacaaataactttattaattcatattaatgtgttatatttcttgagccacacttaaactctcatgaaaaaaagttgtcttcatccatttatatttaaaatcacgtggtctatacatattgatcaagtttatccatcaatttctacaatcataagtagtataaatgtgaatctttgcttagttttatttgaatttaaaataaaatcattatgacaataattatcatataaatgattaattaattactaaaatgatccacaattactaaaatatccacaaatactaaaaatgattaatttatttagatcaaactttcatacatatatatatatatgaatctcatattgaagtattttatttttggatcgattgggtattaaatatcatggactaaatgtctagataccttaagtaatagttctaatttattgagggactaaattagaaatacttaaaattaataacatatttataaagttatatattggtagtggtctccaagaaacaagaacaactctattctcatcttccccctttaaaaactattttttgtgttttgaaactaa

SEQ ID NO: 308057 - DNA, 2379 bp, Cannabis indica
tggtgaaatcggttcctctttggatccgtctatatgatcttggactgcaatattggggtaccaaatgtcttagtgcattagtgagtacattggggaaacctataatgacggataaagtcaccaaggagagatcaatggtgaagtttgctagggtgttggtagagatggatatctctgatgagcatccaagaaggatagaatttttgaatgaacatgggcagttgattgagctgcctgtagagtatgaatggctgccagttcagtgtaaaaattgtcgtagttatggtcatttaatggctaattgtaggaggaaaaaggagagcaatgaaggcaataaggtggtgtcgaaacaagttcagaaagaatggggtgcaagcaagattaatgatgctgaaatggttgttgttacagaacagaagcaggggaaagattctactcaacctttgcaagccgagaaggtcactgataatggaggatctaagggtgaatggaaaactcccaagcgaaaagttcaaagtaagaggatagttgagcaaaagattgaggttgcagatgagaaagaaagcaattcctttatagttctgcagggtcaaaatggtggtgaaaaaaaggaaattaatcctgatgaaattgctaatggatagttgcaatatcatgagttggaacataagaggcttcaatagtgataagaagaaagaggaagtggtagatttttgtagaataaggaaaattggtttaggggctatcattgaaactaaaatgagaggctcgaaaattagtgacactatgtttaataaatttgttgggtggaatttttattctagcccaatcattaaggggagaattttggttatttggaagaaggattttgttcaggttaaggttttagaagaggctactcagtttattcatttacaagtcaagatggcttgtcataaaactgaatttttggcaacttttgtgtatggttctaatgtgggggaggctagggaaagtttatggaatggtttggctaatcttcccattatgtccaaaccttggattataatgggagattttattgcagttatggattttggtgacaggagtggggggaaccaaattcctagatctgaaattggggatgctaccaattggttagcactgggcctagctgacgctctaaggaaaactgggtctcatttcacttggtccaacaattaagggggaagtgatagaatttattctagaattgatcatgtcttcaagaatgaagaatggttggatttgtttcctaattcgtttgtcaatatgagttgggagactttatctgaccattgttcttatgttgtttccgctgcaatcactcaggacattgggataaagcctttcaggttctataatcactggactgagcatgaaaattttgttcaagtggtgatggaaagttgggtcaaactgataaaagcttcaggtcttttggctattcatcttaagtgtcttcagctgaaacatgttctcagaaattttaataagatagtgggagatgtggagttcactatcagcaggccaaagataattacttaagttcaaggcatgaagctaaatctgatccaggaaacatcaacttattggaggtcgaaaaggcagcagctgaggagttttgtaacagggataaaatgcttcatagcttccttaaacaaaggagcaaggtaacttggttgcaaaaaggagatgagaataatgcttacttttatgtgtgcatcaaaaaaagaagagaggagaactggatagccttcttcaagaatcagaatgatgagattgttgatgattactcagaaatggtcaagcattttatggatcattttaaaagtttcatgggtagtgctagaccttattatcaccattattttcattgccttgaatttggaaacaagctttctttagatcagcagctccttttaactcgtcctttcacgaggaaatagatcaagaaagcaaagttcagcattcccagcataaaatccccaggtccggatggttttagctcggaattttacaagagaatgtgacctatcttgggtgaagaattctgttctgctattcagagtttctttaacacagggataatgcttgaggaattcaatgagaccagtatatccttgatccccaaaacagattccccctcgagtgcagttgaatatagaccgattgcgtgttgtactacagtttacaaatgtatctcgaaaatgatgtgttcaagacttgctgaagtattgcccagcctgattaaccagaaccaaggagccttcattcaacaaagatcaattgctcataacatcctgattttccaggatcttatcaagaattacaataggaagaatgtgttgggttttatgc

SEQ ID NO: 308058 - DNA, 2346 bp, Cannabis indica
aaaaaaagtaaaatataaacacttctatattgtaataaccaattactataacatgtttattaaaactaaacacttttaaaataaaaatatacaaataaaattacaaaacatatgcatgttataaacaatatcattatatatttattatttaaaaatattaattatatttcaattttaaattaagctactaaaaaataaacactaaaatttaaatgtataaacaactatgtttatattgtgattattatataatattatattaactaaaaattaactgaaaaaaattatatatattatgtatgtttaacaaaaaatatcaatttatatttattatttaagaatgttgattatttttaatttttaaattgaagtattaaaatgtaaacacttaaaatttaaatatataaaaatttatgtgaatagacatgtatggctctctttttctctctctgtgggtcagaaaaaaaaaaaaaaaaaaaaaaaaaaaaagaaagagattccaaagccgacggtagtggtcatcgaagaagatgaggctctgaatcagattgatctccctttgatccaagacatggtagcaaattcatatataatgagattatttcttaacccatgtgatgagctagaggctgagatttcgtgtgataaagtgagtcgtccaggcggtggtgcttctctaggtcttattagggcgtcaaattgggctaaagaggttgaaaaggaggactatcaatgttctgctaaagatacttggagcaagttcaaagctagccaggtgagagctccttcaactaggctttattactctgaacctatgaaaatatgggattaatttgttgctaaaactgatcttgatgaggttgatgttgaaatctctttgtgacgaacctctattgtttgcatagttctggtgctagtccacatttcagagtttttgagggctttgtgaaaagaatttggaaaaacttgggggttggtcgaatagtgcgtatgcacttcgattttaccttagttagttttcgtgatgaaactactaggatgttgttttagagactcgagtgatttattttgacaaatagctggctatactccgtctgtggacttcggaccactactacaaaaaggaatttttatgtcggtcaacgcgtctggtcaaacttgttgacctgtacaaaagtcaacctacacttttttgcatcagttattcactgacacaaataactatcaatttatgtcagttatctatctgacgctaaatcaaaaactaaagcaaaagataaaatataaaaaaataatgtatacactattagcgtcgatctacagccaccaagtatatgtggtggtgtgagatgtataatagtgtggtggtggttgtggtggtgcgatggttctaatttttttttaaattcttttacttcggttcataactgaagcaagaaaccaatttgtgtcggtgcacttgtttttcgttgcttcggttatgaaccgaagtaagtttttttttttttgctttgattcataactgaagacaaaaaaaaaaaacatttagcgtcggttcaaaattgaagcaaaaaaatcaatattcgcgtctatgacaataatgttggttacacaaaccgaaaaaaattatttatgtgtcactttaaaatcgaagtaaaattcccttttaatttgtagtaatggacatggattctgtgaagatagttcgatctgtccctgtttggatcaggttgaatagtcttagtttgcaattctggggtcacaacaatctcagtgatttagttagcactataggcaaaccaattatgagtgataaagtaactcaaaagagatctaaggtgaagtttactagggttcttatagatattgaaatctcagataacccgccaaaatcgatatcttacatcatcgttgaaaaatctgtggaatatgaatggcttccttcaaaatgtgcaatttgtgatttactgggtccgttctccgctcgaaacaaggtcgatggctccttgttggcccatttctcctcctcgcttgacgttctttttgactttcaactccaccagttatatttaagatttatttatataaattaatagttaagtatgtatatgtattgttcatatgaaatttaaaatctataaatatatattgttgaactctaaaattatgtgtggattgtttttttgattttttagtattggttgtattaaagctatgtactgaattggaagtgatgaactctaaatttgttaatttgaaatatgaaattacatgttttgatttgtttatttttggtagatcaaagcaaatttgggctcgtgtagctcaaatctatttttttttttt

SEQ ID NO: 308059 - DNA, 2650 bp, Cannabis indica
aacaaaattaaagaaaaaattacagttttacaaatattgagtatttatactgctaaaaataaacattaggtttatgctacttacaaacttaaaactttgggtacttatactgttatttactattttttaaatttgtataaagatagggcatttcagtcatttcatctttactttatttagtactctttgatgttatccttattactctttttaaatttaatggagattatataagtataatgtaatcatcatcgaatgagttaatagcggtaaaactcttaaaactttcactcaatagcaattaacccctaaaactcatttttacagcaaaatccttaaaactcatgttttgttagcactttaccatttccatccatcttttggtgttaagtaacatgctggatcagcaacgtttacacaatatgcacgtggcacaattttattggtacaagtaattaaataattaaaaaaaataaaatataaaacaattatttagagttaaaaaattatttaaaaatcttttttatctatccttttcatttatgattttttgtttgtttctgcttctttttcttcatcaaacctaccaccaccaccaccatccacaaaaacaccacccaccacaatcgaaaccaccaccaccatcaccatatgtcgtgatttcaaatcaaaatccaagcacaaagaaattcatatttaaaacaacaaacttacatctcaaatattccacacattttagatcaaaaataacaacaaaaattcataatcaatctcaatctcaaattcaaacacaaaaaataaatttaaaaaaccatatgggtagattgggagagagactaaacgagaagagaaaattgcctctgcccaagttaacccagttgtacgttgatgttggcgagccaaaaatcaaccacaaatgacgcatctctggccacgaacatcttaagccacgaaggacacatctctgaccatgaataatacacctccgacctttctctatcgcgagtgactatgaaggtcgctcggcccagctctgtttaggccactgtcggaaggaaatgacctcaccatgaagtttttgagttcccaaagcctctagatttgaggttttaaagttttaaatttgacattttctctcttttttttttggatctgagatattttttttctaaataatatttgtgtttttatttgtttttgtaagatcttggattaagatctgagatagggacgagtggtgatggtttcagttgtagtgggttggttttttgtggatggtgctagtggtttcgattgtgatgggtggttttttgtggatggtttcggtgataggcatgatgataaagaatgatgaagaagaagaaagataaaaagcataaatgaaaatgaaaggaaaaaaaagtaaaatttgttttttttcattattttttttttgaatatttaattacttaagccaataaaactgtaccatgtgtatactgtgtatacgtggatgatccagcatgacatttaacactaaaaatggatagaaatagcaaagtgctaacagaacacgagttttgagaattttttcaccaaaaaataagttttggaggttaattgctagtgaagtgaaagttcaggggattttgcaacaattaactctcactaaattgtaatttaattacatcacttttaagtaaaaccaaatattgtagtattaacataattctattatcattaccattataataaactaaatatcaccaacatcaccaaacagggtgggaatgtgtaacaccctactagactaggcgtgttattgtattttttatgtactgtgcacgcctttactaaacaaggggtttattgtaaaacgtgaataattaaatctttcttagataacttaactttaataatttacacaattcattgtcccattttaaaagtgacaaaagattaattatttatacttcaaaagttatcgtctaaagactatcaaaaatgagcctaaaccgtctcgaagaccctaaatactctagatctaaccgtcttgatatgtacaatcttcatccttagctttagactcacactagttcaattatagctcttacttgtacaaacatgtaacaactgtgagtcggcagactcggtaagaaaagtataatcataaacttaaatatatatatctagaccataaccaagtgcccatacacctaagtctgataactgggtcaggaacgttctcaacaaagtatgactaactacgtatccaacctatactcagtactctagtcgtactgatgtgatagcggttagttcatactatatgatagcttagcatatatctattggcatctctatgcaactctatgtacacctcactgataccctaatatgttaatctaatggctattgatttgcctaatatatattggtatctcagcacaactctatgtacaccttaccgatacccatatatattattgtgacgacaagtaacaggcacactaaacatgtatacatatatgcaactattatactaattttaccttgattccgtatgcaagtatgtcggtaatcctgagtggaaactgctgctcaacaatttacaagcccctaagtcacaacatacgcaaaactcataaatgatatgctaaagtacttttca

SEQ ID NO: 308060 - DNA, 2235 bp, Cannabis indica
ttcaaaaaaaaaaaattgtgatagttcaaaccgcagaaactgcaccgcaccgcatcattttttgtggtacggtttttgcgattttttagtatcgcggtgcgggtgcggtttggaaaattagaaaaactgcatgtgcgggttggtttgaaaaaatggttaaaaaccgcaccacccgcaccgcgaacacccctaatatatatggtcgtgagggacagaaaattcgatgtagttgacaaaacgtgggccccctttcctctttggggaagtgtactttttggttggtgcttgacaagttttggactacgtcgtctagctggattgtgtcttctaggacttcaacctctagaattttttgtttgtgggcttcgagaccgcaacctcagtattgggggctcgcgtttgtccttacttctttcaggtttcaccaaagagttttcaatcctcttatgcggttcagccatggcgaagaattctactaacgactcaggccgtcgtgcctttagttctttctaaaaattcgttcttggcagggcacttgtaattaacatacaaaccagcgaagactcggggccttctcggcttttgttattttagcattaaattgtttaaaataatcttgtaagaactcacctacatcttgcttgatattggccaaagttgtgtatggcagtttgtatgatatcatggctttgaaatgcattaagaataaatccacgaaggtttctgaggttgatatcgatgcctcgagtaactggctaaactagtcgtgagtattgtcttccaaaatcacagtaagtatttgacacttcgctaattgaggtacctggtctacttctataatcgtattaaatttatcaagataatcgattgggttagtggtacctttatattgaacgactctgagaacttaaagcctttggaaagtctagcttgtcgcacctcttctttaaagagagatgtcccatgaagcttgtaaatgagctttctgtactgcctgatcagtctcaatgctcgcaagaggctttcttgatcgagtcctcctgacaatatggggtggattttccaagttacttttattgcaagcatgtgttctatttgattcaaacaaccaattcacatcatgatctctattcaccatctcttttaacaagtaccaagtggcctacttaaattaatgtacaattaccactaacattatttataacataaaagacaagctagagaataataggagatctaccaccagagaaatcccccaagatccctcaaagaagaaaagaaaactgatctcacatgtgaacccaagccccattacaagcccctagccccattgtacagcccattctcaaaccccattcaacatctcctgtgagtgagagctctaaacccgtgttgtcaagaatctattgaaggtgctcatacttataatgcgaacaaaataacattacaagatgtttctttatataatctttaagaacaaacccataactttcaaagcgaataagaacaaaataaaaaagctatcatgtcttttaaacaataaagaattccaccaaaaaaaatataaaaggtcaaattagtctaagctcgaaacctcaaaacccagaatctcatatggagatatcctatataaacatatatataattataattataaagagatagagatagacaaattaaaaagtaccattttttctaaaaattaccaaggctcgactaggattgtccttcatcacaaacgagccagaaacatgtagaaagatgcagacaaaaataacatattaaataaaaacgaatagaaaattaagggttgaattgaaaatgaattctggaattagaaataggggttcatattatataatatataaattttcatggtttggatagagtgactgaaaatggggggtttacattatattgtgcattattttatagtttgaacatggtgattgaaactacattttagaaacggaaaggaaagagggatttatggcatgtttactaatcaagattgggagtgataggtatggtaatcactccttttcatttgtttactttatttaatggttggaatactctaagggaaaggcataaaattaggagaaaagaatgggagaagttttcctcccaatttcttcacgtataaaacattacgggtaatgctatttttagttttttatttattttttattattaaaaacaaaaagacacttttgccaccaaatattatatacc

SEQ ID NO: 308061 - DNA, 1490 bp, Cannabis indica
acttcatcagacttcattcttgagaagtactgcattacctctttctctacacaatttgttatcacaaagtccctcacatttgcagccattccaacctgaacagtgagttaactttcattacgcaaaattccaaaattaaaatcaaagttgaaagcattagtttctcaacaaactactaccaccacataaatgactctgttaaagttctatatattttaagacttcataaaaaatcaaaaaacaagttgatgccaattatctactagaaacaacatagtcaaaactaagcaccttgcagtttgtaagcgtcgcacaagcacatccaaaaagagcgtacaacagtctataaaaacaccatactattcctatacatgatacaaaagcaacctcggaaggcctaaaaacagccagtaaaagcaccaaaacaatccataacaaaacaatgtaatggtacaataacagtcaaaaatgacaacaacaaacagcccaaaaaaggcataacacaggcctccctcaggcacatcagaccaagcctaactcagaggcataacaataagcctatacaattcagtctattgagcaagtgtaaaaaattgagttgcagtgcagggctgtatggaagtctcatttgaaggcaggagcaatcggccctgtaaagaaagaacaaaataaaaaaataaaaaatagttgtatatgctagaaattataggaaaagaaagtgagattagtctaaatcgccaagctcagactaatggtgtgtggcttacgagattatatagcactctacagttgttggcatttggtctaatcatattattcgattcatcatatcaatatatattccgcgaagagttctaaaaaagattgagctgaaatgccttatatttacatgcaaagcatacaaaaccagcacatatctactgatcattaaattgaacaagactcgatcatgaaaagaaagccaatggttatggtcatttcaatgtgttctgttatgttcagtggtttcaaactgagaaaacacaaaacaatacatgggtaactttcacgagtaaaactactaatgtttcatcccaactggaaaaagctttgggttacccaaaaatacaaccaatggctaacagtaacacaagagaacaaaaatatacagctatttagaggacaaaaaaagctattttccttttcaatctaaggaaattaaactacgaggaagagataatggatcgagctcccaacatcctgcaaggcggctatctttctctccagtatgttgcaccgcaggaatttgatgcgaaaatttacccattttgtcgcgcggtatgtcaagcaaaccactttttgatctctggatccttggagccttgaacattgatttaaagccagcgacttgaataagaatagcaacttgaacgctctggtcatgttcttccatcacttccacaatatcataatcaatatccagcacagcttagaagtctgctcattgtgct

SEQ ID NO: 308062 - DNA, 1850 bp, Cannabis indica
tatatgcttaaaaaattccaaagttgtagttttactagcgaccactccacaccaagtgcataatgaagtaaacccacccatgtgggcccaaatgtcaatacataactaaaataaatgtatatggcaaaaggagacataaatactaatatgttctcacacaagtaacaaagtgcataaaattggtccatagagagcactgccacaaggcagctctcgcatgaaaaactacaaaaccaaatgaagaagactaaacaacctaaagtcaatcatggaaggccaccacaagggaatggcagtgctcttcaaaattagagagcactgccaacatgccaacacccttatgcaagtccaatcctcaagactctggggcttgtccagaagtggcctcttctccattctcctcagctttcgctacagtggtgacttcagtagtagtcgcggccgcatgggtttcgcgataatgctcctcgaaatcacccaagagatcacctatgaagctaaaatccatgtcttatttttggcaccaacacaagtaagatattccaaaattgctcccgttggcagtcttctcaatacgagcgacctctgccttatgacctacttgcatctgcttaacggtctctgcgttctctgactccaaatttttatggtcacggtgtggctctccaccatgacctttgattcagcctccaatttaatgtatttggtattcaactaaccaaattcaacattcaatgtactaagttcctcagtcttggctttgacttctttctcattagccttctgtttggcataggcctcctctaactttttctcaaaagaagcgagtttctcctgaagcttcttgattgtcaaagcggcctctgcgttacgcctctcaaagtccacacacctattcgcgtaggtgttatgagaggcagtggacctttagtaaaggctgaggtcgtccaaaagaaactacgaagacaaaacaggataatcaaccacatcataagtataaaagatatatatacacatacatatgcataagttgaagtggtaaaggtgtaattattatagccagagagtcaaaatgttgctgcaccagatcgttgactggaacttgatcgttgtcaaaggcccccttggtcaaagtgtacaaagacaaaagccatgtaccgatgtttttcaaaacctgcctactccaggaaatatgggcgtcagaagcctctccatggagtgtaagtccctgagaactgttggaagaaatttagctcgagggcaggacatgatggcggtcccatgaccaggcgttgaggttcgccaaatggtagcgccactggtggaaccagcaacctcacaggtaatgccactacaactattagaagcggcgtgttggacggggccaagactgaaggaaagacgaccgtagtccaaggacccgcatatgtgggagccccatgtaacgatgcaatagtaacacttggcgaggctccttgggctggggcgaccactgtcaagggggtctccttgacctgaggaggagttatggattttttacttactttttgcctcttcgcagccttcttgacagaagtcgccaaagcatccatagtacctgaaaaatcaaagggaaatatacacatcaatcatccaaaaattgttaaacaataagtgtattacaagacatagttatgggaacaacataaagataaagtgcaatcacaagcatatatccaagtcaagtcaggaaagtcaagtaaagcaataaaagaaagaccttgtcctaaatctatatgcgctctctcaatggggagcactaaagtattaccttttttagacataaggttggagccatattgatccaaccc

SEQ ID NO: 308063 - DNA, 1970 bp, Cannabis indica
cctaccaaacaaagataacgaaatgctcaaaatataaacaaacataaagatggatagagaaagagaggtaccagaatggagaaagagcttctgggtggggttttagaagaagaggagaggagaagaggcggctcccctcttcagcttttctttccaagcaagttgggagaagaagagaagagaaaagacgagaacggaggctgcgaggtaagctgtggtctcatatgccctttaggctttacaattcaccctattttcacatatgtgtcaccatttgtaccgttgctgttaggacacgtgttatcgttttcatgcctgaacacgtgacagtattagattctgatttaataataaaaaggctaataggatttttttaactattgatattattagatttaacgacttttgtttaatttcattcaattttactgtttcagtaattgtttatgtactaaattatactctctaacctttgatatctaccaaatcatgtccctcaaattttgatatgcactaaatcatatcccctgaactttcatccatgttagaaattttttatctcaatagtttaggaagaatttttaacgaccttaaaagttcatagagcataatttagtacatttcaaagttcgagtagaaaaattattaattagcctaataaaaaagaaaagaaattgctaaaaagtgtctaaatacccttctcaaataattaaatatcgaatcctatataacttaagaaaatagtttctagagaatattattaactaattgttgggtaccatctatagaagttactaagcactagtagtgtcgaataacaatgctttttagaaaaccactcaactattatttttctgttaagtgcaaatttaaggtatcattcatttaccacctttaacacataacacatttttttaaaaaaaaatttcgctgttatcaaaacttaagattcgtttacaacaacagagaaaataagatcgagaatttcacccatccaacaaacatctcattaaactctagagcatattttgctaaaccatgtgcagcttggttagcatttctcttaacatgagaaataataactccagagaaaaaggataaaacataatgaacatctaaaattaaattagaaaaacttgataattccttagatgtagagtttaaagcagttgaaactcatagagcatcaatatcaacttgagttatcggcagttgtaattgcaatgccaaattgaggttataaaaaagtgatttagcctccatttcatcatatctgaagcatccttgtattggattagagaaagcagctacaacatgtccttgatgatttcttataatcgcccccacccctaagacatttgactctgagttaacagctgcatctatgttcatcttgaaccccatattgtctgatggcctccatggaatcctctcatgtggctggtgtgaaaagttcctttgccttgttgttgtgtatctggttctggccgagtcttttacagcagtgtgtggcgtgttacgccctttagctcgatgatatttttcaagaaaagattttgcaaaggtagttgtgtagacaccgtcatttcgaactcccccatgaagaactctatttctttctttccaaatggtccacattatgcatattatttcttcaaagtcagctttggaatgcaaggaagataattggatcaagtaatccccattcatcatattttgcgcttgttgataatcaatggtgaacttagtttgtttccaaacaaacttttctcttcaacaaccaaataaggcatggccaattaatttccaagcatttgaacacatggaacatgttgcaaaatcgatgactttccttcttaatagtgcagctgctactgctagactatatatatagtgtatgtaatatagcatatacaaatgatatgaaatgcggaaaataaactgtaatcatatcaataatatatgcaatg

SEQ ID NO: 308064 - DNA, 1897 bp, Cannabis indica
ttaaataaaaaaaattagaataaaatgagaacgtacaagattaggtatatatatattgttggttttaattaaattcaaaataagataataaatttatggtttaaataatatcacatgagaacaatatataatattgtatatatataaataatatcagttcaaatatcaaatatcaatttaaatgggatttgttttatttttattttattattttattatatataaataatattttattattttattaaatataaataaaaagtcacacccatgaatttctcataaaccaaaaatttagttatataggcacactttatatagaatagaaatatatattaaaatagagtgtcaaagccacaccattgtataatgtatcacacacctcaaccaataaaattgtaaatattattgttacaaatttaattttacttaaataaaaacacatttcattttttatgttaaacccccataaaataatggactctaaacatgagcatagctagctagcttatgcttaaagtttcgtaatgctaaacactaataccatatataataaaaatacaaagctttaaaacaatgaattaatctcaaagaaaccattagaagtaattgaaaccagagttaattaaactagacaagaggctgtgatgaatgattaatcaaaaaccaaagttaaaccagacactgaaactacaatgaaatcatcctaagcctaaggctaagctagtcattaagctacatggaaactacaatgaatgattaatcaaagaccaaagtaatcgaaatgatctctcaaatatttcaactttctctcggattgagcaaatgatgatcggtgatcgaacttgtgtaaattaagctacatgtagttgatgaacaattttaattagttagtaaattattcactcaaaatcaatataagaaaataattagttaagattgaacatataaaaaaatacaaacaaaggggagaaactctatttcaatttccaataatggatccattacatttctattcattgttatatatgtaacccacaaatatttatggcatcataatagaaataaaataaaataaaataatcaacatgacaaacaaaatataacaatctagaatattataaatcaattattatcacaatcaaagtttccacaagagcatggtatatgacagtatacatttttaaaaaaaaaataaaaaaaatcccatgaaggtataaatagaatcaaattaagggtgttgggctcttcatgcatatcattttatttgaaatatattgattaaaaaatgtgaaatcatagaaatgagatcaaaaaatttgatttttttttgtacatttcttaccttttttttcttgtgtgtacgtacttgattagatccaaaatcagcacaagtccacatgaatactcatggtcatatacttaattaaagaataataaaaaaaattaattcagttaagaaaatataattattaatttacactaaacaattcaataattacacaaacgacaagtaatttaatcaaaatatataaaaaaaaccaacaaaccatgcaaactacgtaactgctgacgtacgtacttttcaattattacatcactacatactccacatccacatgcatatgcgtcgttataagaaattaaataatgataataaaaacaatttatttttgctttattaagcggtcagcaaataaagtcgctcatgagtttgcacgagcgtctctattttatcctgattgttctttcagtatggaaaatgttccaactgatttgttgcctatattggtgacagagtttgaaggttaataagacttgattttcctttcaaaaaaaaaaaaaacaatcaattaaaaatacaacaattaatttgttaaaaatataaaataattaa

SEQ ID NO: 308065 - DNA, 1218 bp, Cannabis indica
aagataaatgactgagaataccaacaattgagtcaatccactgtaagatatattatatcaattcaagcttagcgaaaagagcatttgagtataccgagtagagtgaactccaacaagtgcatgtaatccagctgaagccaagaactcaatggaagaaactgaagaaagctgatgtctaaacacagccgtggcagctccaccaccagcattaccattaacttccaaatttccagcaattgcaagagtattcttctttgatatatgagattgaacatcactcctcatagccatgctgacattgttttttttttttggacaaattcaaatcaataaacaaacataacaaaaaacaaagacaaaagagaggaaaagaagaagacttcggcataccctctcatgaacccatcaccgtggagaaagtgcggcaaagacatactagcatgaattgtaccagaaggtcttaaatgtgcagaggttttctcttcttctttccttcgtttcaatcgttcaagctcttctttaatctcttgtgctttattaagattgggaccaagctccaaaccagaggtgagtccttccataccataaatatcataaatttgcctcttattctcatcgcataaaatctcataagcttcacatatacgttggaaattctcagtagcaatgtccttcatctgaaacccatgaaataatcaaaacaggaaaaccaaagaaagcaatcaaatgatgataatggagaagaagaagaaagtattaatagttagatagatagatacatggggagcttggtacttgtcagggtgatagatttgggcccattgacggtaagcttttcgaatttcttcatcggaagcttccggtgatatgtgaaggagtgcgtaaagctccttatttggagggccatcttcctcctctgtcatcgtcgtcttcttcttccactgagttttagggttttgcagagatttttgatttggggttttagtttgctgtaattgatattacgtcatcatttttgaccttcaacttcaaatactagactttgcaccaataactattattattaaattatttaagaatttacctttatctattttaatactcacaatttaagcatttcttttttatagatataccaatgtatatttattgcttctctctcttaaactctgcctacatgctagcctttttttttttttttctttttctagacagtag

SEQ ID NO: 308066 - DNA, 1068 bp, Cannabis indica
ttctttaatttagcaaaggctttatagatttatgatttagggttttctatattaaagtactttatgaatatgtttagatctgtgatttatatatttcttaagtgttttataaaccctaacagtatctctactggtgccaccatttcgtggttatgtttggcattgaaacaagtgcacggccaagagtttgtccctactattttcctgacacgaattgctgcgttacaccccactcttatgattggattttactatttttcagcggtgcattttcagcatggttctcacatctcaagccttccttggagcacacccattttcgtacatgtggtgtagcccctagtttccgcttcacgtccagacatcttacaccaaacccaatggattgtgagtaggtcttgtagaattcgtgccaatcattttgtggtggtaacgccttcccaacgatgtcctcgatagtgatttcagccaggggtttgctaatttaaagtagttcgtgtatcatttcccaatctgttttggagaaattctgtgtgttatccatagtgtcttgtattttaaggaataagtgaatctttttagtgaaggataggtaacgctcaattaataaatgaattaatttaattcttataattaattagcttcactttttattgaaacaaccttccaaattttctaattgatttgattatataagtttttggttgtttaccaagttacataatcttcttgtgagttaataatgggaccgatcttaattctattaactatttttggcctatattattttttctatataatggaaaaaaatctattattttatggaaagaaaatgaagaaacagaactgcaaataataatttagttggctaaggatgatttttttatgttttaaaaaaaattagtttttttggaactcaatgaatttaaatattgtgttaaggtgaggggtttttacactaggtaccaaatttaattacttttttacatttttaatgtttatcaatttattaaatatttttacaaaattacttttacttttttaaatctcaaaaagtgttataattac

SEQ ID NO: 308067 - DNA, 947 bp, Cannabis indica
aaaaaagacctaaaaacaaaaaaataccatataaattggtcaaacttaaatgtgccatatttatcataagaacttttaaaatctcatagtaagtgtaatttcctctaaaaggaattattatactaaattacatggaatttaatacttagttagaacaataataatattaatacataaaacactgacactacggataccttttaacatttctctaattaatatatcatttcctaagattcagcacgcctaacatatttttatagcaaagaaatactatcaatattctccaattttgtctttgcttatttagaaacctacttatagggttatcttctagaccaatgaaagtcgtataacgggccaccttttcactccttattaggaagatgtgtaggtaatgacaaacttagttttaaaccctaaaatttaataggacgccaacacatgtaaaagaatattgttattgagcattattagcgcctagcactttttataagtaatattttaaaattggttaacgatattttttaaaaattattttcttgaattatttaaattatatgggacccattatttaatcacagcgatatgacatcaaggaaaatactagagtggtaccttataacaattctcacatgtaaaaatatattaaaaaaatatattttttattctgttaataaatttttacatataactaaatttctaaatttcactgtgtatgcaagttataactaaatttcaggattatgtgatcacgtcttttcgattccaaattcaaatacaaacgcttttattgtacgagttgcctccaatgatagttttcatattataaataatagttgcatatgatattggagttaaatgagagatgctaaaaggtattagtaatgtgtttaacactctctaatatgcatatatatatatatatactagtttgaagttacgtg

SEQ ID NO: 308068 - DNA, 2461 bp, Cannabis indica
acatgttaacataaaccacttcaaaactcttaaattgataactaatcagattttgatgggttttatttagggcacaaaaacccaacatttatccccagaggaatgaaggtattttgaagctcgtttagccaagctataatctcgtttcattgaggctctgctcatacatatcagactacagacttagtagccaggctttttcaggtacgacatcagggcttatcccccatgataaacaatagtacagagcatgcatgtccaatcattcctgcttgaatgatccgacgaccattgataaaggaaattcaaaaaggaggaccttgaaacgacatgtgtgcgatgcttgactggtacaatctgacacccttaaatgccatatggtgaaaatgtcacctaccaaaccaacggttagatctcgtctgaagatgatcaatttaagttagcgcatagagggaagcaggcctataaataccccctccattccttaagataagagagagatacttgaaagataaaaataatattatactatctacaaaaaactctacaagaaaattcctgttgagcttcctcttcttcaatagaaacacgagaaaaatagagtttcggtcctatatgaatatttaccagcgaatgagcctaataaaatggactcgtggactaaggatagttaacagttgaacaacgtaaaaatctcatatttttttatttattctattattcctttcttaagctctaaatattcagttgtcgaaaatctcagtaaacagtaaaggcataatcatttaaaaagcctaagcatggcgtgctgacttatatttaagatagattactaaactaacaaagggattgacctataacttctgaaattataacgtaaacaaaattactgatgaattgtggcactttgctacattcattaattaaatggcaagactaataccatacgacaagaagttgtgcttatacctgcaaatcgtagtacaactttgtgaataatagttagcgatgcttctcatcaaatagttattgttggacttaacaacataaggtgataaagaatataataaagacacttaaatcatacctctatttttgcattgtagaaagatgttttagtactacatcgcaaccaactcttattaagcatagaaaaaagagcactacatatacttaatcaaacaataataataataagaaaaatcttatcaatgaattaaactatacacattatcgttaatgtattattacaaacagatgctagcatcaatagttcccacacaaaataaatctaaaacatacttaatctaaataaaaatcagaagaagttcgataattttagatcccaaaaaaataatcacacctgaactgctctaaatgatagagagaaattatgaacactcgtcatgcttacaaattacaatgagtaagaatcaaatcagatttaaaatgtaaataagaatttaatttatagctgattacaatgtgcaagttctatcttccgatcgaagagagtcgaggagagaaagctcgagataataagagatccatatagaaatacacaaatagagaaagagagggaggcagagagaacttctcagcacaattatattagccgacgtagttaaaaattgtccactatataatatgagttattaggggctattttttgtggctcctaatactgtcgtccctaaaacacaattttctagttgtgatactattattggtgtcaaacaccacaaagtaaaaaaaatctaaaaattgcagtacaaaaattgtaaagaaaacaagctaaaagaaattgtagatctttctcacaaaaataagtccatttcatctgttttttgtgatatactttcttttatattatatgattttatatatattgaaatagttaatacaattttttgaaattattaaaaaaaataataaaaataaacaatgatagagaaagaagtatttttgttttatatattttcttctattatgttatgatttatacttgtttacccaaattttaacgacgatgatgtgtcaagagtagcaacacgtggcacaaaaatactgagactaaattcatgaagaatatgtaaagtcatcatgaagggtggtctgaccgttagaatgaaagttagatggtcactcttacccctagcttgagtaaggtgagcatctccaagaaggaaaaacgacggactaacaccttcgtaagcggaatgaacaatgaccacgcacccacatgccaagttaatctagggggtatatactactactcctacatcaaatgcaatgatctccatggggttagtctagcggtgcaccccttaacccctaaaaggttagtctaggggtataccctttacccctagagggttagtctaggggtacaccccttaccccctaaagggttagtctaggggtatacccctaccccgtacacactcatggtacaagtcat

SEQ ID NO: 308069 - DNA, 1145 bp, Cannabis indica
gcatccgccacgtgaatcggggtggtctcaggctaaatagtagggttctactctttagttgcaaatctaaaatggtcacattgattagactaaaccaacggtggtttttttgggaggatttgatttgattttccacttaaggatttgattaggcccattggttttggatgtgcttgtttggatttttttttttttttttttgtaaaactgatggttttggatatttatgattaggtcattttcatatattaattactaattgatcacacatgttaattaaaaattaatttgttaaccaaaaagaattataggatatatattatatttattttcggtcctcatattatgttttctagtgataaatatattttgatctcaaattttattacaagtctaaagttataaacttttaattgtagggagagaatttagaaaagataatatctttctttcatcatacatgaatttataaatgaagtatgagaatatacctacttatactatattatttatagagtagatgacatttaatgaagacaccattagtaattgtaggtttagtaaatgagcaagattttactatttaatcatagtaaacttgttatatatggtagattcatagctattttaacatcactcattgaaagtgctttttttatattaaaaaagaaagaaactgtggaattaattttgcattgtgaatataagaaattcatccatttattttgctcaagttgagagtgggatatgatctaaagactttatttttgttaacggtatattagtaatagcctgtgtttatgtctatgtttatatgactatgctaataatgtattactagaaattaaaatatatatagatattgattaagtcaaataataagttagattagaatgacttatttaaaccattttggtataaacaataggctaactgatttcttaaatagattactactagcttatgtttatgtttacgtcaatgtctatgactgtgctaataatgtattattagaaaagttaaaccaatttggtgtaaacaataggctagaacccctttttttaatatgcattttcaactatgtttaagaataaggttaaataacatatatgtatatatatttatatatatactagtatattgtt

SEQ ID NO: 308070 - DNA, 3581 bp, Cannabis indica
agaaagactattatattaatttggaaacaaattacataacagtcataagaggaggtggaatttcttccaaccaaatacattctgtatccaccgtaagagcaaacttagccaacaaatgtgctttgttattagcagatctaaaaacatgtgagatctgtgctcgtgggaaattggacacaagaaagtgaatatccttaagaatggcatgaaaagccgagagagaagtggtagccttttttaaattctgaacaaccagcaaagagtctgtttctatgagatgcactggcagttgaagctgtagcagtgtttttaaactccatgatagtgcaagggcttccatctcttctggtttaaatcgtcccttaatagaagtagccatagcagcaacaatgattccattcgagtctctgagaactgctcctaatccaatgatgctggaagacatgtttatagcagcatcagtgttcaattttagctgaccaggaggaggagcgatccatataggctgagttggggttgtgctagaagaggcagcagtagaagacactggacgatttgaagataaatgctgttgagatgttgctgcagatcgggactgggcatgatgataatcttttaggtatttgacagcataatcaagaagcaatggcactggtttggtcttcttgccatggtattctgcattcctctcactccaaatacaccacataatggtgataaaaagctcaaacagatcttgagagaggatggaggaaatatggatcatataatctgagagtgaagagatcctagacagatttgaacttggcaaatgatcccagttagaccatattgttttagctcttttgcagcagagtaaagcatggggaatagtctcagcatgatgcttacaaagtggacatatagaatcagaggcaatatgcctataatgtagcacagctgctgtaggtaatgcatcatgaaaagctctccaagcaaagatacgaaccttagaaggtaattttaaactccaaaacgtttgccaccaaccatcagccgaggcagagctgcttggagctgtagtatcttgagattcagttgcaaattgataaccagtcttgacagtataacacccagtagaagaatagtgccaaattaaaacatcatcagttgggaagagacttaaaggaatagagaggatattatcaatatcaggaggggagaagtgtccgtgcaaagcctccaaattccattgtcttgtatcagttatgagactggcaactcgcatagaaggatctccattagaaaccagaggcaaaaaagaagagtggttaggtatccatggcattgtgtggcaaagaatatcagtgcctgtaccaactctccatcttaggccttttatgagtaggtccttgccccaaacaatagatctccaagtgtaggaaggggtattgccaacaccagcatgtaacaagtcaccattcatgtagtatctgcttttcaaaactcgactaagtagtgagttaggtgattccatgagtctccaagcctgttttgcaagcaaagcttggttaaaatggataaagttcttaaaccccatacctccatgaactttggctttacaaagaaaatgccaatttttccagtgaatagaatgtccagatgctgaagaaccccaccaaaaccttgccatttgttgttctatttgattacaaagcttagcaggaagttggaaacaactcattgcatatgtggggattgcttgcaccacagccttaagaagtacttcttttccccctatcgaaaatagttgttccttccaagaattgagaagcttccatactcgatcagtaatgccgctaaagagttgattcttatcatgacccgagaatgatggaagtccaagatagcgctcatgacatggttggattggcataccaaggagttgctggaaaaaagtctgctctgaaggtcgtgtattgggtgagaaagagagaacacatttgtcatgattgataacttgacctgatgcacgactatacaaatcaagacaacgatgtatggcagtagcagaggatctagaggcccgacaaaacaagacactatcatctgcaaatagaagatgggaaactgatggagctgatcttgagactttcaagccttctaagttacgattatgttcttcatgttgcagcaaacgagagaagccttcagaacaaataaggaataagtaaggagagaggggatctccttgcctaatacctcgatgaggagtgatgttaccttgaaccgttccattcacaaggaaagagtatgaaacagattgaaggcatctataaatcagctgaactattgtagaaccaaaccccatttttaacatcacttgctgaataaagtgccactccaccctatcaaatgccttgctcatatctaatttcatagcagcatagcctttgttacctcgtttgcgatttttgagcgaatgtaaaacttcaaaagctacaagcacattatcagtaatgaggcgttgggagagaaaagcactttggaattctgagataaccaaaggaaggaaaggttgcagccgaagcactatagtcttggataccagtttgtatagaacgttacaaagacttataggtcggtattgggtgatcttggaaggcttcttaaccttaggtatgagggtaattaaggttttattgagtaaggtgggatcacaaccattgttaagaacatctaagacagctgaggtaacaagagatccaaccacagaccagtaatttgtatagaacataacagacatgccatctaaaccagggcttcgatcctcagacattgattttaaggcttgataaacatcattcggagtgaatggttgagacagaattacttggtcttcagctgagatggtggtaggaatggtggaaatcacagtatcaatagcaacttgatccaaaccttgtgatgagaatattgcagagaaataatcagtgatgatctgtgtaatattaatttttttagtaaattttcaagttaactgctaaaggcatcaaatgttagtttattataatttttctagctaaatcttgataagagtaacaactatgatagttataattttatctatatatcatcctctctcttgtaatctcaacaaagtatgcactttctgtaattgccattgatgatttgagccacattttttttctccagttgattcatattatttaacattttaaaatatacttttaacttaatgattgttgagtcgataaaagttgtttacttgtctaaaaatttaatgtaatgttatatagattcatattatatatcttgacttgtacaatcaattttttttattggggatcatattttgcaatttttgaaataaattgtgtatgttggtagtttttatcgatatgttttggtacactactacaatattagcctttagaggcagttttttcaaccccatttataaaaagggaagctaaagggtgtgaaaatacccgctatgttcgaaattgacatttagaggcggttttttgataaaaaccgtaggtataaaattgcattataccatttagaggcggttggaa

SEQ ID NO: 308071 - DNA, 1356 bp, Cannabis indica
ttttttgcatcataggatgcacattaattttcctaatgtgttgagcaactttatccaaagtctttgcgcaagacaacaccccaaaaacaaatgcatcacttcttcactacttttcttacaacaaacacaccaacccggggacaagcaaataaatggtcgccttttttgcatcatatgatgcacattaatttataattctttcttgctacttgcatagtccaataattttagttgtgtattatcattccaaatggcccacatgttttctgaacaaaatcaaaatatgaataatgcactttctgccaccaatccttgtgcaaagttgcctaaagccaatgacatcaagttttgtatgtagtttcattgggatatggactaaataggattaaatttttaatgaagatattgtacccaaggtcacggaataatgaaacatagacttgagtatatagcaaatacctggtgatcggggttttggaaaacataactcttaggcctttccacaaagacagctccttttgttggactcaaaagaccagccaaaatctgcacatttagtggtagagtaaacagctcaaatcaaatactcaaaaacacctaaacatcctatgtgttacgtgaaattgtatctatgaattcaacaagctctgagaatccagaaatcgtcatcatagttaggaactaaaaagaacattcttttaggatttgtaatgtacctttagaagggtcgattttccacaaccattgggaccaagaagcatccaaaattgtcccacaggaatggtaagtgaacaatccttaagaattggcacagtttgaccttgtttggtcgagatggagaagctcaactttctcccttcaatggcgagattctccgtagcattagacctgttaagaaacacacgaaaaatgaaactaacccaaattgagaggactgccaaacgaaacgataaataggaaatataaagggaaaacacaaactgttcgacgaaatggccagataaaataaatgagtaaataaatctaaaaaactcaaaaataaaaagaagaaagcaagaacctgaagagagctgtggcgtgaagaggaggtagacaattggccgaaaaagtggagagggttgagaaagccatggcagggatacttaggtaaggattaattaaagcttttaagtgcttacaattttgacagcattaccactatggtcaaaagacttcactgaaaattatcacctgcgtaaatgtgaaaaaaaaagtttaatgaacaatacacgtgttttcctttttccaaggaacataatggggggagagagagagagagagagagagagagagagagaggagagagagagagagaga

SEQ ID NO: 308072 - DNA, 1275 bp, Cannabis indica
aattaaaaaagattgtttaatttttgggtttaattattgggtttatttatttgttaacgtttaacgttaacagtctgttaagttaatcgtgtaaggctaaataaaaaaaggaatcgttaaaccaagaatcgttaaaccaagaattgccgttagatagacacttttaatatataaagatatatttattggtagcatttaagtcatcgacaccacttttactcttattgtaagaacaatttttgtttaatttgacacttaagtcatgtttgagattggatagtatagtccaaactcatgtttggaattgttttttaaaaattttgaggatttggataaatttatctcaaacttgtattttatccttgattgggacaattttaactcatgaattgagatagtcctaagtgtaatttatttattagatttaaaatatacatatttatacatatgcattatatttaataactattttagtaaaaaagaaaataatgaaattaactttattttaaaattttattaacatagtttaattcttttttatttgttattttttataatatgaattttaaattttagaataataaattataaattataatttgataaaatattaataaatttctagaattattatatttcattgaaattatttattttattaaatatttatttaataatatattttcttttaaggtgggggaaggaaagtcaactaattgtattgcatactacaatcatctttaaatcctaacaacaccaaaaaaaagcttaaaaaaaactttgctatatacaaatatctaaattctctgtaattgttaaacaattctcagtaattgtttaaactagtctatatctttttacctcattttcttaggcaggattacagaaattctactttttacatctcattaattatttattaactacaaaattaaaagctattaaaaaaattatcctctgtttagttctgtcttaccgaatatagtatagtactaatataatccagtgcagtccaattaaaaccaatcctaattaaaaccaatcctaactaatagctcagtccaatccaatttgacataccaaactaggcatttaagatatatatcttaattatatatatgtgacaattgttgtaatattagatattttgattttcttgtaacgtccccattttaagtctttattgggccttctctcacaaatttatgatttttatacatgagtacatcactcttggctgttttatggactgacgactggccctacagaccaaca

SEQ ID NO: 308073 - DNA, 1621 bp, Cannabis indica
tacttctaatgtgttggcaaaagagattggcaaatcaacattggtattagaacttttgtcagcacaaaatgaaaagtgctgacgaaaatgatttttcccagcgcgtaaatgcgctggtaaaagttagattttagccactgtaaatgtgcgctggtaagactttgatatttttgccagcgccgtttgcaaacagtagcaaactgtactgataaaagtgatatttcttgtagtgtgttactaattatgtttggatgagaatgaatgatagttattaaaaatatagttgttagagacttgattaattcatttataaacgtataatttactcaaaattaaatgggagtgctttggaacaattctgagaagaattaatcaaacttgaaaaaaatagtaattagtaactagttaattttttttttttagcatatcattgcatgcgtttcttgaacattgggagtttttctaaaggttcaaaacttctcaaaatcacccaattaatatcttaaatgtccactttatgattggtaacaaccaatgattttattgtagtcattcatatttatatgagagtgaaaattttataatggtgaccatttgtttacttgtaaaacatgaagttgaaaccactagttgcgtggttagaaccttgtgaggatatgctcattcttagacactagactgagtatatgagtcttgaaaatccttaagagtatttttagaatttccctaaaatgtccatgtaaggaaagaaataacttttaggacgaaggtccttaaaccttgatcaagcttattgtgtgttcttgagtgttcttcttctttttgttcttcccatatatataatcttgatgtaatactttatttgtatttatataattgattgtaatccttcatttttcctcttgtaatgagaaaatctataacaatattctaaaagccatttgtgatggcatagtcttcattcaaaaagacaacatgtcatggagggtcatacaaacaaaggaagttgtctatgagggaaaacatcaatcaaaatcatgaaaacaaaaatttgtggtaagatatttaagcaatttatgggtaagtatggtgaacttattttgtgttgtattattttgattaacagtgatgtattagtatgttcttatgatgagatatgataatttagacagagattttaacataataatatatataatatatgtattatattattatctatatatatcaatagataatattagagattataatatattagtatacatatgtgagagggatgtataatatgtgacatatgtgagtcatatattgtaacgtctcgaaatttacctgaataattttagatatttctgctgtatatttgtcttgaattttcaggttgcctcttctactttattggtcttccataacactttgatcactgcaattatcttgtttctcaagactttttctcttctgtctagcagttgtactggttgttcctcatatgaaagatctgactatagctccaatgcttcataactcagaatatgagatggagctgagacgtattttcgaaacatggaacacatcatgtacagctgccagcgttggaggcatagccaacctgtacgctact

SEQ ID NO: 308074 - DNA, 1209 bp, Cannabis indica
atgtgtggagcactatgagaagaggcaagctcaaggcttcatcctcttcactcgaggctccatttcgaaaccactctatcccgaaattgaactcaacagctataatctttcattcattgttttaacatatcaaacataaaaggtcaagaatacaatgtattgtatgcaaccgagaatttcattgaaatgacactaaaccattcatttctgaaaacaagaaagcatttgatctgtggagcacttatgagaagaaacaagctcatggcttcatgctcttcactcgaagctccatttcaaaaaccactcgaatttctaaagaaatctaaaatcaagaagcagttttctgacaaaaatggctgaaagaaaagtttgaacatgaatccaacataaaccaaaccaaaaccttcaaagaaatattttttcttaagaaaaatttacataacaaaaaccctttaaagaaaccaacttgtttttaatttattgaaaatctaacaaaaacccttctgagaaaagaaaacctaaaacccttccaagaaaagagttgaaaaacacaaacccttaacaaaaggattagataataatcaaaccctatataccaaaagagcattataatacaatccaaaccacaaacaacatgaatcaatgaatactaatcaaatcccatacgccaaaaatttacaaaagaaacagaaagaaaaaggaagaagcttttgacttacagatgaagatatatctgatgcaagatgaaccctcctgtggatttgaagagggaggaagaagaaaagggtttttgtaataattggggcggagtgagcgaggtggtgatgggtagagaggttcacaaaggtgttggtttagtgttatgttgatatttatagctgagaaaagtgaatgaaagggacttgtgtctactttctctactatccctatgcctattgcctatgcttatgcaataaatactataaaagcatctatttcactaactcaaaaggccacaatccaaaagattcctttggacaatagggtgttcattagaatacatccaatgtttttaagtctattcagatccgatctaattatattggatgttaaattttaccattcgatctgattcaattaatttcgtcatccaatcgatccaacatccatcggatgttggattggatcggttctatctattggatgtatatcatatatatttatttattt

SEQ ID NO: 308075 - DNA, 1682 bp, Cannabis indica
tttttactttttgaaaaattatttctttttcttcaataaaagctgtgtaatccttttagtatcagatgtgaatatgatactgttatttgtattataaaatccttaactttatttcatattcaatgccatgtttataggaattattatggcatatttataggaattattatttaacgctctaagaaaaaaagaagaagatttgctatatttatagaaattattattttagtccctctcttttttccttatgcttcaaatatataatttaagactggtaaagcacttttaactttaaagctttttaactaaggtaagtaaccgaaagtgtttttatattaaatttacaatattattgtttgtaatttctttttttatatatataattatgaataagtgagatagtggtgcaacttcatcactataaaataagaaaattgtttaaaggtattattagtgtcattactcttttcagtgtcatactgatattaatataattaagtataaatcggctcccatataatataagaaaatagattttaaaaaatatcgctaactaatagtagggcgtcacctataaaaagtgttggacattactgatacacaatagtaatgctcataaatacatatcatctatctctttcactattaaagagaattttttcagtttcaaatttttttttaaaatcatatatttttaaggtatataggattatttataattttttaaagaataaaaatgaaattcaaataattatttacttattaaaaagataatcacacaaataataaaatattttaattttattttcagcataataaaccaattaattttttaaaataagttacaataaataaaagaattttcctaaaataaatagaaaatgtagagcagatttttcctaaaataattatactgtctttaattctttaattattttcttttgaaaaaagatatttaagataataacaaaaatggctagtaattgacaacttttttttatttaatttattataaggaattaaatttgaagattgtgaaattgaatggtagaatgtattgttgagtgatacaacattatattgcattgcatggcatgtcttgaattggaagaaacccatgaaaccacctgtaaatgtctcacaacacaagcctcatcacttgtggattgcccttcaattcacacacacataaatatatatatatatatatataaatatatgtatatacacattataatattgcatatttaattcgtatcatgttcttctcatttagacccccaacttttgtatgaccccccaagtaaatcttatcatgctattcatggtttatacttctatttttattaattacttctcaagatcatacaagatttattgttttatatgatatatatggatgagttcaatgaacacaatttttaacataagtttttaacacaaattattatagacccttggattaaactcaatctaacaacttatattagaacacatataaatactaaattaattaaaaaatgattatttctttttaattctatccaaagatttcaaactcaaggattatttcttttctctttttataagaaaaaattaagaaaattttatataatagacaaaaaaattcaaaaaaaaaaattacattttacttttgaactttttatttataaaatattttt

SEQ ID NO: 308076 - DNA, 2497 bp, Cannabis indica
attaaacacagaaaccctataagctatctaagccatacaagtactctcgtcctatatcaaaattcagttctatctcactatagcataattgacactcacttcttagatctcgcatcaaaatcatagacagttaattggtgatcaggcaattaaaagtaattaagcacgaatgaaatagaatacatataaagtgagggaaaataaatcatattaaaaccataaaacaatgtcaacaatatcaatctaaaccctaatcaagtgtttagctaatcatgttcatagaagcaaaatcacacttgttaactaaagaaaagagaagaaaatagagaagaaaagaatgctgagaaccctatgaagaatgcctccagtattgcagttgatctttgaaattcatactccgtcttattctctttatttcctcccaaattgcttgacaaaatcaactgaagttcactccttatatagccattgaggtactaaaatgatagaaaaacgtacgtgctaaaaatcctattctgcttaggattagaaaacctattctgcttacgattagaaggggcagtgagttttctgctgcatcgactgatattattttggcgagtggtgatggacacctgttgttgtatttttgtacaaggacaacatgcattggcacaataggtattgagtcattgacagtaacacaggatagaccagaggtaaattgagtattagagaatgtgtcatgctaagtgggaaataatgaagaaaaagagaattgaggggcggtagaaaaggatacttgattgtgtgctgctgaggaagagactgtggcagctttatgaggataaaagtctttattgaacaccacattaggggtggacaacatccaatcgaatccaattgaaccaaaccgatccaatccaatctaattacaaaaaattggatatccaattacaattgaattggattgggttctaaaagttggattctaattggattggattggttattggaggtcaatctcaaaatccaactaaaaactgatccaatctaattacatttatatatgttaaaaaattatttatatttaataacaatatattaaaaaatataatatatattaattatatttttattggattttcttttgtgtttaatttgtaatatttgattgttttgtgtatttattttcatgatattttgttctattttttttatcaagaatgaacaatcttcattaatcatattttgttctattttattacttagaaatttattgttttaattatttgaaacctttagttgcattacattgtaacgatggaatgtttatggagtattaaacttatgtaatgggtgatatttaatttttacgtattttcatcatattttatgttaatattaaaatttaggtgtgtaattggatatccaattaaaaaaccgatccaatctaattagtaattggattggattttgaggtcttattggattggatcgaatgatgattttccaaatctaattacaaattggattggatcgaatgaggagaaaaaaattggattggatcagacgcccacccctacaccacattgcatgcaatatatatattctaccttcagaattttcacataggtatcctttatgatgaggagaataacctagaaaaatgtattgctgtgttttgaagtctagtttgtgcttgttgtatggtctgaggtgtggaaatcaagcatatccgaatggattaaggatgttgtattcaggcttgctgtgaaacagtacttcatagggagtggaaaagttaagaacccttggaggaattctattaatagtaaagacaacacaacaaaatgcatgccaccagtaggacaagtcaagaccagaattagccaatagggttaggccattttcattgatgtggcaatatttttgttaagcactgccatttttctcatgagcctgaggacaagggctttaaaagtgaataccttgatcaagtaagaaccttttaaatggcctatactcaccaccccaatctgcctggacaaccttaatgggaagattaaattgtttgtcaactaaagctttccatttgataaaaacttcaaagtcttgacccttaagagtttgtgggaaaatccatgtatacctactataatcatccaaaaaatgtacataatacttatatccttcttttgaaagagcatgagatggtccccacaaatcaatatggatcaaagcaagtggttgagatgcacgggtattggacaagggaaaaggaagagaatgactctttccttgttggcaagcattacaaaaatggatatcttttaaagtgctaatgtggggaaggtgtggtagtaattcactcatgatttgatcattgagatgaccaagtttgtgttaggctttatgccctaaataaaactctatttcaatctaatctctatcatttaaatatcaataaagagacagaagtattttcatcacttattgtgtcatttggttcatgtta

SEQ ID NO: 308077 - DNA, 1288 bp, Cannabis indica
cccaccctctggccggccctgatcaagagccaatttagcaagattatgagtataatatgattgcataaatatcttgaagcaccaaaaactaaatctagcatataacaaaattcttgtttacaaagttatactacaaaattttttacttttagtcacaataaaatttgtgacaaaaagtaaaaaaattatgactaattataaaacatcatttttatgttgtgattaaaaaatccgtgactaaaggtattagttacaaaaattacaatttgttgtgaataaatatatttttagtcacaatacttgttgtaattaaaactaaattagtgacaatttgtaactaaatattatgttttagttataaataatattttgttgtgattaaaagtcacatttaatcacaaaaattatcactaaaaataactattttttatagtgtaagagaaccacacgttaagagagacgataactatagagaataggttctcatcagtattacttatcattatcttttagttaacgatttatattttactgaaaataattagattacaatacttgtttctatggacaatttaacaataaatttctgattaattactctacttcttcttaaaagtcaaagttttaaagcactaaccaatcctataacttttttgaatcgttaattaattatctcacaaattttctagttactgaaaacgttaattatttgcccatttgcataacttttccttttgaaaggtatttatttacgtaacctttgatagttgttaatatttgtattatataagatcattgtattgctttaacgagatattgatttctcatcttagcatttattaattcataatattttaacatgtataacattgttaaaattacagctctatatataagatagctagttgataatatttattaataataataatagtaagtagtattattcatgccacatgatcatgatatggcagcagttgtagatgtctcttttgatttaggtggatattacattaataatatataataaacttttaaaacattgacattaattatatatagtactacatgaaagaatacaaaaaaacaaattaatttaatggggaaaaaaataaaataatgcatgtgtcatgttattaccatactttatagttctaaagacgtgcaattctataagtctatatgtaaatgtaaaatattttatttgatactatattttatttttcaaactatatatattttttttatacgtaaaaagttaatactataattgtaacgtccccgcttc

SEQ ID NO: 308078 - DNA, 2034 bp, Cannabis indica
ttttttgttttttttttttttttttttgtacgaatagattagatttaagagttcaaataaaatttaagagttcatcaaaaacgcctgcagcagtcgttagtatgagtatttaattttataaaaattatacggaggctttcccgtttcttttccaaaattggggtacaatcaaacaatcttggatgatcttttcggtactcctacacaaattaacgaattaaaagaaaattgtgttcaatttagcgtctttcttgttgaagcttccataacatccgctggttccaaagtctctctttgttccggacaacattccgtcaaaaagagataccatggccaacgacgctacgcataaaattttacaagttggaagaagattgctcttttcatgtatgatatgaagtttttgacttttttttttaattgattcattaattatatagcatttactgaattactaaaattgccgaaagatcaatagcagtaatattacatttggaaaagatgatgtcatgattatgacttgttttaaaaattatgtccatttgtttaataatactaaaatttttgataagacatgtttgataatgctaggtggtaattttttcatctaaagtttattaattaagacatttgctgacttcactactttcctttataaattgcaccgcttttccacgtggaaaaaggttctaaacaagattcagcccacaagaatttggacgcttattgtgagaagttttgtcttagaagcttaagagagattgaaaagatccagcaattggtggttaggaattgagcgacaaaagcaacaatggtaatctacaacgtaaaatataagaataaaatataattgaagatatgatgttcgcaacgttatatggctcggaaaggctggtaggtttttaggtaagaatattgatttttgctagctaactgcgagtaactgtcttgttaattattattattattatcaataatattaatattataaaagataataaccagagcatagagagaataccttcatgatatactccaccacaagacctgtctcctggcccccaagagctaacgactggagtgaaagaaataacgtcactataaacacaactgtcaaagaaaacgcatctaataataagttagttgaaattcaaaaagtaccttcatgaataaatcaagatcttcatcaggttttattcctgcaaccttttcccttcttgcaagttccagtaacatatctgtatgtaacaaagtattagtaatcgttatatgaatcaaagttaacaccaagtcataaatcatatatttccaagaatcgttctttacttagtaacttaccatatttaaatccaacaccttgacaacgccctgctaactcaagagtttccctgactgtcatctccgctacatgccaatcctgttggcttacatacgcagatgtcctttgaggaacaaactcatgaaaatcatgcccgttatatgtaatgcttcctgacatcttcaaaaacacaaaaagcaatagaaagaaatgaaataaagaaaagccagcaaaaaagcattataataatgcacaaatgtaacccaagtacctgcaaacctggtccaagacgcccagcaagagcaagcataagcgacgtctttccagaacttggaggacccaaaagcagggtcaatctagaattagaagaagagttagccacacaaaatcaatggagtgactttaaatgaaattcaacaattaccttgaaggtcttatgatcccatttatgttgtctaagatggtcaatttgctcctttgtcctctgtatatccggagttgtcttaacaaactctgtatggtattcacacaatgtaatgaagatttcatcaaaatcttcatagaaattgcaataaattgaaattttgagccagaattgaaggaaataattcaacctccgccatatttgatacgaagttaggaatggttggaagcgctctgcttcccacgtggacaaatgattcgaccttcaaattctgatatcgaacctcaacctt

SEQ ID NO: 308079 - DNA, 2146 bp, Cannabis indica
agtatcgtggttggatagtagccatactgactaaaatgaatagatatgatagatttttctttctttcacattagattaattttgaattttttctgacagttattttaaggataacgtccattaaacttgctctaataacaaatttaataatttaagtatttatgttgaaaaattaatgaaaacaaacccaataatttaagtaatttgttaatttttgacttggaagtgtatgttattcatttttaaatcacaatgttttatatctaacttaaacttttaatcacaatttattgatctaactcattagtattacaacatccacaatacattgttctctgtgattttatcgttttcccaatattttgttgtgtcatacttgatgccgttttcctatgattttgtcgttttcatacaatgtcgtttcacttaaaatttgtcgtttattcagaaaatgtcgttttcaaacataaataaatattttatcttttttctgacctttgttgtttttttttcgtgtgcaattttatagttgttgtcgttttcctcatcaattttgtcgttagcactttattatataaaatcagaaacaatatattacaaattatttatttatttataattagatttattgagattatatattcccattaagcaaaatagagattatatttttttttttaagataattagaatttttattctgtaaattatgatatggactaaattatgtattttcgaacttttcaagcttttaaaaattctcctcacattattgaaataattagattaaaagacttttgtttaattttattaaattttactaatgcgatgattgtctatatactaaattgtactttctgaactttgatatctactaaattgtatctctcgaactttaacgtgtaccatatcgtgtctcttgaactttcttaaatctaacaatctaaatagttagagaaaaaaattttaacggtttgaaaagttcaaaaaaaatataatttaatacatatcaaagttcgagagagaaaaatcttaattaactattctaaaaaccattattaattttatagattttttttattgactcattaaatattttttaataatataacttgattctaatttctttttttaagatctaaaaataataacatcattattgaatactgacttatatatattatatatatttgtttatagtaatactagaaagaaacaccattaaaaatcaaacatggaacctcactggtaaaacaaatctcactcaaatatttactgaacctccttgaatggttgatgaaggtgatcattcaagtaaagctcagccagggcagtatgcaatgcagctccaattggaagaacatcttcatcaagaaagaaaaaaggcgagtggggtgagtgtaccgaacccacttcctcatttctgattccaatgctaagcatggttcccgggattgattcttggtagaaggcgaaatcctcacccgccatcacttccttgtcatccttcacattctcggaaccaagcaaaaggcttccaactctcttgacatgctcgtgtagccgttcatcgtttacaacagcaggtaacaatggatgttcttcttctctagtgctgacaaacgcggtgcatctatgcaccgcagcctgcccttcgataacctacaagagcgaaaaacggaacaaatgtatgagaacaacaactcttcagactgaccatgatttcatagacatgcttggccagcagatgcaaattttggtttcgaaaatgagtaaactcgctcgcctttgttattaattcaaaaccaatttcgacaatgagttgagtaaacgcagggtcggcccggagtaataatgggcccaagaaatttgttgagtgtgtgtttatctgaagtaaaatgtgagtattattggaccttttttttacaaaaattttcaaaaatatcattttttttcaatgcaaaaaatatactacataaaaatttgagattatttttacaaaaaacacaaaaaatataaaatacagtttacggaatttaaacattttacgattgtttgatttatttacagattatatggtcatttatgttgtactcttgttaatttattgttgatttttgttacttgtatgttatttttgttgttg

SEQ ID NO: 308080 - DNA, 1535 bp, Cannabis indica
  modified_base (87)..(87): a, c, t, g, unknown or other
gtcaaagttcaaacaacatactaaatcaaagatctaaaacacatgcagcaagatctatggtgaagaagttgaattccaatggactanaatgacagagaaaaaaaagattcgaaataggtgaaaactcctcccttcacaccatgaaatggtgaaaactttctcaacaaaataatcaaaagatgtatcaacaaagagagttaaagtttttcctgtatctcatctattctcctggggcagagacgccttgcttcagtcgttctttcttcatcttcttcttagagatgggtttcttctttttcggaggaagattcttctgagcgtaagtgtagagtatgaaatttcctatcaggaacatcagtagtagtccgaaaacaacaatcaacactatcaatcctccattaagccctttgggtttggcatccttttatcaattatccaaacaaatgacatacaaggaatccatcagttcaacatgaaatccactgaatcaaaataaataaatgaacagaatttaaaccattactatgacaatcaacattggtcatgtcaaagtgaaaacacatgagttaaacgtatctcttattaagacatgttttattaaatattgttaaatacaattagtaatttcatatgcagaagatgccaatatcagtgagttaatgcagaatcaacattgaaagatagagctcttttgtaattgaaagatagagctcttcctctaattatttcgaataaaaagcagcacaattgaatagaaactcagcatgggaatttattaaattaaattccttggtgaatttaaaagtaattaagaaaattcaaaagaaaaagtttgtcttttcatgaaaagtatggtaccaatggaaagttgagcacattttgggtgccaaaacattagatcgatcataccatcaattcaacaaaaattgaaaacaaaacacagcaccatgaatcattaggttttaaaaacccaccaaataaaacaaattggcgagattccgagagccataacgagttcaattttccaaaaagtcacttattttcaaggaaaatgaaatctttctcgaacgatccaatgaccaaacatgcaaatgagcccagataacagtatataaacatcacaactaacgaagcagacccaaaaagacaatcccaaaccactatcttaaacaaaaatgaagaataaattatcaaaacaagatatcacatcaaatcatcaaatagatcttaaaaattataaatcaaaatacaacaaaaacaaaatttacaagcagatcttgaaaactttggcagaaaataaatgagaggagaaagagagagcgtaccacaccagagtcgtccatggccgagactcaactcaatccagaattgagggaagaaaattccagaaacggagcagaaggagaggagagtaacgaaataaataaaaatggaagggaaatggtttgagctctgtcaacgatgagttcgtgtacaacttaagcttattttggttttggattgggctttttcattttaccgaaattgggcttttt

SEQ ID NO: 308081 - DNA, 855 bp, Cannabis indica
aaataattacataatgctatataagcaaatacaaaaagtacacatataatagttgcacatatacacacataccattaagaataatttttctactaaaaataggggactacctctttacagctattctacatgtaattaaattaacaaaatcttattaaacaaaactaagcaataaataagaaggtatcaactattcaaccacacataggccaaaactgtttggcagaaacatgttataggtctaaatagaagatcaaattcacaaaatagtatacatatatattctttttgctaaccaatattttagaatctaccaaaataatgaacacacatttgactaaaaacccgtcacccttgtattatatatataataacaggtgatacagatctattacccttctgaattactaagagccatacatataattgtactttacctaagaaactcatatagtacatataatgaaaacaaataaatagagagctggaggtctagttttggatgagatgagataatatcaaaaagtcattaatatagtcttagcatcataatagtagaaagatgagagaaataattgcaagaccaaatacataacagtataataaaaatttgagaaatattttagttcatcaagaagtagtaaaaattatgtgaaagataaacatgataaacaaaataacatgaacaaagaaaataatttatgtaaattgtggaagaataagtcctccactacaagtccaaatcaatttgaaaactacaagcagtgacgaagccagaaatttagttaagtgagggcttgaataaatattaagtcaaaactaataaaaataatgataaatgtatctttcaaattt

SEQ ID NO: 308082 - DNA, 1350 bp, Cannabis indica
tttattttcagtctgtttaatataaaagtttaaattctgtgctattttaattagtaatcccggttaggggattaggattttataagtattatgggtagcgtgcctaattatttagggcgttacaaaatgtctaactcagagtcattgactttgtttctcacttcttgagccttcaagagagattaaacttaagcaatagagtaagcatccttttaagtttatagcgatgtgatgaacatagagtaatctcgagtgaggccattaaagatggcttcgatatgatcttgagtagagagaacatggttgatcgaggctaaagaatctatgagatgcttaatcttaagaaggtagtcattgagattaccatcgagttttattttgcgaagttgagtgcaaaactggctaaatttggcacgattttgagcagagtagaattcttcaagactggaccaaatctgagcagcagtattgcatccaacatttgcattggatcttctctgccgttgaagaaagaagctagaaaaccaaaaggtggtccttgatgtcatactcaatgaattcctcatagatgtaattcaaagttcattttcagaagtgaaaattttggttgagcagtagttggatcaagaagttttacaagacactggcttttgatagctacatagacttgatgggactacaaaagaagttattttcatcgagttttacaaataacgaatgattgaaagaaagattgtttatttttggtaacaaattggaggttggaactctgaagattgagttggaatcggccatggagaaacgataagatcgattcaggtatttgataccatgttaaagatgaaaagagagagaaagaatgatagagtaaatagactaagtgtgttgtgttgattatggttaaaatgtacattgatgtataagttagcatttatacataaaattaagagacaagatttagttacatgatatagaaagttagttagagtggacaactaactataaccgaaaataactaactaccaacctacaagtattgatcagtacatattcaacaaactctacaagtatagctaatatttattcatttaaatttgtatttaactataaaaaatagaaaatttacatttggagcctcttttttgatctaatttccctttttaccgtgatcttttatatttgttaagtttactgttttttcttaccgcaattaatttaattgttattttttgtagccacgcgttttgcaggtgacgtcatcccatgtcttgtcactcgttgtccatatgcccacgtcttctacctcacgcgcgtcagggtatcacgttttttgatacttttgataattgc

SEQ ID NO: 308083 - DNA, 1184 bp, Cannabis indica
tgattactaatcagattgtaaagagttttatttagggcataaaacccaacagttaggatttctttgaatggattttgaattccttaagcttgtgattggtattgttggtagtcttaggcttgataattataagtgtgaagacgagaaaattcaaagtaaaaggaaaaaagatgaaaagtggcattcagatgtatttatagtcgcaaatacaatccgaatggattccaaatccacggataaaataaaccttttaaaagcacaaagcagatctaacaattgaaagatttcatccagcatttaatgcatcacttagaatcgatgcaaaagtgcatggtgttatgctcctcaaagcttgtgcgtaagtaaaaatgcttggattgccacacacacctcatcaattgaacaagatatacctcgcaaaccaatgaaacaatgccacgtcagatcctaaaaacaaaataaataaaattatcttcgatagttaatttcgtttgaaaaactgtaaatgtttcacttttagcctccacttgtccgcttatacagatcgaagcaagctttcacaatccacaattttttaaaagcttgggggtaaatattatccgcgttttaggtaagggacacgtggattccaagtcagcatctaaagccaaccagtgggcccacaaaagagaacttgggtcaagtacaagttcagtaagaacttctgagaaggtatattcgttcctcgctcaaatgagctttcgccaaggacaacccgtacccgaaattagtctcggtaccgcatttccagaaggccagacagtgtgttcctggaagcctagtacaacttctctttttattaaatcgcacagaataaggaaatttccttccacgaacctcaaccagaatgtcatatcaagctaaagggaaaactacttaaactcaaaataaaagatacaacatccaataaataatatcacacgagaatatgttatcattatagtaaaataaaaagggattgttgtaagtggcattactttttaagggtaaaaaagacaaacaactgtagacttaatattaatatatgtcaaggtgaatagttaggtgaacagttctcacttccacatctttatacatatatataatacggaaattaccacatatacttttttttaacttttctttcaaatttacggttttagttt

SEQ ID NO: 308084 - DNA, 1793 bp, Cannabis indica
ttcctcctatttcagttgacaataacagaaaacggtgtaagagaaaacttcgttcatcaaacattaaggggaaaagaatcaaacttatccgcagaagaccagggttgtaccttacacctatcaacactaacaaactccacatgtttgcctcctgatttactagaacttgacaatttcggtactccaacaagttccagaacgtcagccaatttggcacctccccaaacagctgacaggaattaaagaatgaaaaagggtgaaaatttatcagctaaaggatcttctagctcaagcgatttcattaaaaactgatttagaacaatacaagcaagagagatggtttaaaactaaaaggaaatgttttgcatttaacattctagagtagttatatttaagacacagcataaagacataagaggcacaaacacttgacaattacatctcatctttaattattaattatgcaaaaaatatatataatctttttttattatttttaatataaacttatgaggttttaaatcttggaccactcaagcacccacctactttgagcttaccccaaactatgtgttgacatccctaaaatatctgatacataaactttagaagaaaaatggaaaacacataatactatatagacataggccataggcaattattaagtgatatttgttcactctagtatttatcacccctttttgcaattttgacagttatcaaaaaccattccaaggttttagccgagctttccttcacacccggaattaatagcaaaacactacattcagaaagttaaaaatggattcatagtgaagtaacaaaccatttcctatagcagacacatcccagccaactcccttcactgttctagttttgctcatagctgttcttctattacctgcacactatgcaatacaatccgaaacagaattatcggtctaactgcagattgagaaacaatctaagctggggtaaatggcaaaataaaaacaacatagccgataaaactaaatgtaaagtagaaacaaatcaaaacctgcaatgtagcagtgacatcatacttgggaagcatcctggtacaaagattaaagtgtaaaacaacattgttctatgcaaattcataattttcatcaataacaagagggtttttttttcaccaattacctgatatctttcatagacagcattttggggttttctaccaaaccagatactgaaacagaatatctgcttaaacaaacatgataccaaaatcaggtatatgaacaggcatcaattcaatttgaaaataaaaagaaaataaagattgaacctttcaatgtcatcaacaacaggaattgggccatgatttctcttgtagaacaaatcaacgggagtgacataggatcgaaacaaagccgaacgaggtggctctgcattgaaaggctcctgtacccaagaaaagaaaaggagtaagcttttgttcagctccaaatcgaataacttcattctttttggttctaattcagagttcatctcacaccaagcataccaatttcactttcatccaattacccagaatcgcagatagtcatataaacacacataatgaaatcgggaaaagacttgaccttggaattgatttggaggcacggatgtcgtggtggctctttcgaataatcggatggacctgtaacgcccggcatttttcgaccgctcagtctgcgcagagagaaagagagtaagagagagagaggtggtggtggtggtagtactaggaataacagaaaaaaaaaaaaaaaccaactaat

SEQ ID NO: 308085 - DNA, 874 bp, Cannabis indica
gttataccataccacaaaataactcaaactgtatcatttattcatttatatatagatagatatacatacatatcgctgaggaaaatagtgatattgaatgaagagaagagaagagtagaatatatgttaatatgtatatgctaatatgcatgttcctttccctttcactttctatgaattaaatttattccctcaagtgtcgggaggaccatatgatcatcaccaagcacgactatatacagactcatcatcatcctcatccatttttagtacggtacgtatgatttaatttcagcacattcatatgtatcatataacactacatatttatatatttctatataaatatatatagctttgtcactcttttaggaatcttcccttccagtatattcatttgcatttatagttttatattatattgtggctataatagcacatgaaccaataatgcattaccatgtaattgggcatatatccaatattatatgttctcatcaaatcatttgttatgtgtatataatatgaccccaaataactaccggtggtccaatcaaaatgtgatttagttattatacatgattttactatttaagttgaattatattttgtatttttcttttttgaaaaaatataagaaaaatatattttgtattcatataagaaattattgttagttttaaaaattaataatatttaaaagaactatatatttttaatttttttttacgtataataaactgctattaagtcaattagttctaattagtttttttttttttttttttttctagtaacgaaacagaatgaacatcaagaaaaataacagtaaacttaaagagagttcaactaaatcaaaagaaaacttgggttg

SEQ ID NO: 308086 - DNA, 1593 bp, Cannabis indica
aaaaaaaaaaaaaactactacttcattatattctttagattgaaataaattttatctaatactgagaaaggtgggtttgttcgtcctcaatttttaatgaataatatttaaaaagactttagaggattgttttttttaccaaatatgggatttgatgggcaaagtttacctagtttaataagcgtggtgattcatcatttgttcaagaacaacttgatcactttgtatgtattaactcttggatgacttgttttttggattcgcatgttacgcatcttcctttcacgggttctggtcacataccaattgttctctctgcttcggctagtgattggtgggaaaggggtgtgatttggaaataagaagaaattgtgcatccgtattcaagcagcgattgtggaggccacatgcaaaacatacacttaaaagtacacaatgtcttgcaggcaaaatattcccatgtctctagccaattcctagcattacttcatagcccactccccccaaccccaataaaaaattaaacataaaaggtgatagattgaagtacgtaattatgcaaattaattttgaaagaaaatacacatataagatgctcatgtcctatgcttttcgtatttataacaaacctttttcggaaggatctctttgtgagctttaaacgagagaataacattccaaactaaagcaataaagttggcagcaaggacctgaaacatgttaatgttaattgaaatactttaaattagaacatattaatttaagataaaacatgaaattgaacactacaaaatgttctccttcaatgagtactatatatttgcaagtatacaaaaggttatgaaatgtccacttttcatttttcatagtctgaacataaaacatgaatgtaagagaatcaaaaattcaaaaatggatgaataggaaatggataactcaaacattcataatgaacaatgtcaccattcgaagaggcagagaaccttctgtaagcatcacataaagatttcacaactcaatttgcataatttttttttagaagagaatttgttcatgttaaattaacatcccacatatataaaaataaatatatactggatctaataagcaaatacataccaagtaaatattaatatacaattaataactcttgaataaagagttatttgtcatgttaagcttaaaagtaaacatgaataaaagctggtggtaagaattgtaggggcattttgtgctatttcaggattaaaagtaaacatgaataaaagccaagtgctggggatctcaatgcaggagagtggttgctttgtgcgctagtcagattggttgtgaagtggggagttggcccatgtcatatcttggaatgcctttgggtggctcgcccgggaaaaagttgttttgggcacctgtattggaaaaatttgctaagaagcttgatgggtggaaagcctcatttttatccaggggtggtagactcaccctggttcaattggtactatcatctcttcctatttactacctttctatgtttaaagctccaaaagcggttttattctcgttagaaaaaatgatgagagattttttatgggaagg

SEQ ID NO: 308087 - DNA, 1469 bp, Cannabis indica
aactcttatgtgtttattttattgtttagaattcatattaggatgataatcaaacatacttggtagtaaatctagatcctggtaaaaaatttccaacagtggctcctctaactgatgttttgtacgtaaaagggctcaaggctaatctcatcagcattggtcaactgtgtgacagcaacttctctataagtttctctaaaactcagtgtttagtttcaactaatatttgtgtggtcttaacaggaaataggactggagatcagtgctatgatgtatgcaacacaattgtgtgcaattgaactttcccggataaacctgacttgtggaactataggttggggtacctgaattacatagacctacaaaggctaataaagcttcaattagtaaaaggaattccagagatgaaagtatccagggataggatttgtggaccatgtcagttaggaaaaaagatcaaggtacctcaccctcaaatcaacagccttctaacctctcgagtattggaactaatgcatgaggacttgatgggacccatgcaaaatgaaagtttgagtgggaagagacatgtaatggtcttagttgatgattattcacagtacacttggattgagtttctaaaagaaaagtctaaaacctttggactattctcagctctaacactgagacttcaaactcaaaaagattctaaaattggaaaagtatttcggctaaggagtgatcatgggaaggaattcaaaaactatatattttttgagttctgcaatggaatgggaatacatcatgagttttctgcgccaaaaaccctaagcaaaatggagtggtttagagaaaaaaaatgaaactctgcaagagatggctcgagttatgctgcaagccaaggacatgtctaagtgtttctaggatgaagcagtcaatactacttgctacatttgcaatcgagttcatctttgtattgggactttgcagacaacatatgagttatggaaagggagaccaccaaatgtaagtcatatgtacatttttgggtgcacttgctatgttcttaatgatcgagatcacttagggaagttggatcttcaaagtggtgaggggatatttcttgggtactctatcaacagtcgagcttacagggctttcaaaagaataactcgctcagtaacagaatcagtgaacgtaaagtttgatgacttggaaataatggaagaagtgattgctgatgatgatgccccagttttgtctggacctggaccaatcattactaaacctactaaagtatatcctgacactcctacttggtctctcaacattgaaaaagcatcttcaaatgagatagaagtagaaactagtggttagaatggtgaacttgaaatcagtagtgctatgcccaaagaaacacaacacgtcaaactatacaacaatggaccaccctcctgggtccaaaaagctcatcctcaggcagttgtcat

SEQ ID NO: 308088 - DNA, 762 bp, Cannabis indica
atatggctctgataccatgttgataatcatggggttccatctcaaaaccaattggtgatgagtggagtagctcatgttcttatatatggctcaatatttttacattatttgatccatgtgggacaatattatccaataaagaccaatcccaaagaagccaaaaaaacatggttattaaacttcagacgcattcacacaattagattcaaaaagaatattctgaaaaaccaacatgcgacattgaattattgtatttttcaaagctaaaacttctgtcattttaagagaaaaaccacccacgataaatcaaacagcaaaaaccataacaaaacttgaaaaatcacaaaccaccattcccaaacgacatttacaatgtaaacaacatatatataactagtcatctctctactaaaaagtagaaaattataggatgtagagagtaaaatttcaataaataaaaatatgaaaacaaactaacaaaacaatataaactatataataatcaagaataagtactataatataaacttattgtaaagcaaaagcaataaaagatggaataattaagagtacaatacaaaaggacaacaaaatcttttttacactaaaatcagattttatgagaaatggtagatgcaccaaaatatgacacaataatgtcatgtttaaaagccaaaaaaaattaataaaaattattccactattttttttattgattttggtctaatttttatttataatttaataacactattcccctat

SEQ ID NO: 308089 - DNA, 1361 bp, Cannabis indica
tttattattttttattccatattataatcctaaccttaggtgaaatagtatacaaggaaaaggatggtctcattatccaataaccaaaactcatataacctagtttatattctgtcagataattaagatcttgagacctccttcttccttctttaattttccaaatctccttcattgttttacatttagtttcgagcctatagtgagtgagtgcatgcccggccataataagtttagtactcaatcgtagtgtgtaagattgcgaagaatccaacaacttgaaggagaattaggctcagatcttgataatactctgcaaaaaaaaaggagcaagggttagagatctgagtgggaggcgtcatattctgttgcaatcaatgtaagattttttatcattcagttaaccatccgctggtatgtagctttggcatttttaagccaaaatggcatcaccttgtagtaataaatgcctttatcagtttggaaattagtatgttccgcatccgcaacgtgcattttaatttgattatacttgtagtaggcacccatgaagctgagcaacttgttgtcgacgtggcatctaccatctgatctatccatagaaatggaaaataatcttttgggcatgccttgtttaggttggtaaagtcaatgcacattctccatgagccattgggttttgagaccaatactgggttcgcgagccacaccggatacaatgcttccctgaggaaatcgttggcagtcaacttatgtacttctgtcttcacagcttcagcccttaccgtatctaagggtctccttttcagtcgaacggatgttgcatcatctcgaatgttcaaagcatggtagatggtgttgcgattaatccatgtcatgtcataatggattgatgccaacacatcttggttctttctgaccatgtctatgatattctcgattatggtcggaggtaggttccttcccactctaatagtcttcaagggatcttcgtcactgatgctcatctcctctacctcttccaatggttctagattcctctcaatcccatcactggcatccaattcgtcttgaaaatcctccttgtcagctttagtgtccatcagatcttccattctgggggacgtaagcatctcttcgtggaccacgaacactatccgtgttgaaacattgtagcagttcctcgcactcttttgattgcctttgattataccaacacatccattgttacgtggaaacttcatgcacaaattcctaatggaggttactgttgggttttatgccctaaataaaactcatttcaatataatcagatttaattattaatatagatcagaaataacatttaatgttgcatggtt

SEQ ID NO: 308090 - DNA, 1555 bp, Cannabis indica
atatatatatatatattttgattgcaattgatatatttgaaatttaaatatttaagaaaaaaaaactaacttaatcctacatttgactaggaaataatataacaaatttattgaataaaacaaaagaggaaataaatttgagaaattagtggaatcagttcaacaccccttgtcaagttagagagggaattgaaatgtcaagaacacccaacttgcgaagtagtcgaagatgagtgtcgcctccaagagatttggtaaagatatctaccagttggtctctagaacaaatatatgatggagtaaggagcccttgttgtattttttctcgaacaaagtgacagtcaatctaaatatgtttagtgcgttcgtaaaaaattggattttcagcaatatgaattgtagcttggctatcacaaggactgtaatgggttgagaatgagtaataccaaggtctgtaagaaggtatttcaaccattgcaattcagattaaagtgcaacaagcgagcgatatttcgtttctgcagacgaacgagaaacaattggttgtttctcggtattccaagaaacaggattagaacctaacaaggtaaaataactagtggtggatcgacgtattgtaggacaactagcccagtcagaatcaacatatccaacaagattaagggagcttgatgcagaaagaataatcctttaccaacagtacctttaagataacgaagaactctatttgcagcatcaaggtgactggaataaggagattgcataaattgactaagtgtgttgactacatattggatgtctggtcgggtgacagtgagatataaaagacgacccaccagttgacgataaattgtcggatcagaaagtggagcaccaattgctggttgcaagcaaagatgttgttccatagggaaatctaatggttttgaacttgtcataccagaattagataaaatgtcaatggtatattttctttgatatagaaaaataccttccttagatcgtgacacttcaatacctaaaaaatatttaagagtgccaagatcttcaataaaaaaagattgagccaaaaaattttaaatttagaaatggcagcatcgttgttgccagtgttaataatatcatcaacatagacaagcacaaaaattgatgtgggaccgtgaatatatgtgaaaagactatagtctgaaatggattgtttaaaaccatgactaatgagtgtgtttgagaatttagagaaccactgttgagatgcttgttttaaaccaaaatagatttatttaatttacaagcatctcgacagtgaatatatttggactatatgggtaaccaatatgtagtctttttaaacaatccattatggacgcgtcaagagcaatcggggacaaagttacaccttgccgatgacgaaatcagcatgaacgtcggcgaccatgttctgagccgttctaaggtatttttctcaaatatttttgtagatttcgattccttattttattcaaaggtgcttggtgaagtttcataattttttgaatttatttagaattattgtgaa

SEQ ID NO: 308091 - DNA, 2977 bp, Cannabis indica
tgtgaggaaatttgaaccagaattcaaatcctcaaatctttgtctgaatatcttaatgtaagattttaatacctttacacttaacattcttagattgaaagatttatgtaacatgttgacttattcttgtattgtcaagtaagtcatgtcaacaccattcatgctttctaaagacaacattgaactacagtttgctaaacaaaaccaattttacatacataagttactgaagcaattagcaaaaacattagaggtcacaaattttttctaatgtttctggtcatcattttcttttggtaactatgaagaaaacatcaaatgagaataaaaaagttggaagaattttcataaattttactatttgccttgttcaaagtgcttttaacattttcatttgtttcattttcaggaagaaaatgtgaataattgccaaatcaatggtattgattgtattactttcgaaaagggaaacttaaaaaattatacaatcagcaatacaaccataaaattaacttaaaaatcttcagcttagctaacatcaaaatacaacaaaaaatctacatagttcagaaaacaaaatgcaaaattcctgggaataactctatgactctatttcttctcttccttctcggcctcggcagccctcttcaaccgagcaccaagatggcgtgcgtttgtgcgctccaacctgagcttgttgtaagccttgaatgacttcatgtcatcggtaatcttaacaagttcaaatgctggcttctctcgagcaataggcaagaactcgccttggacctgagtagcattggccaactcctctggggcagaatctccagcctaaaagacaacgagtaaagatgagataacataattataaaaacggtcactggtacagcccaatgaatacaaaaaaagactgtaactttaccttaaacttgcgagcacgccttgggaagacgacaagtttagccttgtaagtcttgagcctctgaacattagattggagaccctccaaagatctgttcctgcggcggtgatcaaccgatataccaatggtaggtgcaagcttcttggggatcccagcagcctggaagacaacacaaaaagtaccaaacaaatatacatcaggaacttgtgatcatagcacctgaatatggacacatcaacactgtcctgacctctcagtatcttgcttaaaatatgatcagaaacttatagagacagagagaatgatccatattgtaaaatgtttcataattacacacaaggcacacaacattgaaatccatcaagccatgcaaaacacattcaaatcattaagtaaaaatcaaaacaattatcatttccatcctcaagatattttgcatatgatcagacacatatcaagacacacaagacacattttccatatttgcacaacttcaaattcacagaacaatggaaagccattacagaaagtaattgttgatatgaaaatatcacaatcccaaaactactcaccttgagttcttccaatgagaaacccctgccagcccgaaccttcatgttgtacttcaaagtctgtccatgaacaacagggcgaaggggtccagcagtaggcctggggaaaatcttcacagccttcttctggcgagctgatgataattttataataaacacaaacaaatgtatcaaataacataagtcctaaatttatagacccaagtcataaatgctgactcaccgatccttcttctggtcttccttgcaggttggttgaaccatgtcttaacatagttctgccaatgcttcttgaaatggccattagggataacgttgttgtgcttcaccatggcttaccttaactgcaaaacaacccaacccaatgagtcaaaaatggaacctaaacaatttcaattcatcgattgctcattatcagaattcatttcatatgtattttcacaactttaaatttgagtcctttgccaaactaaccattatgaacatttttattggtaaaataatcttgtatggtggcagaaacaattatgaagtatactgtgtaaccatttacacagcattgagtagattaagtaaggttgttttgtaaattttagtatttctcattcttagtttgacaaatttcacaaaacaaagcttgtaccattcattctatcaatatattaaataatatttcaaatactgtatgacattcatagaatccatagttacatacaaaaacctccatattagcactgatacagaaatatataaacagattcacaaatacatactaaaatacatacatatacataaataataatacgtatataatagttagttacctttgaccggaggtccggcgaagagaagagatcagcagagagaggagagaggggttgagactcggcggcacagagtgagatgtcaaacgatagtgattgagagagcttttagttatagggttctgatgtttgttgttggcccaatgggctttataggcccatattgtatgaaccaaaatgattttttagatgggttatttacacaaatatcattttttttacatttggtttttttttttttgaaaaagtaaaagacgtttatagattgataaaacaaaataacataagccttagagctcgtagtcatttcataagatggttgttggttatagaagaaagctcaaccatgccaattatatttttggcaaacgctcccttagcttataagtcgcaaagttaaaagttttagaaaggctaataaggatttttactccctaaactttaacatatactaaatcatactccctgaacttttctgtccgttaaaaattcttcctgaattattgagattgttagatagaaggagactttgtttaatttcattacattttactattttagtgattgtttatgtactaaatcatgctcccagactttgatatctactaatcatgcccctgaactttgacatatactagatcatgtccatgaattttcat

SEQ ID NO: 308092 - DNA, 2235 bp, Cannabis indica
tattactagcatagtatatatatatatatatatatatataaatgttttcatttcatttacatcccatctcttatatatgaacataccatcatttacatatttctgcatgaaagtctatgtcatgatctgattgtttgttcatttttttttgttatgctgaaggaatgcttaaatttgtccagggatttcgcgcaaggagcctctagacaaaatttactaggttggcatgtttcttttatcaagtgagaatcccatctgtgtgtttgaaatactcaattctgaaactattttatgattttgttctgttcaagtaatatggctctttgtttctttttaaatgaagatcacttgctgaatcttcgcgaatcccaattgtagttacaaatcaagttagatctcaaactcgtgaagaaggttcccagtactctttccaaggtaggaacatgctgtcatatgatgaaaccttgtgttaaagttatgaacactaacagtttaatttttgcagcacagcgcacagacgatctgtcgggatatgattctcaccttgttgctgctttggggattaattgggctcactctgtcaccattcgtcttgtgcttgaagctaaatcaggttggctttgatgcttgaaccatactaaaacaagcttgaggagtgttggtatactatctgtcaccatatacaaatgttcggactcttctttctttcaggtcagaggtttatcaagctggccaaatccccattgtcaccgccatttgctttccctttcattataacatcagctggaatatcattgttaaatgattatgggacagagctgaaagggatggagataaacagaattcatcaacatggtttgttaaaaagacttgttctttggtttatgttaagatgcctatactaaatagattatttttattaacttcaagtgatcctagaacttataatgtaacttcatgcatttcatttggtgggaaaataacaatagtaataattgaattttcatgctgtaatgactaaaatgcaggtcacagtgacatcataaactttgatgggaagggttgcagtgataaatgaaggaatccaacctaattcaatttgtgatcatgctgcaaaaatttctgtggtgaagtaagttattcatataagttcatattattctacattattccatataaatttatgtaagtaaaaaaaaagtagctagttttaccaatgacaatagatttttttttttaatatgggatcttgcccatcggaccaagagactgtaggaatggctatgtaggtaacttggagggacttgaatattcttcttagtgtcaaaatgttaaaattactacacatgctattatcaacaataatcaatacaaactcatgcgcatatcatctaaagatgagttatcaaagtcaccatacagaaagttttgttcaaatttgaattaatttgaaattattgcttaaatatagcttagttatcctcaaagtttattagcaacaacgatatgatgtcgagtacggatgaattaacccattatcttgaattcattgtgcttacgaacattcataattaacacaattatcatatcagaatagacaatgatgatcatacatccatcgtcatattcaattattcaaaatatattcacttataatttatgccttatcttgaacctcaaccacaaaaatatcatcataaaagattcactagttcaactgaaactatagcaatgatcaaaacaaaatacactagtctcttgaattcatcattatggaacaaacataagaatttcacagcgaatgcccatggaagtttcttagcgaatccattcctataaaagatgtcatataaggatcgatagactgatatatacctcattataaccagttggcactcattgcaatactcccactgagcatgtagtgacttgacatcttttacattcaaatgtgatttcaagatttatcatttcaaggcctagttcaaatttctaatgagagatcggtgtgacaaaacatattatagtctcattcgatgattaagtgggagaggttttaggattgcttaaagctgaaagaaaataccttagagcattgatactatgtgaaaacaagggtggcgtttggtaacacttttttaatcagttttctgtttttaaaagtggaaaagtgaaaatattttttaaaaacatgttctataaaactgtttttacttttcaattttataattagaa

SEQ ID NO: 308093 - DNA, 1177 bp, Cannabis indica
ggtttgcaacaggtttgggtgcccaagtttttgccagccgagcgtgataggaggttttctggaattggtaataaggttggtctatttttgaatgatggggaaaagaattctgtgtctttacccaaatttgagttgacaaacccattggtctctaacgttatttgtactagggttgactcatgggtttgtgggccacatcaactacctttgaataaaattgcaaatgggcctatggagaggttgattgatgtgggtgggcctgagaagttggatttaaaggagaaagttgttgttggttgtaagaggggtaatgggcctgtgttgggagtgggagatatgtgcaattgggccagtgggtcaaaaggcactttggggccgaataagctaagtaatccaaagggtgttttggagagtagtgggccatgtgttttggttgggcctttgacttcttccaaccctgtcgtgaggcctggggttggtagtagtcaagaggttatatatagaggtgattttgtgagcccaatcaagtcaattattgtggttcattttggtgggttttctcgagaagaagtaacctttatggggagagatgggcctctagtaaataagggtacttctatggataatttatggggccataaagccgaaccttggcaagatgaggagatggctttatcaaagttttttcaaacccaaggaaagttgctctatgatcttaaaaattttggggagatggacttatttgaaataaaaaagttgggaggtgacactggtgtgaagcccacctcggatactaatgagagaactacgccttttgagaaaaggaatctgaaggttcggcttcgttttgttctcgacctcataaaatttttagagggcacccaaaaattgttagaggttttcagtgggatacaaaggagcgggactctgaatcccaggtggcttatgaagaattttctgaagagccatctgatgacatctccagtttcccgagctacaacaatggaatttcgaggaaccatttgttgggtccgtttatgattgaggaagctggctccagcttgtctgtgcgctcgcaaacccctgtggaggagaatgtcatatctcctccacaggagccatgagaggcatcgcttggaactgtagagggttagggcagacctctacagttcttgaa

SEQ ID NO: 308094 - DNA, 1512 bp, Cannabis indica
tgagaaaaatttgactaaaaaattatttcggatgctaaaacagatagaagtgcatcaatatattcattttaaaagagtgcattatagaatttttctatatatattcgtattctaataattatttttaacaatatggatctataattaatattggaagcagcctaacaaaaaggttgtaaaatgagttggtgtgcggtgtgaccattattgatttaatttcaattttgtcaacttctctaaaacgcacgattcattatttattatttgtttgttgtagttaattccttatcccctttatacgcatgtacatatattatatatgtatatgatatatttaattttgtgatgaatatgtattagtgaacaagttatcaaccatcaacagtagtacttcaaattagttctactgctttcaattatcaattatcaattacattattagtaatagttaagttaaattaacaatctatataagtagagtttttattggatcaacaattaatttgtgcatggttaacttaaagtaaataaattgaaagaacattatgtgtcattttgaagatgcaataatatacatatatagaaaaaaatggtgccccttagagtagaagtagagtctataatacatgcaatgttcttgttaatatatataataatattatgatgcttctataaataactctttaaaaataatttatccatgaactttttatttatattttgacattttagagaattttttggtttaatttttttttataattatgtacgttgtagttatttgaaacattctacaaaattttaaaaattttataaaaatttaacttgtcgaaaacatgattcaaacagtttgttgcacgcgagaattttattttatacgcgtgttcaaaccatattttcagcgtattaaatttttctaaaattttcaaaattttacagcatttactaaataaatacaaaacccatgccaacacaacccataccaactcgtcgaagtgtcatagtcatggttttacgataggatgatttcaatcatcttctcttcttcaagcacattatagccattacaaaacccaaatcaaatcaaatcaaatcaaatcaacctacccctttttcgtttttgaattctctcttgtgaagctatgcatacatctaagatttgatcaaggacaatgctttattgaagtttgctctagcgatttcgagtggagatatagttatatgtaacagatttgaatggcctcctcctccctctctgttgttttatcggctgtccaccatctctcccattcaagaattcatgcacacacagcctaaattggagagtttttcgatcggcaagcctgaggcaatggtatagacaataaactttaggacaagatattaccgaaggagaagactattgtattgatcttcttgattgatgccaaagttttctcattatcacatcaacgtctacttctgtgaggggttcaagagcagtcttctaagagtggttcggttcggctcaac

SEQ ID NO: 308095 - DNA, 1782 bp, Cannabis indica
ttgtcttgatattgagttagttatttcggttagtcttctgcagctattttacaactggttttgtaactaacaccaaaaatctgtcatttcatgcatttttttctcaaacccaataaatcaacatacccttttcaaactaagtcttgcatattaaactttgttcaagatatataaagcaaaatgtgcttaattagttcaaaaacataactatgaaagaaagaaagaacaaaatgtaggagttgagttaagctaagtatgaccatgatgatgaattgggggataacaaaatcttgaccttgatcttgtttagctcgaacactacctgtaatgatgccacgtcgacgaagatcaaccccgaaaagaagagcatctccagctttaaggccacgtgtatcaaccaattgggaccaatttttaccaaacaaaatttcaccatcagctcttaacttcaacttagtctcaataatatcatagctcttcccgtaaacaagaaccccaaaatcatcttcattcaagatttcaatcaaatcctctgctttttccattatcacttctccaatctctcttggcatttcaatttgatgaaaatgatcacttctcaaatcatcctcgctcagtatcttcatacacaaaaatggtttaatttgaaaactcacataatcaagaaaatcatcatgatcatgatcatgatcatgggattgattaggattaggcagacgaggagtaactagagttttgtcatagttgttaggttggatttttaatctgatcagtctgagatttattaagtaagggtaactatgactatgagtagttttcatgagaagaacatcaccaactcgaatcccgcgatctctgacaaatgtgttccattcttgtccttcgattttgacaccgccgtcaaacatgaacaccggcctaaccctgcgaaacccttggggctcggaaagtattgtgtctctgatgtaaagagttcctctttggaacattggaattgctttgatcaaagttgctagtggagttgggaggaagaaggtgtttttgttcttcactacgttaccaaacaataatgttttgttctccattgttcttggagaaaaacttgactgtgtttttctgagaaagtgagacaaaaaaaagagagttgtgtgtttacgtagttttatattaccgttatgttagttattaataggaaaaaaaacagttgggacatcattttgtgtttgatcaaacttaatattaagatttttcaaaaaacaaaaaaacaaacataatattaagtttgctaattgtctcttcacttgagcatagtttaattacaataaattcagttttaatgaaactcaatattttttaacaaaatcaaacataaaattaagatagtttgttggagggaacactcttttattttataaacatgttaagtaactttttgaaccatgttttaagcatgttaaatttgtttaaatttctcaaaaattttcagagtatgttaagttattgcaacatagacgaccataaaataaattagactatttttttttttcaaatgtcaaaacaaatagagtgtacatgaatggacccattttgtaaaattatatattatacctattctgttgaaattgtaaaattatgttttaaaaaaaagatgaaacagaaaaattattcattatactcacaatatttgcttaagaaagattaaagtaagtctcctataggaacttcaaggttaaggcttcttctggattatttttaggatttttacaaaaaatactagatttt

SEQ ID NO: 308096 - DNA, 3629 bp, Cannabis indica
tggattgatccatctaatctaagaaaaaaataatataatttcaatgttaatttttatatatacatatagattttacgtataacaatataaaatctaattgttaattcaaactaaaagaaaatactaattagttcgattgaatgttggatgtattggattttttaacacactgtttagtcaagaacagtcattatttgttttgtgtgatttctctctttttcagttcctaatcctctccctttctttatgtgggtgatttttatttatatggtacgttctttgattgcacgggcaacctgttgtttacctactcttctcttgacgcgtgtcctttctctctattccttccatcttgctacgtgtctgcttttcggtcaactgttgtttttactattgctctctcttggtctgacggtgttgtatccttctttgaagtgtttatctctctctttgtagactacatctcttttctctgctgcaattcctttccttacttgaggcggattgggtcttctcccgacggaagtatttgtcccttactaaggcgttatcttggtgtgttaccttattatgttctagggacaagtcttccgtcagccggtcggtcggaggactccctttgggtcctcctctttaatatgtccatcgcctggcccttcctccttcagtaaactttggctttaaccttccatctctccttttctatagtttccgtcggcgtttatttccctttcttgtcgttagtgctttttgtttgtatctatcctctagggttcttattgggccgcacaatattggacctttttaatgtacccggacctcgagcttttgggtacccacccattctgtttgggccttttaatgcttttattctattttattgggtttttgctttgtgcccatattttctcccccaaacacacctcatccaacatctaatcctatccaattggatatttaaaaatagcatccgatccgatccaatcacaaattaaatatccaatgtttagcggtcggttgtcattggattggataatttatgcacatcccttatagttagtgacagacacaaaatttttactttgtaaaagttaattgtgataaaatatatttatacttactaaacaaaaaatataattacttttaataaatttatttaattttataaaaatttaattattataaaatatatttgtaggtttttttttgttattttgttctttaattattaaataaaaaaaaattaggaaaaagattaaattaaaactccatacctaaattttaatcaaaatgaagatttttataaaaaataaattataaatctgccttattgcgacaaatgaaactattagtatccatattttttacttcaaagtttcataagaactacatttttttactaaaaattttatttaactagaccaactcggcctcaacaatgttagcaacatcaaaagggagataaaactctaaatatatacgaccaacatataaatgaaatactctagccatatagtgagcaactcaattgacagatcatttgacaaaacgtaaaaagcactattaaaagaagctagaagttgtttacgatcctcaacgacaccatcaaaagtggatgacaaaatacttaaatttttagcagcttgtactaatactagacaatctaatttgatcatattaacactcaaaaaatctcgctttaaccacgaaaccactttcttgagagccatggctttagcaatctctagacaaacacgcccaagccgcaatcttaaaatcccaaccacgacccgaccctggtgattctgaacaaccccattgaaactatgccttccctcctcgtcaaacaatgcagcatcaatgcttaccttgagtttttcataacttggtttagtccatagctcagcccaatctgagagataccaagtaccaaacgaaagaaacaaacttctttcttgagctttcctccattgatcaagaacgagccaaattgacaacgaactccacctaactttttttactcaaactaaattgcccaaactaacatcaccgcatgaacactttgctcctcacctagccgtgagaacaagtgtaagaaccagtccccaaacaaccttgcatcaactgggactatagccaaactcgttacctgccaacaattatgcgcaaaattacaagaaactaaacaatgcaaaattgattcacctgccccatgacacaccaaacacaatagagaaacatccacatgtttagtcttcaactgaactcttgtcgacaaacacccactaactgctctccatacatagttttttttcctttgggggaagttctaactaccaaaacttcttccaaaatgccataacctccttatccacactaccatctgtataagcatataacaaattaaacatattctttactgtatacgtgtccaaagattcaaaaccccaataccaataattcttagaaactaaatcggaaaggaaaacaccaagaatattggttgttacttcctcttcaaacaagtctttgacaattctaacatttcaagctttctcacccaccacaaaaaaactactaacatgttccttggccaaaccaggatccaaactagttagactcaaaaatgaaccattcggtaggcatagatcaccaaaataagagtctccttcccattaccaattcctttttttgcccccttacaaaccaactcttttacctcaacaagacttcaccaaatataacttggattgctacaaagtcttgtcgaaaggaagttcccatttttaaaataccaagctatgtaggctctaaagatcaacgaatcaggcttggttagaaacctccaagcttgtttacctaatatttctagattgaaataatgaagagaataaaaaacccaacccaacaacctctttactacacgccatcctctcctatctcatccacaaaattccttgactggaattcgtagacgacttccactaaaagttagccataagttgttataactcatgacatgttcctgtaagcaaaaggaaaatgttcatagcataagttgaaagattttgagccatattacgaacccaatcctccttaccaacatgcgacaagagtttaccattccaactttgtatacgcttcctcgtcttctcttttagaaaacataatacagtagacttgttatgaccacttgtacttggaagacccaaatacatactattcgcatccagcttcatgtatattcaaatagcacaaacaacctcccaaaagtagtagatttagtcaaattaatcttttatcttgacataatctcaaagctatgtaaaatctccacactttttgagtcccccaatgttagcttggacaagaaaatagctatcatcaacaaacaacatatgagaaattggcggagcacccctagccacacgacacccttttattaactgattctactcatacctacgaagtaatcccaagaagccttccacacaaataaaaaacaaataaggggacaaagggtctccctgcctaattcctcgagaaggaacaataggccccctcctatgactgccatgaacaacttgatacctctgttgggttttatgccctaaataaaactctgtttc

SEQ ID NO: 308097 - DNA, 1436 bp, Cannabis indica
ccccaggaaactggtggacttcccctgtttacaagcagttgagcaatgctcagaagggtcagctgaattgggtgagaagtcagcacatgatctatgattactgcaaagatactaaaaggttcaatggtcagatgccaccagaatgttcaaagcagcaattttaagtaagatgacacataatgaccatacagatatacataacagtaacaccggactctaatgatttgttatgctgctgaatgaagttttcactttctctccaattccaaactgaaaaacaaattctcattagttttgctactacttttgtattgcttttgttgggggtaatttctactcctaaactgaaagatcaaattgatttattatgtatttgagattaattcattttaatctcattcttgtattagagacccttattttttctgtattatttttttaaaaaaaaaatggaaggaatccacttggtcactccaagttaactgtgattaaaacaatgtacatgtaatatatggatgtctgcaaaatctatctgtaacaagacaattgttatcaaaaataacaggaaaacgacgaattatatcaaaatcgtcaattacatggaaacgacaacggtattgatgcgattatatggattacaacgatataattcgacaaaacgaccacagcattgaaaacgacaataattatatcaacgcacagaaagtaataaacctaccgagacgagattcacaggagaaatggctggctggttggctacgaaatacaaagccaaacacccaaaacaatcaaaatcgtaccaaagaaagcaaaacccaggtgagtgcgttcccccaagatcacgccgaatacggcggtggcggcgaatgtggtggcgttggtgacgggcacggccagcgagattggggtgtgactcagaatcgcaaagaaagtggcggaggcagagaggttgatgaggaagggaatgatgtactgccagatggcgaggagcttgacccagttgccgattgaggtacgcaaccgatgaagggttttgcgggtgggatcgggtggaggagaggatttaagggctcggtcccatatgactgcgccgcggcgcatgaaggcgttggtggctccccagaccaggcctaccgctatcatcttttccgtgtctcccaccatcaccatcaccatctgggtttcccaaacaagtctcttcttccccttttactcatctgcctaagtaagtattgagttttaacttgtgcatttccaatcaaattacgagcaaatctaaataaaagtaaaaatatatgtatattatatttagcaaaaaaaaaatatatgtatattataactgtcacaatttcgtaaagaaatgaaaacgttaaataattatttgtttttttatatataaaaaaaatagaattttttttttattgaaatgaaaaaaa

SEQ ID NO: 308098 - DNA, 2419 bp, Cannabis indica
agagagagagagagagagagagagagagtgagagttcaagcaagaaagaacctgtgcttgaggttgaagaaactgtttttattttttttattaatttgtggcataaatattgtgttcaaatcaaaatctcaatttaattttttttgggcaataatacttaagttatatttctacaactccagtatctatttacatgtcaattcatatatttaaaaactaatatttttgaggaattaaaaaattttaatgacttcaaccgattgctatgtgggtaatttatttaacgcttaacagttaggtaagagaaattctataattataacttagtaggtattattatcgccaaaaattaaacttagttatttatttataactgagagttaaacttaaatatttatgctacaaataactctcatttttattatatgttattggttatttttacaatgcaccacttccactttctatcgaaattttttgtatatacaatacgttataattatttaaaatatcttataaaattttaagaaatttagaataatttataatatagagaacaatgttcaaactatttatttcacacacgtataaaataaagtaattgtaatacactatttgaattatattttcaaggtattaaaattttctaaagatacgtcaccatgaaaaataaattgactaaaatattatttcacataccaaaataaataaaggacatccaaagtgcattataaaaaaaaatttatattaattttattggttttattattaaataaatattgaggtattttttttttttcaattgaaatggaccctattgaattcatattcataactggtttctaaatttgtataatttgatagcacatcaactcgatacaaggggacccccaattcctctctactctctagtgaactttaacaaggattggatttggtatactttactcattaaatacaatactcactaatattttgtatagtgtttcaatttatttcaactcaaacaaaccttttatcactattactggcaaagtgtaatatgaatttgatgataaatggaataaattgaagaaagaaacacaaaaatgcaataatggattttggggaacatttttttgatggaatggaatggaattgaatgaatccatgtctaatgttgttgactttactgaaaattttggtttgattgagtgagtgagtgagtagtagcatgtgaggttgctgcacaggggattcccaaggtgggtcccacatttggttcttctattcatggtgggtcccacatttttatttatacaaacgaaaaaaaaccaagcatgtctgtactctcttgtgtatagccacgggcttgttttggaactaatgtattgtgtggttgtccaaattatggacacacccaattaactaatatatataaaaagtattattggtgtataggaccatcttatagtataattaagtatcgagtctcatataacttaaaaaaaaaatttttaaaaaatatttctaaccaattataaacggtctcctataaaagatattagatattactatgtctaataacaatgcctatatattcaaaaataaatggaaaaaaaatatgcaaacattatatatttttggaactccgtagatattttatcattatcacgtgatatttttttattggtatattaaaattaatttttttaaaaaaataaaaaattttgtaacttgagttaagcaggaattgcccgtggtaatttacttaacatctaccagttaggtactacataaattctaaaattataacttaaatattattactgccaaagttaaacttaaatatatattaataactgagagttatatttaagtatttatattcataaattacacataaaataatgagagctcttaatttggtgaggagtttttatttttctttttgtcacactaatagttttatgtttttggtgaaagaaagaataataagatggataattagtacaagttagcagttattagtgtgtgtttgagtatagataggtatatatagtgataaaaatgtttgtttgtacttttgtttggagtgtgtttaggttgtgaattgtgatggattctttgaattgttgacagaaatcattagagcttttatctctttttattcgtagtgtgtctcatttgtcagtgaatggtcgtacgtaaattattcacaattgacaaaacacacactaccaataaagacttgtgtactgtaaattagtttgactcgtataaattatgagattttatattatttgggtaaaaatatgtttttttttattattttatagaaaaaatttaataaaaagttgaaaaataggtgaaaattgaagggatatgggcggctaaatcacttgaatttacgtttgtaacacttaaccacaaaaaccga

SEQ ID NO: 308099 - DNA, 1463 bp, Cannabis indica
aacaaaataattagggaacaacgagtaccattcagtattacacactattgtacaagttgctattgcaaaaaagtaccatcattgtgtttattacacttttacgagccccttcaaaacccatatcaacaagactaattttagaaagagctttaggaaacccatccataaggccaggagaccgatcatccccatcactcttctctcatgagagaaaagaatttcattcaaatcctcgccacccatccaaggaccataaaacccatcagctaattgttccatcaaacactagatttgatgatgaaagctaacatcaggttatccaaaaaactcgacacactgccaccacaacaccccatgagaccacaccataacatcaatataactacgagagtagcccttcaacaccatctcaacattattagaccaaaataaacataaatctccactatgaccaacaattttccaccattaatttcctaacgaaatccaaacgtacaccaataagctctaaggttgaatgggtaacaaaagcttcgagaaggaaaacaatgtcagaagaaaattatttcacatgtcattcccaagaccctgaatgttccaagataaataatccataatgcttagtggccatgttttccaaggactatcatttaaaaaccaatcacgacattcttcacaaccacagtagggaaaagcgaggacatcatcacactaacaagttcctccatcacacaatcaaaatgaaccgaagtcaccaaaacttcatgaagattatctgaacttgaaatatgagacccataaatctccttgagaccatgtttgaaaactttcgtaggactcttcaatttcacctctagggcccctaccatgtcatgaaggaaaccttatttttatttttattttattgaatgttgagacaaaatggacgtaccctcatgcatgactttcatggcttctacgtgaacattcatagactgtgtagcaatcccacccgagccactacagccactaaaatttacagaaggcttcaccaaaccattatacccaacaccagtagaccctccatcaacctcagcatccccatggacaattctaaaagaaaacttcccattatttgatacacgatgtgtgtcaaaattcttattatttagtaataaattactaggatcaatggatttactcaaattatgggaaatatacttatttttcaaaagggaattgtaacgcccgtattttaaattaataaactcgaaagttaactttaataatttatagcttaataaccatatgggtcgggatcccgagtatcaaaatacgagttaaagtattttactaatatgtacatataatattttttttcttaaaactaatgcgctaagatgcaaccccaaaatacagactccaaaacactaaaagactgaaaccctccaggttgcactgccgcgatatgtacaatcattgcc

SEQ ID NO: 308100 - DNA, 1883 bp, Cannabis indica
taatgcatcttcaattttttcagagccgtctggttcttccgcattcaacaaacgactagagctagaatccaagagaaggcgaattaatgcagctgctgcatcaaacattctgacaggaggatttaagccatcatcatggtcgaatggtgcggctgctccaagtaagcccaagggaatttcaataaccacaagacgtttctagcttattgagaataatatatgataattacaagaaagggaaaataagtagtccctttataggcttaatatgatatggtgtatgttttccccccttttccttcatcttgttggtgtcaagagtttttgtacataagtttatgttatgttaaatacttagttgggcattgaatatatattgtataatatgattgctgtgatgcaacgtagcgggctgaccaagtgacaagtttgttgttttttatttttttcgagtacaattgccaagcttgttgagaagcagaaatttatgtcattgtagataggcatcatatatatttatatatatatatagtttataaatgagcaattttaatcaataattagtaattccggttcatgattctggattatgatgctttagttttagttttctctttcccacacttctttgttgagttggaaccaaagttgagagttgtgttggggttggaattatcttggatttaattttttcccccaataaaattcaagttccaaacaaggcttaattaaatgttaacattagtactgtccacttttggaacaccaaagattattaccctctgtttggtcttatgtatatgatgagtgattaatgaagcccagtttaacagctttgaaaaatttctttgtttgccacacatgattggactagattggataattttaccgaattaatttggtcatgctgggtgactaatctaattaagtctgtgtaagattagatcttctctaatgggagatgaaaaaattgatttatatttggtacaaataataatagttttgtgattttttttttcattaatttttattattatgctccaatgtataattgtaaatcttgaaaaaaaaaatttaatgtcatttaatgcttatttaataatttattaaaaatataaaataataatctcgcaataaatataaaatttaataataaaataataatataattatgaaagtcatttgcaagtgagcatgctaactaaattttaataataaaatattaaaaatagcagtaaatgtaaaattatagtatttattgtgatgtaaattttgcagcatgctatattgtgattcaaatttggattaatttttgttatatgagatattttcatcacaatttaacatactattggagtagaattttgataaagtaagctatattttgtatttgcatcacttattaacatctcaattgaagatgtttttatttatcccatcgagcatatgataagtaatcctagcagaattattgttttttttattattttattaattttgaaaatatattttatatttagaaggtattgaaattgaaaattttatttatacatttcttatcaattttttttttaattaaaattaatgaaaatgtataataataagttatcatatatataaggctaattaagaattttgttcccccgaacctttgacatgtaccaaattatgcccctaacttttaaggtcgttaaaaattccccttaaactattgagattgttgaattaaagatttttgtccaattttagtaaaaaagaagtctaacatggatgaaaattcagggggtatgatttagtacatgtcaaagttcgaggaacatgatttggtagatatcaaattctgaggagcatggtttaatacataaacaatcactgaaatagta

SEQ ID NO: 308101 - DNA, 1393 bp, Cannabis indica
tacttgtgttctcatttaatgatgctcgaaggctgtttgttacatattatagtttacgcaaaaacattttaaattgaaccactgtttggtattccacctactggtaatatcagcataaatggtctgcattccaggcattaggaatcctcaatccatccatttgcttcagccaaaaagttccttgccccaccttctcaagtatttcgtaggggccttcccaatttgggcaaggtacccccactcctggttcttcggaagctgggaagactcgtcgtaggacaagatcaccgatatcgaaggtatgactctttacctttgagttgaaatgctgggagatattcccttggtacattttgagctgaacttgtaactgctcccgcaactcctctattaagtctaatgactcttgaagcagagaatggttgcgggttggattgtaagtatcttgctgatgggatgatatcgtggtttttaccgagattaccacttcggatctataggccattgtatacagcgtataccccattgaagttctttcaattatccgataggcccaaaggactcgagggagctccttcggccagtgagctttacatgcctatagcttctttttcaatgtggttttgaggatttttttgacgattctgtgctggacacaaaagttggtgaaatgtttactgccaaattgtttcccattgtccgacacaatctcatagaagagcccgtatccacaaaaaatgtttttaacaatgaaatccaacatcttctttgaagtaaccgtattcataggctctgcctcgacccactcattgaaatagtcaacagcaataatggcgtacttgactccaccttttcttgtggggaggaaccctaccaaatcgataccccaaactgcaaaaggccaagggcttctcatgagcgtaatttttataggtggcgctcaggggactttggcgaacctctgacattgattgacttcctaacgtactccatgcaatcgttcttcatggtaggccagaagtacccttgccataggattttcttggaaagactagggctggacgtatggtctctgcagaaaccctcatggacctcatggatcacaacactaatttctgtccccatgatacacctcagatatgttggaatatattttaccaggagctagatttactatcaagtatgtttttaacatcctaaatatgaacttctaaaacaatgaaaattaaacacatataaagaatgagaaaccttacattagttgcaacggaattaaatgactcatttcgctcagatcactaacccttgtatcttttctgtcgcagagtataattaagctctgagcccaaaactccgttagttgtttggattcttcacagtcttacacactatg

SEQ ID NO: 308102 - DNA, 1611 bp, Cannabis indica
aaaaaacagaaataatttacagttttttttttaatgctaaataattactagttggaatagattattcaatgtaaatgggacttgggagaaatcgaatcgtgaggactcacgagggggatgagaatttggactgcaatttctatgcgactctgctatactatcattggccatatcatattggtcctttttttttctttcagttttggattttaaaaaagcaaaaattttaggagagaaatttgtagaaaacaaataagaaaaatatttttttattagagaattttaacgaatatcataactagaaaaaaaaaaaaaaaatttaaaagaatatctgatcaaaataataaaaagaaaattataaaggaaaactcgaaaagagtcatagccattagctaccatcttgagggccactcattactaacacttaccatacaattcattatattttactttctaaaccacaattacattctaacatttaatcaaataaaatttaataattattaatatgtattatatgtacataaaacaaagactatatgaagaaatgcatgtcagcatgtcttttacaaattataattattgaaactcaatttgatcttctattctattgagtatatgttttaatggttgtcttttttctgccaaataattttgtaaaagcatgtgttgtagacacctatgtctatgtctatcgttggtttacaagagagtatgagattcatcaaatgatcttgtgtagatcacaactctccatcacttttttttacacttgatcatttgttggagtttctaattttgcaagttgggtgtgtcattttaaatttttataccaactaataatataataatagctagataggggtataatatgttcttttgactaggtctcatgactcactcaactaagaaaaaataacatccaaaatgtataaacaaagatacaaatttgaatcctagtgttatcctccagtaggtaaagacaaatccttagagtattatctaattgtcttggcttataagcaaaaaaacataccaaggacgatgggatcaatctacagaaagagaaagagacatgtaataaataacactaaactagtctctatgtagtatgatcatcagattgtgtataatactataaatatctagaacttcattgataaagagaataatataatttagagtcacactatcaaataaattgcgatttaaattagaaggcatgttgttgattaaagtatgtgaaatgaaacctatttgctcactatatatagagaaaagagttagttgaaatctgtgtggcttttaaatttgccaagtcattagatgacaatgacatcaaatattttgacttggtctttccgacaaacctgagaagtatgtggctatgttcttaccaatataataaaactttgttgcaatatatgaagttatatctcaatttataacagcaattatgaacaaaatgaaatgcatataaataacatcaatgtatcttacctgtttggatttgttatattattttgaataatttaatatatatagattaaaaatgtgtactatcattttataatatttgagaagttgttgttatgagtaacctccacaatt

SEQ ID NO: 308103 - DNA, 1464 bp, Cannabis indica
agataagatatcctaaacttaatgttatatctttctaagtcaatatcaacggttgatcttaggtctatggatcgaaacgatgatttccttagagcttggctggatagagataaatgattgagatctcatttctttaaagacctaaggagaaagatttaattagggttttcgtcttgtcttatgacatggtgtgaatttttctttggcttggttctttgtctttcttaggtgcttgtccttggttgatttggtctgtttttgtacgatctctggtatggcttcttcaagttcaagcaaggggcaaagtgaatttgatgctgaaatcactctagactttgaagaatttggaggactatcgttagatgtggaagaggaagaagaataatatgatgtccgctggtgtctcatcgggcgttttttgaatgctggtattattgatgttcaagccatgtaacatatgatggcttttctatggaagccagggaaggggtcgtaggtgaaagagttggatcaaaatcattttttgttccaattctatcatgaaattgatatcaaaagggtgattagaaacagtccatggacatttgaaaggaagcagcttattttagataacccaagatcgatcccgttaaatcggctagacttatggattcagatccatgatttacaacacggattccgaactgaacgtacgctgcaaatgataggcaactatattggtaagtttattgaatccgatgagaataatttttctagtgtttggcgtgaatattttaagattcgggttactatcaaccttgatcaaccattgcaacgacgcatgaagattcgccggttggatagttcggacttgttctgggtgaattttaaatacgagcatgctccaactttctgtgttatatggggtattatcagccatgttgataaatcgtgcctggatattttcaaaatccctgaagaatacattgtcaagccgtatggagcctttatgagagccattattcaatggcaaaacaaactaatcggctcccagtggcttcggtatggaaggacggacaaaggtgatcgtaatgagggactttgttttcactccgccgcaaaaaatggaggtccgactactgctcaagaattagcgaggaataccgatcaattaatggcacataatgatggagatcacggacagggtgttaatagtgggattaaggagccaatcatggtgcagaaattgggtcctaattttgaggagaatttagaagggaatattgatattaatatgggcaaccatattgacgtggacatgcaatgaatgggttatgatgatctaacaatatctgaacttaaaagaaaaagatccaattcagttgggcatgggactttgggctcacaaaaaattggtatttctaaaaataaagaagttttagtaacaaaaaacttgtttggggcgggtctggatgcacagactcg

SEQ ID NO: 308104 - DNA, 2288 bp, Cannabis indica
aaaacactacataactcttccttatcccaccaatcatccaacttatcaacatcatcaaactattaactacatatccacctattctaaacaaaaccaatacaaatttattctcaaaccatcagtaatccctaaaataattgtgtattggtttgatataaaaccattgtgcgaatgatcaagaaatccttcgatcttcaacatgaatccctagcagctaggtttcctccttcttcatcaagctcgatcttaagcttcaaaccctaaaccttcaactgcaatccaaacaaaaaactagagccacaaaacaaaaatgatctagatcaatctttgttgattagagataaacaaaaaacacataatgaacacaagagatttgatcttcgagttcatcctaaaattaaagctatgtccctgtcaagctcgcctcagagatgcttgatcgttcaccatcaatcatcaacatgttacaagaattagatggagatgccagctacaaatcacagcaggtaatctcaaaactctctttctttgttcccttatgtttcttttacaaagttttctctcaagctttccctctccaactctttgttttttttcttttttctgggtctctctcctcaagctacttctctctcttactgagatgcgagtcttgatcaggtagttctgaacacgaggtctcattccttttatagagatatatgttattagtgaagagtagattaattcgttgctgagttggatagaaattagaatgttgtaactgattttgtttttgttgtagctagctctttcattatgtttgtaactgtaataagtagttgatagtgcttgtatgggatctgaaattggatggatgggaaatttggaagaagtttaagaaatggaattaatgtatgatatggtgtgatttaagcttaaatatacttatattagtggagagtgattgaataaagcttatggagtggatttcttttgcataaaaatattatttattgtgtagggactaatttaaaacaaaataatttggcaagtatgggtcagttttgatacattttagtcggtgttgtgatacatgtttattaaattatttttgaaaaatcaaataatgaattacaagtggggttaaaattctaaagagcatggaaatttgacttatgttggcattacttacttgtataattctcagaaacattcaagcttttgataagacctttatttagttagtgtagattagtttgtattatcatgattttaatttggagtttttgttattttaatagtttgctaagggactagcaaaaagttcaagtggtggaatttgataagtgcatatttgtgtatttatttatgttatttttctacattattgtcatcaaattaactctttaaacctttaattagtgtattttgattagttaggattttggaaggctaatgtgtttggagtattttggaatgattttagttggtgaaaaaggtgaattttggagagcttggttatctaggtagaacgtaattacaaattttgacggtcataaaagcagaaccatgcttagattgagcatgaaagatttagatctcgttctcatatttctataacatcttgaattgtctaattctaaactatattgaagaagttatgattaatttactgtcagagtacgagatacatttttgcacaggctacgaccaaggttttctaggctgctacctgtgtgtcttaaaatgaggttgggccactggccatatttttcgggttgcggcccacgaggactaattatcctgaaatgaaattcaggcagtgacaaacaattttccaagtggcggcccacgacgctgatttgaaatttttgtttagtttttaattgcaatttcagtgagactataagggcccatttagtaggccttgtaagaatcgtattgtattaaataacaagtaacactatattttgaaaaaatattgtattgtattaattattacaaccataaattttaatttaatataaattttattatttaatacataataaaaaattcgtatatattaacttgtattaggggtgttcataaaaattgaaaaactgaaaccgaccatcaaacccaccagaccgtagccgaatttttggttccacgtcatcaccgaatttggcgctcgatttcagttttgattttgacatgagtcgttggttttgaaataaaaaaaaatagttaaaccaaaaaaaagtcgaaactgccaaaaaccgtaataaaccgccaaaaaccgtccaaaactgccaaaccgaaaa

SEQ ID NO: 308105 - DNA, 1263 bp, Cannabis indica
ctggactcccttcagactgaaaaccgtctccattatcactcttttcagaagcttgaaactcttcaacaatggagaaaacctgcaagaaataaagaagaaagaagaaaaagatttctgccctagcagagaaaaacctcatcaaagaatcaaaatgagtgggacttagttagaatattcaagaatcaactatgtatataaccaactcacacaaaaaatgactttgacagctcactaacaactcattgacagctgtccaagatattttaacatgaaaatactaatttgtcaagctaacccataaactagtaatagacatactcagatagaactactgactgtctagatggcagaaaactcataatttgacaaacacaaaagtatggttcttacagtttcattacacctagcccaactaatcatgaacttatttattgtgcttacatttatcttcaaaacttaggagtgttgaatgtaatataattacaattcatggcatgttcatcagatatagaataaaaatcatggtaactgttgcaaaatttatgctatgtaagtgcacatatctctttcagtaataaaattggtagaactaagtatcattctcaatgattgattcactaattattagtcaattaatttttcatttctatttgatcaaataattttttaaaattttttaaaaaataaaataaaaataattaacagtaaaattatgagaaaataacaatgagaattaagacaattaatctcatctactatctactcttttacatcctattttacccaaattattcttcctcataattaattaataagttgaaaaaagtagtttataatcttgttaagacttataaactcactttcataaaccacttttttttatttttttgtgagtattaatttcaactctgtatccttctcaacctctgttttaatgttttggactagataaatgtgcacatacatataccaaagtgtgtatgaggattttgattgctcaaatcattcttttgattaatttacaccaccatataaagttaaatttctcacatacatatgaatatatatatatattaagttcgtcacatgtatgaatttgtgtacatatatttctatctttatatgatggtaaacttttttagctccaatatatatttattccctttttttaagataatagtccgttgaggaatgatatagtgtaaaaagagatatgttttgatattttttttttaattaagtagttaaattaagcatagaaat

SEQ ID NO: 308106 - DNA, 1588 bp, Cannabis indica
aaagattacattttatagttttggatacaaaaaagatggtaactttaatctatggtcatgttggattgatccatttcttgatgatttttacagattgctggacacaaagatcttctcgaaggcgatccacacttgaagcaaagactccgtcttcgtgattcatacatcacaactctcaatgtctgtcaagcctacacattgaagagaattcgtgacccgagctaccatgtcacggtgaggccacacatctcgaaggagattatggaatcgaaaccagccaatgaactcgtgcagctgaaccccacgagcgagtatgctcccggtcttgaggatacactcatcttgacaatgaagggtattgctgccggtcttcagaacaccggttaagtcaatccttctcatcccccgcccccccgagttgtgtcattcgaaattgtgtttcgtcttctttgtttttgtttttgttaccttgtagatttgtttgtgcccaataaattataagggtctcatacagaaactgtttgagtttagttgaatgtctttagagtcaaatatttgagctgtatgatccaaatgctgagcttgaagaacactttttaactaaggccagcattataattgtttatcacaaagtactttttttgtttatttctttgattaatcaaaatgaaattgctttttcatttatgtttctttaacatggtttttcttggcctttgattattaaatttcttaggaatttgtgactgagtgaagttgagatgatggagaataataatgtgagacttattatattctcatttaaaaaattacaccaaacatagagtcgaactcatattttctacttatcttaacaatttttcctgtaacaatctcatatattgtgtttttttgttgttagaattattagtcttgatttatttttttttttctaaataattataatgtataaggtattttttttaacttcaattataagtaaaatttagtactattattggcagttaatttctctaaaatatactcttacataatttattaaaaaaaggaaaaatatcaaaattaggtattatcttttgttcaaaatttgaaaaaaaaagaactctttaattccaatgacaagtaataattgttccaaaaataataacaataaatacaattaaaaactactccaaaatttgaatgttatacttgaatcaacttctttcacatcacttaatgtaattcatcgaggataaagaaaaatctaccattctaaatttgaaacaagcatcttttattgattcttttctcgattcttaactagaaattttttcgatcatttttaaatcgaatttaaaattttaaaaattaaaattgacagaatagaaataacactttaatattataataaatggccatcaaaatgaacaaatattttttatttaggttaattataatttttgtcccctaaactttaacatatatcaaattatgcccactgaacttttttaaccgttaaaaattctcactgaactattgagattgttagatttaaggacttttgtctaattttattcaattttactatttcagtgattgtttatgt

SEQ ID NO: 308107 - DNA, 2109 bp, Cannabis indica
attatattaatacaatttaatattaaattttagtacttttaataaataatataaaaaattagtcagaacatattataacacattacatcgatataacaatgaataccctaatgtttctactagcaattttgatataaaaaaacattgagtaaatgcatggttggaaatcgtgactatcaacgtgtcctagcactccattgatacatatatattccctcctttttatacataataatataacatatatccttttattgtgagagtgcttatatatatgacgagaaaagtgaccaggttcagtgaaccaattaccaaacctttattttccttctcttttccagctcactactaccttattaaaaagccccatacatggtcagatgagacatcacacccaaaccaaacatagaaaagaaaagtgacgtttatgagtgattttccatcaccaacgtcatatcatatggcctaatttttattccttcccctcatttatatatcatccctttcttccttatgatcataattattaattattattatcaatattcattctcttaatgcctcaactacatctcatcgttcgcttctttttctatctcacctcctcctaacaggtaactatatctattctttttctttctaattttatacggcataaataattttcttatatttgaacaaataaaacttgataaaattatctatatgctatatattgatgtgatccgtagggggaaaatgtatttatttctgattaaaaattgaagaaatattcattttatgcagtgagagctgatgtattatagtggtagttgattttggtttggatggaaactaatgcagaaaaaatgggtggctgttctgagagcggtgagaatagcaacgcatctgagctaactaatactactaatttccaagtagtggtctcctgggaaaagatgtggtgttggtggaaacatactaagctcactgagctctattatttttatttcagcaatggagttttatgcccaaaagaaataattgtcaccactactactactgctgcgccatgtttagctttgctccttgctctaatttgtcaccactctatcaaggtacgtatacgtaaactataatatttattagtatatatatatggtcaacatatttagtcagtcaattacacaaatgaataatattgttaataattaatataataataataataataataaatgacagcaggcgacggtagaagtgcatgaaacaagattattggagctgggcccagcgttaattaattttatggaacaaaatctatacaagcaaacctggagagatcgtgaagcaagaaacgacgtcgttgttgcggtgtgatgtcgtggtttaaagaccttataattcgtactagtattacaagtacgaattgtgggtttaaataggtagctagagatcattgctgattctggaacgagttcccctttgaaacttcaaaattttatgtacgtgtcgttttggatacgattatcattccttgctttggattctgttatatgttttatacaattaataaatgagaaaaagtatatggtatctgagtacgtataatttaattaagcgaacaagctgaccgggagtacaaaatggttgtaaatgttaattttcagtgcatattttatgggaattgatttcgtgtggtatcaattattttttattttcgaatgataatgttcaagtgttcttataattagtaatgaatcgatataacataaattatttagcttgtgttcgagaatattccaatacccttaagggaggagggttactatcaaactaaaaaaaatacactttaaatgatggggtaagttgaaatatacctattttttttatcagttaatcaaaaaaaataaccttatattaaatttaattgaaatgtactatttttataagtacattaccgattatattcttattataccctcacataaggatggtgaggaagatttttttcattacattagggtataatcgggatttaacaaatataagagggtataaattaaatatatagaaaagaaatgtagaaatgaaatggattaacaaaaaaaaggtatagggtgcaatttc

SEQ ID NO: 308108 - DNA, 3120 bp, Cannabis indica
atagaaaagattacattgaaatagagttttatttagggcacaaagcccaacattaataacatgagtggctagcaacatgttatatattattagaatctaagcttttcgaaaggatcaaatattattttccatatagtgttaattctgagagtggtaacagttagaaccaaatgtataatcagattaaaaattaactattcacattgaattaatagtacatacaaaatcaagagataattagaagggtaaaacaatattttgaccaactctaagtatgaactaataattggagggaactacttatattgattatatcaatggactataagtaagaattctataaatataattatatattgtcaaagagtacaattctgtatttatagtggagtaataatagaattaataaattggattattctattgatgagttcaataataatcaagtatttattgaagcttcaaatataaattcatggtcctcaagtcacctttataaaacaatgtacaggggaggtttaatttgatgaacaaatttgagaaacattaatttctatgagagataattcttaagggcaaaataataattctgtaaaaattattattttgaataattatatcaattatcaatcatgaattgagtaattagtatttaattatttagttttatttgattaaactatattaattagttaaatataattgttattccaatttttctcacctgacgtggcaccagacacgtggcaagaaccattataattggacaggtacatttcgtgcatcttccaagtcaagagcaaaaaaaaaagagatacacaagtattgataagaccctggcaggatgaccagcaggctagacaggctacaacatacagaaggtcgggcaccttgcctgccgaaggctggacaggtagctagtagaaggtcaggcagcttgcttgtagaaggccgaataacttgcctgtagagggctggatagcctacagcctacaaaaggtcgagcatcctgcctgcagaaggtcggatagcctacagcttgcagaaggtcagacaacttgtctacagaaggccagacagccaacagcctgcaaaaggctagacagcttacaaccttcagatacactggataacttccagaacaaagttggctagccaactcgtaaattttatcctaacagcctaaatggactgtggttttttccatgggccttttacaacactccaaattgtccccaacgctcctacaacttcagaatagttcaaaccacccacaaaagtaggaaagcttcatcagagtaaaattgtcatactttcaatggatattttccatctattatgtattttgaataacaagttgtaaaaaccctaacactatataaagggtcttaaccctacgggaaagggagccgattttgtccattctacacatgcacttaagagctcagaagcattaaggcattaaactctatctttccttctcactacaagtattctcatacttgctctcataattgtaatactaaagtgagccatagctagaaatgacaaggtttcggcctgtaatctacatggtgttatctcaaaagtgaatacaaaacaaaaggagtaggtcattacctgatcaaaggggtcaaacctctataaattcttatgtcttttatatttattatcattttgcaagtgacagtcataaatgaaattagatcatattcaaactccgcgtcagttggctaaattcacagtcaacattttagtacttttattgagggcctagaattcttcttcataaagctctcacttttttcttagtttccattttgtgtggccgttacgagatgtggaaattctactgaaccaagatatactatatccacggatccccctatccaggtgccagtcactacgaccgacccaaacgtagctgcccgaccaccacattttgaccagccaattggcaccttcaccacaaaggttcggccagaagaccaagctcctactaaacatactgtccagccaactactaaagttcttcacacaggggttggacctcttgtttatgctggtgagactgaacctagtgtttacaaccctagcatccatgaaccccatgttaaccttaaggatgactctgaacttgccaagttgagagaggccatagggcaagtacagggtgacacaaatttccttcagcattaccaaaaagaaacacatgttgttatgggcgatgctttctgtaaagaccgcttagctttaatttggaaattagcagataattagggcttaattatgaaaattatttattagtattgaattatttatctatgatgatttacttgaattcagaatacatttttatgtcatatatagaaattttataattttgcatgttttgtacccgacaacattggaacgcggtgtttggctattaaaatcacatcctagtatttttagtatagcgggacaatatagttagacaatgggaatgtcgggaatagtcaggattttagaatttcccaaaatacccctaagtgacctttaatgacttttagagtggaaagggcaaaatggtcattttgcctaaatgacttttgtcttttagtgagttttaaaatagggtttaattctgaatattaagttaatgttattagataaactcaattatttctcttcattttattaagaatagaaaattagacaaaggaagctcttttttctcaagctctctctcattcgaaccctatagaactagctagggttctttgttttcttcatcaaattgttgtgtttcctagcaactctaagtgaatccaagccaaagtaagctcctagccattccttctctagttttcttaatttttaagaaattgattttgcatgaaatggagattatagttgttgttcttgcagtggttgtttgattttgtttttagaggtttatttatgttagattatgttgatttaagcttgaattggtggctgttactagatttaacaaagttttgagttttagaactcaaacttggaactttaatggtgattttagattctgagcttgggttgttgttttattgcttggaaatagttattggggtataatatgcaggtctggaaagtttg

SEQ ID NO: 308109 - DNA, 1205 bp, Cannabis indica
gaactcaaagctaggtccatagctttgaagaccaaaggcgtaggtggcttagttctaccgagccttagtaaaaattaagagtttagcaatttgtcgtaccctaaactccttactattttaagtttattatttgtttatacttatgtttatctatgtgattgcattaaattaaatatttgcataaattgtctttggggttttaaattttcaaattagttaaatttcaattccaccccccccccttttagaaacctatctttggttaacaccaagttctccatgccaatgttcgagaggtgaacccatatattttatttatttctaaaactcttggtactgaagctcaaatggaacttctttgcatttgtttggggttttgcttgagagttgttgaaggacaaagttggtagaagtggtggcatgtgtttcttttggttaaaaaaggtgaatatatctctcttttctttctctcggggtcacattgatgtgttaattcatatttttgattttactccttggcggttcacagggatctgtgatcaacccaattcctctttgagacatctcttctggactttacttagaagaatttctcgcaataattcttatccctgggtttgttgaggggattagaatgaaattttgtccaactctgataaggatggaggtaccttgcagcctcagtttttaatgcataattttttaaaagctttggaggattatttttttagagacatgaggtttgaaggacctaaattcacttggttcaacaagcatcaagacgcttcttttgtccaagaaaggatggatctctttgtttgtaattcttcttggataaatttttttcctgattcacatatttctcatttgtcttttttctgaccatagacctattgtgttgtcaactgttaatggtcgttttggtaacaaaattttatatcaatcttgttttcattatgagaatgcttaggcttttgaaagtgagtgtgatattattatcaggaaaattagcacaaggtgggcaacgatgtcactgcagtggccctggcctttttgaatggacaaataagtcttaaaggtaataataaaacgcttctatgccttatttcaaaaatttattcgcctgctaggccttctaattatcgtcatattagtctttacaatgtcctttataagattcttgttgtaggaaattattttaccag

SEQ ID NO: 308110 - DNA, 1487 bp, Cannabis indica
tatcagttaaatcatgtgtactgataaatcataggaacacatttaatcacacaatcttgattactttccactgtgttgacaacacaataaacaagaatattagtgtgataaggatttggatgaatttataaatcaaataaataaataaatgatcacatgaaccaaataacacgttaaacaagtaatgaaattaaatctgtttctttattgataattgaatagaaaagattacattgaaatagagttttatagggcacaaagcccaacaataatgggcttagacacatcaacaaagactctgactcttataaagaaaccaaatacatgaaagatggtagtcttatctacttctaagaagtctccaacttcatccccaatcatttttgctagtttgaaagatttcataccaaacggcatcgaatgaacttgaattcagaaaggagaataacgaagttaatcaggcaaaagagtgtcaagaccctgggggttggcacaggtgaccaggcagtgatcaaagtgccatggttgaccctcaaggacccttctcatgtccccctcgcaagcaaattccaccataaacatcccagacccataatcagataaggtaaggggtgcacaggtgatccaggcatttcgcatggcatcctcaaaccaatcaggcttgatggttcttgaggttaagacacggaagactaaacaaaaagacctttttggttggctatccctctacatcttcaacgagatcatgaacgattgattctttttagtaagattgaggatttgggagatattaagggctagagaatccataagggctactaaatataaacaacaacacagagaaaaaatagggcaagcaagactcgagagatggagaagtagggacccccaaaaaatctagatccttaaatagaaaaagagagacgtgtacctggagatgaaagacttgttgtggaagctagagtggaaatgctttattcgtcctttcaaaaaatctaggcagatcccgtagatggtaggaataatcatcgcctccctcctagagtgattcaaaacgacaacaaccataaatggtggaaacaggaaaagacctggagaaagaagaaaaaatgaagaaaaacaaaaaactaaatctaaaaacactcagtatgatctagcacaataaatgaaacgaggagtgaagtgaaggagtaataaatgagtgatcatagaatagaaaaagacaaagcccaagaagatacaataaatgtatagagagagagaaacggatggggagacaaatcgatgagaggacaagtatgaatggctaagaaaacaaagggaaggacgagatcaaaacgataccattaaggcgaaacacaggatgagatccagaatagggaagatcaggatgcaacccgctagagaggtccccacacacatgtatttgttccgctatccaaaaaggaaatttagttagagacaaaaataaaaattaggccttatat

SEQ ID NO: 308111 - DNA, 933 bp, Cannabis indica
taaaataatttccaacatcaactagtcccaatcgcaactccacaaggtttacttgtcgtggttatccctcaaatcatcttgtgtgccaagtgtgctataaacttggtcacacgtatgtcactatcaatttgacaaaaaatttcaaccacccaagattggtgaaaactaagccttactcactgagatttaggaagaagaccctcaagcctactactccaatgttcttcctaactttgctcatgatcatgaatggtatgctgacacaggtgccaacaaccatgttgccactagcaatggaacatttagacaattaaactccttatcatggtttgactccttggtagttggcgatggcaagcaacttcatatttcccacctaggtaattcctctttaccagctgctagttctcctttaacatcaaattttgtcctaaaagttccccaaataatcaaaaatattgttagtgtctggaaactcaccaaagataagtgtttttcttgaatttccctcaacctactattttgtgaaggacaagaaaacatggaaggtcttacttaaaggaagagtaaaaaatgctctacatttgtttactcaacctaccacaagaacaccagtccatattcagtgtcaactagaaactaaggagtccaaatcttcttttctttctgaatgtaataatgaatgtaataatgagactacagatgtagtctctaactcttgtaccaattcgataaccaataaagaaaacaattattgtagtccaaatgcatcttttgctgctttttctgttaatgttgctcaggatgtgaacatttggcattccaagttgggacatcctgtctctaatatccttgccaaaattttgtctaatgtcatgttggaaatattttaccaggatctagatttactaccaagtatgtttcattaacatc

SEQ ID NO: 308112 - DNA, 2714 bp, Cannabis indica
aattaatttccaactcaaatttaattttctaaaaatatatattacatttcgaaaatgctttaaaataaaatgaatgcaatcttttcgacaatgttgaagtatcttaattcataaacattacaattcttgttatatgagattaagagattatttatgatatatcttacccaagtttattgagtgttacacatttggcgcttatccaagttgtctattaattactttaaaaatatacaaatataattacaatctcatttggtttggcataatatatttgacataataactacaacataataagaaataatattcgacaattttggtcaaccttaataaaggggagaacgtagttctacttgactaaactaacaaatatataatcttattataagactacttgacttatttatgaaatcaaattattattattattttttataaacttgagattatatattcgaacttaattgctttaaacaacgtaggttcttcttaaggcaatatttcaatatgatgattttgatggtcatcagtcatgactcgtgcatctccatctcacatggtaaaatgtagactggaaatttcacattatatacttaaaaatgagcactctctattaaaacaatccccttataatacaaatttatgttattctttctccttttataaaaaatactcctttcattattttctctttctccattcctccctccttctctctttctaccaaccatcatcaccattatttgcaaaactcgttgcacgttttctccaccgagagcaaccaccatcactgccgaaaacaaccaccaccaccgtcgagaacaaccactaccaccaccaccatatactaaaaatgttgttggagttggttatttgtagtatgtatataaaatttgtttttaacaaatataaatattgtgtttacgttttgttaatttttcgcccaaaattttaatttgaattttttgcgttttttttcttcttctgatttttctatatttcgtgatattttgtgatatttagtgatgtatttataatgatagaccaaatctgaagttagggatgacaatttgcgatgataaacgatattttgtaatgtttgactaaaaaattaaaggtttgcgtatttagtgatatttttgcgatatgagactcaaaaaatgcaaaacacatcgcaaaatattgcaaaattacactcaatttttcataatgattagcgatgattttgcaatgttatcgatgtgttttacatttttttagttctcatattgcaaatacatcgcaaaatcattgcaaaacattgttaaatacgtaaacgtttaaatttttagtcaaacattgtaaaacattgcagaatttcatccctaacctcaaatttagtttatcattgcaaaatatcattgctaaaagcttccaaaaatatttccataaacctgtgaaacgccaataaagaccatcatgtgacttaacaaaaacatctatatgagagtttgagaaaggtcaaggcccacatcaactcgctttgacgaaaggaggcacaagctacaacttttacacactctatcaactaccaattttccaatgaaccccaatgtcactcgtaacaattccaattgacattaattacaaatgtttcgattaggggtgacattgatcataaacagtacagtacgaagagaaacacattatttgtaaccttgagagtaggggtgaaagtaaaaactgaaaaatcaaaactgaccaaactctaacaaaatttttggttccacgccattactgaatttgtaatatcgtaggggataaataataattaatttgagatccaaaatagagaataaaagttcagttagtaagagcgtgatcaaaaatagtccaatcttgtctgaggcaagcagaatttttttcctctgagagtatactgaggcagaagttaaggaagctttatttgatattccgggatgcaaggctccagggctagaagatttagcagctttttctttcaggataattgggatatggttaaggaagacatatgtaaagcagttctctcttttctatatacagggaaatttctcaaagagttaaactccacaacacttactattgatccaaaagtgaaatgcccagaattggtgaatgactttaggccaataacatgctgcaatgttttcaacaaagtggcaactaagatgttatgtactagattgagacaagttctacctgagttgatagcacagaaccaaagtggtttcattcaaggtagatatatagcctataacatcatggtttgccaagacttggtgaagcaatacaggaggaagaatataagaccaaattgtatgatcaaacttgatctaaggaagacttatgatactttggagtgagattttttggaagaaatgctttacagccttgcacttttcgaacagatttattcagctcatcatggtttgtatttgtacctatgttttagtatcacgattgataaagctatgcatggtttctttgaaacaaagcgagggcttcatcaagaaaatccaatgtctcccttattgtttattcttggatgaaatacttatcaagaattctttcacgagtgggtctcatggtagatttcaagtatcatgattggtgttttgaactgagtttgaatcacctctgctttgcgaatgatgtacttttgttttgtcatggtgacttcaagtccatct

SEQ ID NO: 308113 - DNA, 1073 bp, Cannabis indica
actaggatagggaggttatcaagagagagactctcgctaaaaataaaaattaataaatttaattactttgtatatttgtacctaactaaaattttactttctctattttacctcatatatttacattccaccatatattaatttctctatattttattttttatttaaatatatttttattcaatttagaaattaaataaataaatataataatatcacacacatatattacaaagtaatttaaaatattgatataatatttatagctcaaatgctcaataaatagtacttctctacatgtagctaagcatttttcataaactaaatcttttagctataataatccattgatagaacaatacttttgattgtttttgacctcttaactaaataatttaactattaactagggttgttcgcggtgcgagttgtgactttttttcaaaccaaaccgcatgtgcggtttttgtatttttttcaaaccccaacaacaccgcgagatcttaaaattacaaaaactacactgcaaaaaatacaatgtggtgcggtgcggtttgagcggtttacattatcatcattatcgaaccaatctataaagtttaacaatatgtaaaaatattttagaaaatttaaactaatttataatataaaatataaggttcaaacaatttattttatacgcatatataataaaagagatacgcatgcaacaaactgtttaaagcttgtttttgatgcgttaaatttgtctaaatttcacttaaaatttcacaaaaatttgcataatactttaaataactatattgtacattgtcacataaaaaaatttatgattaaaactatctgaatgtgaaaaatacaaatggaattgagtgcacctaaattttccaaaagtacataatagtataataattaacaagacctattcacacaaatacacacaaaaattgttcctcacgtgggtttaaacccatgtacaaaacaagaggtatatcaccaactagtcaacatatcataagctaatatttttaatttattatacttaaaacagaaaaaaaagggtaaataccatt

SEQ ID NO: 308114 - DNA, 1897 bp, Cannabis indica
agaaagaaaaagaagcttagtagaaaatttcggtctcaaatgtttgaagttgggcaacaagtgattttttccaactctttaacgaaggctactcatggacgactagattcaaggtgtgatggatctttcttggtggtgagagtataccccgatggggtggtggaacttcgtgatgcactttcaagaagaaaattcttagtgaaaggccaaggagtgaagtttgggggtggagaggtcaaccgagaaaagacctctatctctttgaaggatgtttgagacttgtaatttgggggtgccaaaaaaaaagaaaaaagaaagaaaaaaaaaaaaattctcaatgaaggcacccccaagaaagaaaaaaaaaagaagaaaaaagaggagaaaaatatattatattatataattagtttaaataaatgtcatggtgaaattgtttcctttctttgtgcagagaatcacgtgaagaaggctgtggaagtgaaggaattttaaattgagcaaaagaattaagtttggggtggcagaatgctatctagttgctatatcaatggcttagcaagaggtgttttggtactaggctgatcaaaggaattggggtttgaaaaaatagagtgagtggtctgttaaggaaaaacatgtgatggaaatgttggttatgacgcaatcattggatatgtctatttttgttcagataaatcacttggggttgtacttaatttttgaattgagtgagcccaagttgattgtggagatacaagggccccattttatactagtttcatcagtttcgggcccaattatttggtcaactaggccccagcaagtgtttacccgcccacttgttgctcaaaccaacattcaaccctacactactatcatcatcatcatcatcatcttcacttcccacgtctcagccgactgccactcacaaagccaacacgaacccagaaatcatccctacacgaaccactgaccagttcgtcctcaccatcttcaacccacgccacattcagctcaacccaacgccaacaaacgaaccaacccgaaccacccaaccgcatccttcaccaacagcacgaagcaccaacccgagccatctcaatttgatccaccctcgaacgacagtagcaactagtcgtcgaagcttcaccatcaccaccagcagcattctcgtcgaccccttcagcttcgactccgttcagttgactccgccaccacgttgagcttcaattcacccacatcacgagccagcaactacttcatctcctatcaacctaacccagctgctaacccaaccgcatccttcaccaacccgaagctacccaccatagtctcccaactcgacctaccccagcaatcctctcgtcctacaccgagcctccattcaacccgaactcaccaactccagtcgacccaccaccgtcgcacctacactcaaccctcaaacaccaacaacattcttgttgaccccttcagctccgactccgttcagttaactcgcactacccacgacttcacctgaactcactcaccaacctgaagcatcatccctagtcatcattctctccaagctcggccagcaacctccgtgcgaaccacccagctgctgaaaccgcaccaccataaccacataacactcaactcagccatgatatcaccagttcaacccgtaaccacctccaatcaacccgaacctcctagcagcaaccaacaaccatccgtgcgcccaaatcgaaccactgcactacgccgagctccaacgtcgttcgcacacaccagtacacaaccagcatcaccattacatcctattcttgctagcgagaagctgaagaagtaacactgccacagagcattggatctgtcaacaagttaatcatagcaatttagatcagat

SEQ ID NO: 308115 - DNA, 2001 bp, Cannabis indica
tgttaccaaacgacacctatatatagtgaaattaaatttgaaggctatatatatcaaaaaaaaaattctccacatatttttgtaaataggctagaaagccctaatccaaagtgggccgtttaagaagcccaattggtttgatgttataagatggagttcacacgtgcaaaagcagccgacaaaagagaagagacacgtgtaaagcattaagaatgaaaaggacaaaactagacacccctttagttactttttttattaaagagagagagtgattacgtatgatgtcatcatccctacctgacacggtcatcatagaagccagcattagtgatgacgtggcagaaaaagagggaccacagtaaggggttataatggagcccagcacagaatagagagcccccataaccatattcccttttccgaccagagactgagtctgttcattaattccaaagaaaattaaaaagaaaagctgaacaactccgccttctttgctccctcaaggaccggcaatcatcctctgctcctcactcaatcatggccctccgatttccccccatctatctcactcaccaactgacacctgtcactctattcattctactccacttcttctcaatactacttattattagtaattaaattaagagtatagcatttttataaatggtgctttatgattagttagccatattgtctaaaagatatttttttaaattatataaaactcgatacataactacatcaataacggtatgatactaaggagggtactaagcagcagtaatacctattagcaattctcttaaaataagtataacttaagaatttacaatttttgtgattaggctagattcagaagtttcagaaccctaactaacaaaaggtatttttacttatagaaattctaaaaccctaagctataatgctagaaattgtaatagtataacatatttatattttgtcaaataaacaatctacgtaagcaaatattttccaaaaatttaaccattagagtagctcttaggatttgagtaattttcaacgtaaatataattctcggttgtagtaaaatatattttgttaagaatttggaatttttgtaagtgtttggtcgttaagtgttaagttaattatcgacatattaccttgtgattggttcaaaactgagagttataagtaggtttttatctgcagccgaaaatttcaaaacctcaaaatatatttttacctaaggaagttctagaaccctaatagaaggtatttttacttacgaaagttttagaatcttaagatataaatgctagaaggtgtttattgtgtctaacaccaatgtgagatgccatattattattggtgtacttatatataaattagtgttatcttatagtggtgtatgatactattagtgactaataacaatattttacactatagggttgtaaataattaacaatatttttagaataattattaaattaattatgtggaaattaactcatttttttattgatattagaggaggaaatattcgaaattaggatattttctttgtgaagagaagtatgaaaccactaaattatgcctatgaccattatagaaactaatatttaattttactatataatatttcaattgtaattttaaatatattatttttacgttcatcttattcttattataatagttattattgaagaagatggtccttcttcttcttcttctttctttttcatattattattactttgtatgtgatgatgtaatggaataaaatgaaagctcttaattaattgaaaccaaattgaaaatgacataaagaatgtcaagtctctttctctcaaaactcacctattttcgttctaatttcacttacaaaaataattaagaaatttaccacttttggttgggcttagtggtaatatactttataattcacaagatacattcaaattacacacaatttttacatgtaattaatcgtaattatataatttaaaa

SEQ ID NO: 308116 - DNA, 1777 bp, Cannabis indica
aaaaaaaaaaaaaaaaaagacccttaatttatttctgtctaaatatttttttttttatgatgtacgaatttccctgggtttaattaacggctgaattagttagacaaatacgtaatgtttgtttgcttaaaaagttatatagtttagttttacatggccacatggttgttttggagactctctcgagcattagttgaactgttttgaatttctctaataattgacctctatatatctactctatttataattaatatttttcatttgatcacttcattaataaaaacactcaatcaaagatgaagagattgtgttaaaataattgtttgtaggagagtagtagagagtgtgagaagcatgctaaggatttgtttcggaggcaaggcagaccgccgcggcggccgccggctgctgctacaccgtaagaagtgtgtatggtccaatctactggaagagctgttagttgaagtattttcatggctgcctgcagagtctttgatccgattcaagtgcgtgaataaatattggtatggtctcataacttctctcctaaaaaactcatcatttgtccacaatcactttcgcaacctaaactccatctgtacctcttcatcatgtatggtcttttgttgccctggatatggccacttgtactacccggaactcgaatctctacgcaacaatgtcttcaaatctctcactatattctatgatccttctaccaaaatttctttgttggaacgttttgatctacctttgatttcgggtaaagaacacgcctctagtgtgattgggattcattgtaatggtataatttgccaagtgaattgccaaggagccatagctttatgcaatccggtggtaaagcaatggagaaatcttcccaaaacatgtctgagagagaatatcagcccccaaggagttggatttggttacgattcgaaatcgggtgattacaaagttgttaggtttgggtggagaaagaatcagcttggaaaagttttggctgaggtttatagcatgaggtcaaattcttggagagagattggagttgacattaaattcaagcgttggacaggcaatgccatgaaatgttattgtaatgggtttttttattggtctaaatgggttaattcatcatctgagtttttaatcatatcttttgatatgtgtaaggaggtatttagttatgtggcgttaccgggtaataatcttgtagtgcataaagagcagattcctacaatggctgcttggaatgactcacttgctttaatgttttatagtgagaataaagtattttttgagttgtgggtgctgaataataatcgagatcattgttggagtagaaaactagtgattgaagctggtggggtggaatttgcacgtccattgaatttcatgaaaaatgatgaaattctcatgcaaactgatgagaggaatatattggtgtacaacattcggaatcaagtgatcagaaaacgtattcaaaaggtgtttagattacaaagttgggatttcttctatgcccccagtttggtatctgttcatggcatttctgatcaagtcatctaataatctctctcaactatatttttattcaaggctaatttggatgcagtgtgttggagatcatagaagaagtacgaataaatgaagattccttaattttttttaattcttgtttagtaataaggtttatttctttttaagctggccggtttaaattctcataattttattttggtttaacttttttttaagcgttaattacaaattc

SEQ ID NO: 308117 - DNA, 1406 bp, Cannabis indica
gcaaaatcgaaatcatcaattagaaaaagaaaaagtcaagttttccaaaatttgacaactttccataagagaatttcttctcttacaagaagtttccaaacaaagaaaagtccagctgaaaaatgattctttcctaagatagaaaagagcaataaaatgcataaagtcaatgtaataaaaataaaatacacattaattaaaaaatattttgacaactaaattgtcaaaaaaggacctaacaaagagcgactacatcaactcctcattggatgaatccaccatcgggtaggctgaaactcaatattgatgctaccgttaactcaatgacacacacctctggctctggtgcagtattacgaaactgtagtggtgagatcattgctgctatggcgaagccttttcttggttctttttgttcagaggtcatggaagcaatggctttgatgtatagcctgcaatggcttaaagatttttagttacctattcactatattgagacagattctcttatggtggtgaaaggattacagtctaatcaagttattgttatttattttcattgtctgttagtggatatttctcttttattgtccaatttccttagagtttaggtctcttatgtctaataatactacccatttgttagctaagcacgctctcacgatggacactgattgtacttggttagaggaaatctcttctcctattgtattataatcttcaccttttaatataatagcattttatcttaaaaacaataatgtcaaaaataatatcaaaaaatattattgaacccatccttctaaaattctcaccaactaatttataaataaaaactacaaatgcctaattgggcgtgttggaatacatttggtgggttaacattgattttggcaactgtaataattacgtcacaaaaattttgaacactgacatatccacatatttcatttcttttgctaaataaaatcatgcaagtaaacaagaaaagaataatggttctcattacccattctcatttcttaataccataataagctaacacaccattaatatcacaaagatatgtaatcccgtggaaatctattacatatgagatgaattacacccccaccaaatagtgtgtgaatattgtcatgtaaaatctaatttattatgatagagttacatttttgatctgataagagtgtgtttggaagtaactgtgtaattactagggtagtaattacacagtttagtaattacattatattttaaaatgcaaggtgtgtttggatatgaggtggtaattacatatgaattcctaatatcttatttggcaaaatagttagtaattacataagaaaataatattttttaataattaatgtttaatatggaaagtttttagtaattacacagtgtaa

SEQ ID NO: 308118 - DNA, 2575 bp, Cannabis indica
gaacctaaacacaaaacaaaatgcattacactcgttagaaacctctccaggcagtcatactaaaatgatcaaaatgaataccataccaattccttcacgtcactcatatcttcagtgactccattccaagttgcaacaatatctgaaaacatccgatctgcatgatcaaatttaccaccttgcagttgaattgaaagagttgtaaatggttcgactctaaatagataatacagcacctgtaagagaataaaattgtaaaatccagaaacaaaagaagtgacaggaattttcttaataggataaaagagagacattaatgattctaccaattgtaatgtatgtattgagaatcaagacaaggataacatgataagaaataaaaaggcaccaataatcatacgggagcaatttgctaagaccataggctaaaatgcatgtcatatgggagcacatctgttccccaataaattatgccaaatacaaccaatgggcacaacgaaaaaacttcagaaacaaacgaacataattaaagaactcgtaataggataatgtgaggacagcataacattttatattttaaatataaattgactgaaaattcatatcaagtcttctacaaggaaccggcaatcttcaagaagacaaggtatgaatctcatagcttgcagcaaatataatggatatgacaaataaccaacttgggaaaagaaagaaaacccacagttccagcacttgaataatgtgaaccataatgaaatttgggcataactggatcctcaaagctagaatatcgctcttgaaactttttcaatcgatcaggatttagtgcaccaacaggctgcatgaaagcgtacaaggtttaatcacagtatctataaaattcatgtgaataaaaagaagtgaaaaattatacaaccttggaaagatctctgtatgaagaagggtctgcaagatccaaactctttgaagtgtagtcagaaagaatccaagggaaaacaggatactgccacaaaatataagggactaagcgatagactcagagacgttatctaatataaatgggagtatatccaaagaaatctacctgtgtaatgtcattataactacgtccagctaatgtattgagctgcattaagtactcaaaattgcttatctgcaccagtgtattccattagttattttccccttcaaatgaataatggaaaaaacatggccatttataaaatttcaaattgtaccctatatgtcatctaatctaattctaaatccatacctcccacctggcccagcgttccataagttgtgttctttctaaaagttgttcgggtctctacaaaaaagatgagttcaaacactttatcggcaaagttcagttatttacacgcaccgagcacaaaaatgcattatatgcttatgtatgtgttgactatgtaaatgatttaaaattagaggctaattgcttagtccttggttataaaaggaaggtggatttccgacaaaaattaaaattcatataaccttttctatataagaaacgagaactattctattaaaaatatagaaatgccaaaagaaaatgaggcatcatcataggctacaagaaacaacaccaactcctaactaggtctaaaatcaaacaatcattaaaagttttcaaatgaaaattccaaaatggcaacctaacacatgatggaacaaaatagaaagaaagagaaatattttttctttttgaaactaggatccctgctaaccctacaatatttggggaacagaaaactatacaaattgctatgtaggtacccataacgggctcgaacctcagaccttgtgggagcaaatcacatggtcagttatcccacttgggcagaaagaaagggaaatattacagtgcttaatttctaaatgtcaatttaactataagatgattacatataaatccagccaaaatgcaacaaggttgttattaaaaccacacctgagcattgaaccctaacattttattaagataaaaaactctagatattactgaaacaccattgcatgagtaatcgcggtatgaaataacaaatacagtttccataaccactagtaaatgcaataaaaatgacaagaatatagtcgaacctgagttgccagatagatattgttcagatgaggaggacgagcttgcacaatagctcgatatgcatttcttcttccttccatactctgaaaatagaatataggatggaggagggccaggaatgaaagaagatacatcagaaggtgactttaaggatcacacattattaaaatgtctccccaaataatgtgaaatattccttaaaaatatatctgaatgaaaataaggcatatagaagtaccgcaaaatcaaagaagaagttagaacggtcaaccataaaaagttccaaagcacttcttcttaagagatatctgcaacagaaacaaagtttgaaaccaaatagaagttaaacagtaagtagaaggatacagaatttgagacacataacagtaactccatttgtattatacaaatcaggaatataaaaaaataaataaaagagagagagagaga

SEQ ID NO: 308119 - DNA, 1105 bp, Cannabis indica
taaaagttaccaaccgaatcttttattttgttaaataaaaaaatagaccctatattttctaaaatagtacaaataagaccatgaattgattttttgtcaaaataaaaattaattataactcgatctaaaagtgctatgacaaaattatttatattttctatatctgttcgtattagaaattatcttcaagttggttatattacaaaaaaaaaaattatcaaaaagttgtgtcatactgtaccaacatttttaaaggtaagtccagtacggcttgtaggcttaatatttttgtgtcatactttacttagatcgatccatttttcttaactagttcgacctgtttttgctcgaattcctgctttccttttctatattgtttcacaattattgagctaatcataaatcatatgtattttttataactttgattatttttatataatttcttaacaatattttacagacaattatataaataattattagaatttaattacttataattactcaactttttaagatattttacaaataaattaacatatagttttagttctatatttttttaataattttacttatagagtcataatatttaatattatatttaagttttattattattttaatttatttaacttaataaatacatattacttattactattatcaaatcatataatcagtgagatttactgacagaaccgtttattaaaagtacacgggcgagacactatctaaaactataaattatatttatttgtaagctcattattaaaaaaaaataaataaataacccaacatttatagttcactcatcatcatgatcatatttctcttgaagaaatcttgcctagggaatgatcactagaaactgtcttttaattatggactcaaagctcaaccaaaaacaagtataggcatgagagaaccataataattatcttgattattatcactatcggatggtaaattaacataataattaatgtttaatcaatgcttgttgaaagataattattagaataattagcttttttagtccctgtacttatgacactatactatgatgccccttaatttataagtgtagttaaaaataccc

SEQ ID NO: 308120 - DNA, 4126 bp, Cannabis indica
tcctaagtattctatatatactattgtaatctcactcaaacactcctcttaatacaatgacccaattacccttttatttaatatatgttagaacaccacactaatcctaggtcctaacaggttcttggatgaattctatcaaattaaaataaaaagaatccttgtattggtttcagtatggtaatcctactgatgtttcagccattacataaaattagtataaattcttcaacaagcctactttagagaatagaagctagaagattacaagctattagtatcgaataacaacaatactgaccaatcatcaagtagcaaggaaaaaaaaatactataaaatccttagggttcaatatctgtatagccaccaatactctaattagcacctgctttgcttcaaccttcatatcactcaaaactaacattctatagcaaaaaccccactttctacattgttattattcttcctcccgaaagctccccttactttccagagttcaaatctctacatttaagtagtgtacactccaatttttcaagacaaagtaaataggaagttaataacactcgcaaattcaaacccataatttggaatgcattatatttctagaaaattagaagttgattgttaggtccttgctacgtttcacttatgcgaagagaggtaagaggccaatggtcctagggtagtttggttagggaagcttttgtaaagggtgggatggctttgagatgagctgagaattgttcactaaatcttggagaactctagtctcttggacattaatggaagcaaaccacatgtctgactatatgagtgaaccaccttgaatcaattatgcacttgttaacatacatatactttcttccttgctaaaatactctttgaagagattacatatttgcaaaaacacaatttcctgaaaatagtcattgtgataaaacaaagagtcacccatgcagatttcaagccaagccatttctctaagactctgcatgctatgtaaacaggtgggaagaatctatctcttatttaagtaagttaatggatgttttcatctagtttcaatactctcaaacattaatacatgtacaatgttttgttattgaagaaaaataaatagatacatacatattacatataataaaaatcaaaattcccatttcgtgtaaaaacaaaaacagaaaaaagattctatcaattcatccaataaaatgattaagaaaaaaaaactaaaacatatttttaccatttcttccatccaaatatgatcgtaaataattttaataaatacatgaaagaaaaatctaacctgttcgacccaatgtgtccttcaaattgagagaaataccagttgagactaagattgtgagatcatcaatgtcaccatatctagcagccttttatgcccaaagtagaaaagcagataacataaacagcgtagctcagtttgtatgtggtttaataaatttatagtaaaaaaatagtttaaataacagagaacgagatacctcaagcaaggcttcaatattctccggcgaggtggtatcgacggcagtctgctctgcctcggctgagttctccatccccatttttccagattctgcaaaacccgacaggggtttcgttcgctttcctcgttcttattctcatgggcttttccataggtctcgtcttataactgagaagcccgttcagttcaacatgggctaccagggcctaactgaaaatttacatttatttacaaatatattagttttttaaaagtttaagggcaaaagaaaagatttatttttcaaaatacaaaaagaatattatttttataatagttcgctggctagattggtgagaagaaatacaagttaagtaagtaaatagagagacacgaaatttataatagttcactccttatgtcgcgacggtaatagaattacgtttgcttcgagtttttattgctcacgaaaattacaagaaaattgattaaggcatgagctctaatttctagagatagaaagtagagagagtgctctgaccttattgggttttttttttttttgaatgtggaaaatgaactagtagaactctcattttatagggaatgatgtcctattaaaataatacaaaaaatattaaaaaaaaaatcactttaggctgatcttgatcattgatgatgatctaatggctacaattgactcttgatgaaaatcgtcaatttttagaacttgaatctcgtctgttggatcatttttcgtgtaatttgaggaaaaaattgttcttgtcttgaggaggaattatggacttcaaatattcggaattgtaatatgggtgtgagaaatgacttgaaatagctttgaaagagctttcaaatgcaagttgaatcacgtcaataaatcaacattgagggagttatgattgttttattaaatgttattcagaacctaacacccaagttgacaccctatgtccaagttgacaaactgacataaacataaatgttgagtgagtaaaaaaacgccctagacttgtatttcttgatgccttagtgacatactgacatcacttagtcaatttcttagttttgatgatgttgttcaccaattcttgaatatgtcgtttttttgtgaaatggggtagacttgaaacttcttaattttgtcgatattccaccttgttgagaggtgaaatatcaaagtgtaaatttgacttttcacaagttgtagctctcatttactacaaaaaaaaaatagtcagatgcttgagacgaaattgaaatcaaataagtagaacccaacgcacccggtcacacgtcagtttgggcgttgggtgctcttcggggtgtttcacatggctcgttataatacttctatggcattcgagattgcgaacaaggtctcctaccccattttttttaccaaaataagaagaatgcccagagaaaaattgtatttaaggagcagaaacatgcgaaccaggttccatgtcaacctaggcgcaaggcctagtgcccacgtcaacctgggccctaggtccctattttgaccttaaacgatctcgttttctcctcgaaatcacttgtatcttcgttatttctgaatacagaaaagattcccaaaacacttttcaagaaaactgatcggaaatagcccaggttgacatttaggcctggtgctagtgtcaacttgggcactggatccagctttttaccactaaatggttctgtttgattcccagaaacacttgtatcttaattattggtgaaaacagagaatatgctcgaaagacttctcaaaaaaactatttggaaatggctcaggttaacaatatgtcaacttaggcgctgggctcaacaccatgtcaatctgggtgttgggtcccaaatctggctcctagatggctctgtttatttttcaaaagcatccaaatcctaattgttgatgaaaacggagaatatgcccgaaagactttatctgaactgctgttggaagtggcccaagttgacaatatgtcaacctaagtgttaggtcctagttttggcctccaaattgatctgtttcttcccgaaagtacttgattcctcgttttggatggagaagaataaaattcttgggatacttcttcaatattatggttggaagcaccctaggttgacaaaatgtaaacatgggtggtgggtgcatcaccaagtagcccgggctctgggtgtccgagtgccccaaacggaaagtgttctgattctaattttgattatgatgcctctaacatgttcgtgataggtcttattcatgtctaaatacaaattttgaaccattttcactaagagggacccaaaaattaaaactctagttggaaatgtcaacctgggctttaggtgaaaaccctaggcgctcgggttgacttctgggatgtagttttgtctttttttggtttccaagccttggacttggattcttcttgtctttttggttcaacatacggaaagatggtgagttggaaacaacttggcaagatccaaaaaaccattttagagttctaagagtcaacccaagcgtagggctagggacccctcccaggttgactattatgacttgagactacttgtaacgccctaatgctaaggcacgctac

SEQ ID NO: 308121 - DNA, 1784 bp, Cannabis indica
aaaaataataatatattataaattttgaaattattttttaaataataatattcggtataccaatataaatgtggcatatatataaaagtatacatataagccgtttatatcaattgttaattatagaaaatagatgataccttaaatttattatcaattcaaaagttgagagagttttaacgttaaaatttaagtgtaaaagattaagaacaaatagactgactaatagttaaaagtgtttagcaaataaatttgctcattgcttgacaaaagactcttatttctttacaggttgtatgcttcagttagaggactgttcctctgcagtgcattctattattttgaacgaatttattaattaataaattatataattttattaaaaaaaaaaataaactgactaatagttaaaagtgtttatttttataaatgctccctaagtaaaaaaataaataaaatggtattcttgtaagaacactatagaataagggcattaataatatgatattaaattactcaaagaaaatgatattaataaagacaatgggcaccgccaaattccacgcgctgtgtgttctgtataacagagaggcaaagtctagtgggacccacacccgacatagtcaagtgaaaaccgccacgtagtataatggcattaaagaatagccaagcgtgtgttacagttgcacgtgaggcgcgtgaactctattctcggtgaagcgatcagcgataagcgcataaacctttctctgtcccattgagccattgtcccactaccacaaagatcgttaccgttccttatctataaaatcatcgcgaccgttgatttcggggaccgccaccattggtagtaatcatagtcgcatgcacttccacataaatagtaaatgattttatatttagtttaagaaatataaactaaagtaaactccttttttattattattttataaataataattataatatattgtatatttttataggaacaatatattgtaggttactaatgtgggaggaaaatagacaacattaaaacttgtaagtattcaaattatgcaaaaatactcaccaataatattgtgagtatttacctagaataacgaatactcaagtaaaagtaacgataattgaatgaaaacaataaatatttaaaaaatacaaaaaaaatatagtgatttcagccagagctcaatttatctcgtccacttttaaaagagagtttatgattgtttatttcgtgtctaattatcctcttatatagacatcaaatgatcatttaattacataattggctaaagaaattcattgcaatcattacttacatttaaatgaaataaaaatgtttataaaataaatggaagaaaattttcgatcgttctttaattaagtttagaacgagtgcgatttcagtcacatattggtcattggtatattgataacatatgaactcgcgaaaactaacaaggtaccgcgtattttgggcctacaagctgactaaagtaaaagtgcaagtttcacatgtggaggagaagcatcaagtcatcgcacatactcgatgtactatgcttacttatctctttgtcccactttatcgaacttggttatgtgatgcataacgtgtgaagaccattgtctcggtcacaaccttctcacatgtttctatcatgcgagtataactaagttataagggcttatatccttgacacatcatcctttcccgttaagaaatgagtctacgtgtcaattgtatatgagactgtactcgttatttagatgaaaaa

SEQ ID NO: 308122 - DNA, 1523 bp, Cannabis indica
tataaagtccaattttttctataataaatggaaataatatttggttaagcccagaagctattggaccacacccagaagcccactcaaaatgtgtacaagataacttcaaaatccctcgcctggatgctgatgctggccattaagggtgttcgcggtgcgtgcggtacagtttttgactattttttcaaaccaatctgcacatgcactttttttaatttatcaaaccgcacccacactgtaaacttaaaaattgtagaaatcacactgtaaaaaatggtgcaatgcggtacgatttttggagtttctgcggtttggactatcactaataattaaactatcacaaatacaacaaattttgaacatcacttattaaaaaaatcataaggaaatatgaaaaaaattaagttttaataatacaataatttgtggattttggattggatattcacatattaaacctaaataaatataaaaattaatatttctataatgtgcggtgcggtacagtatgaaccacacattaacaattcaaaatcgcaaaccgcactgcaccgcgcggttaggaaaaattcaaaccgcgaccgcaccgcaaagaatttcaaactatatttttttacagtgcggtgcggtacggacaatttgaacaatttaagtggtttgataaacacacctactggccatatccagctcaacaaggcaggagcttgtttatgatgcaaaatcagtggaatgaaatacataccaaaatagattcaaatcattacaatattttctaatcactcttgtgatggatggtttaagttctagtagtggttccagagttacagagatattttttaaaggtgttgaaagcaaaagtttttctaggctcactgatcatttatgtagataagtctgatatatagtggccacaaatattttatcattaatccttgtaaagtactaattacggcctactttaaataatgatgcatttcgaaacatgttattactcaaaaacaagccattgtcttttttatcgcaaattgagatttcaccgaaaaaaaaactaggctaccacaaaggagtgaagctccctaactaatgcaactgagtctgcaagtctaatgcaagacctttcaacaaacacaaaattacaagaacatatatatccttgattacatttgaaatagagaaaagaagagtcaaaattttctagcgagggagacgagatcaaccacaagcacttgacaatctgataaaactttcacgttcttccacccttgccaataattaaagcaaaatgacaagctagctaggaggattgtcataatttctgtttccagaacagaagaagcatgaaaagcattgacacttactttaagacacattccattcttataggcaatcgtagtaagaccaccctctctattgtggacaatgtttcacgtggaataaatggtagagaattgagccatatataagaacataggctactccactcattgccaaatgtttgtagatggaacccactaatcttcaac

SEQ ID NO: 308123 - DNA, 1425 bp, Cannabis indica
caatatttttgtaagtttccttttaaaatactatcttttctatggacacataaagtctatgtatgtgacatctaatagattgatcttagttttattctcaatgttattatgatatttggttgtcactttagaaacaatgaggcattgtgataccaaaacagagatgcttctaaggcagttccttaattgttgtttataaaatatgtatatcacagtaccatatcgaatcaacaactaaaacttaccttacgacataagaaaatcaatgaaactacttagtaatatagcatgaaatcttagtaatataatatgcaaatcattccaagatatcaacagagattggggaaacattttactcagagatacttttattttggctaaagaaaataaaaggaacgagtttttaaaagtctaggttgagttgcgaattaggtcactttttttaaaacgttcgcggcactgtctagaactgtgtaagtagactatcagtctcgtcgttcccaggataaaatagctcagtaaacactttataagagctttattacacgatagagaactatcgaaataccacaatcgatataactgtactattgctcggaatacatttgtaatataatcgtatattagtgtatataattttttctgtgagaaaaaaatgtaccgttggttctgatgcattatatggggaatgcacagaaagtagtaacggaaagaaagacgtttttgatcatgggaacattagaatgtaggtccgtgggaatgatgctaaaaatcaggacgagaaaaataataattaataaataaattttctccaaaaaaataaaataacaccacactacaaccacaccacaccaaccagctcagctcggtcgacaacgcacgtgtgttgttcaggcgagcatttgtgtgactcatctctaaatttgcacattatatacacttccaataaaattttcctatcccatatatcactcaatatactcacactgtcacacaccttacttctcattcaacgattttgtaaaattttactaaagttccaacatggcttgttagttacactactatttgtgtttgttttagggattgagagccacaaattttatgtatttttatgtattatttgatgttctttaatgttggacttcctaaatttgttttataattcttgaatttaagtttgaatgtttggataagaagttgtaatttatgtgcactttttttttttgctgaattgtaatttatttgcacttaaacaatgctttcacagcttgtatagttggtgttaattgtgaccagttttttcgattcactattatccaaagttttttccttttaaaatatttattctatataaagtgtgcctatataactaaaattcttggtttatgagaaatttatgggtgactttttatttttatttaa

SEQ ID NO: 308124 - DNA, 1214 bp, Cannabis indica
ttaatcaacatacttgtgagtagatctaagatcctggtaaaataaattccaacaaaaacttggggagtggtcttcccaagttggaggctaggtattgggaagaagcactacggctccagggaaaaagggtaaaatctaggaacgaactctgaatcgactaggggatgttaagactaacgggaaggtttcaaacactggccattggaactaggtgtttcaaagacgtaagcatcccctaacaagtcttccaaaacaaatcattagaaagaaatgacaaaaaccctattactattacatccagcccccacagccaaggcaaaataaattgtctcagtgaattaaaaagtatagcaaaaaggagatatataaaaaaacataacaaacaataagtaaagagtcctactagagtttaaggttgggcaccaccagaagggttggaggactctgtcccagacaaccgctccatcgtctcccaggaaagatcatgaacggaccttataccatgtatgacgcgggtctgttaggcatgattggtatccaatagctggctctccttcttcaagcctttgatttaaagcttggcctcaataagttcggctagaagggtattgttagcattgcgcaagtcacggttgtctacaatggcttggtcgagctccgtaaccagtgtgccagcctcctttcagtcctcccagccagcaaagccaactgttgtcatgtgcagaaatgaaagagctaagtatcaggatagaggtcaaaacataataaaagaagaggaaaagaaagtttcctgaaactttaccccaaccgcctgttgcttagctgaatgggccaatgcaaagacgtccacactgctgcatgacgccgaagtatccctgggcagcttagagacattcccaagcacttggtccgaaagtttagcagtgaaaggggcggcttctctccccaccttgtgggctaagcgcttctctaggccctccacctccacggttggtccagtaggggtcaaggtgtgaacattgtctaaaatttcagccttctatatggccaaaagcacggtggcctgtctacaaattaacactttctctgcctccaagcactccttcaaggctttgttcacttccctatctattttcatgccaagaagattgaagggaaaagcctttcttcggaatatgaaccccagagagggaatttttgttgggttttatgcc

SEQ ID NO: 308125 - DNA, 1081 bp, Cannabis indica
gattggattggatcggatactttgtgaacacccctaattctagcggttaacactacaattaaacctccgacggtaaagggggacaggagtaaatctgtgttgtttgatgcttgtgtccttgccaaaaaacttgatcagtttggggataaaaagtgggaaatattgagtagtttttgggtggagatgttgtcgtatgcggcttctcattgtcgtccggatagtcatgcccagctagtgagtaaaggtggggagcttattactttcgtttggttgctcatggctcatcttggcttgggagatcagtatcagaaggagggtcttgtcagagcagaccttgtcgttcgaaaggagggtcattgttcttgctttttttaatttaatttcaccatttagttgctagctagctctgtaacatttctatagttctacttatatgagtttgcattgcatgcatgtgaatattattcaagatgaaaacttttatcgatattatttttttagttaattgaaacacaaacgagaaatgttaaaaaggcaccacaaataaatcattataattagtaccgtacaatttaattttatgtctcacatatattctttatatacatatgttatggtatagtttttcaaaatgaaaacatctcatctccatataatgttcgttttatagaaagttagatgtcactattttcgtaagtctaatttgtccatccagaaagagttttcacggaatgccatgactagttgttctcttttcgaagagttttaaatagtcaattccaattgttgctattcttattcggaaagtcccttcaacacacacttttcggtctatcttctagtaattataagtgtgactctacttcgaaagaactttaactaaaaataattgacttaacaacttagttattgtagtcgtcgtctttagaatctttattcctaatctataaacactacaagaaaaatactaattagcagcgaacatattagcagttggtccagaattcgatgagaacgagaatattatatgactttatgtctcagttatagaaccaagaactacaatcacatcattagtatt

SEQ ID NO: 308126 - DNA, 1371 bp, Cannabis indica
ttcttcttattcttatgttcatgtgatctcaccattgaccacaaatttatattttgtcaaactattatacgtatacaaagtttaatacgagtttggctcaagttaatactataagagttgtcacatttaatgatgttattagcgaaatatcactacaaaaaattttacttttaatcacaacaaaacttgtgaaataaaagtaaaaaaattgtgattaattataaattttcatttctacattgtgactaaaaaatccgtagttaaaagtactagtcacagaaattataatttgttgtggccaaatatattcttaatcacaatacttattgtgactaaaactaaattagtgacaacttgtaactaaatattgtgtttagtcacaagtaactttttttattgtgactgaaagtcacatttagtcacatttttttttgttgttgaaactaaaaaattgttactaaatatatactcttttttgtagtatatatggataaaagtggttgtttcaaatccctaatttaatcaagttaactttttacttgcacttatttgcactaacaaaataatatttttcgagaatatttcatgaattttatttgtaaaaggcatagagggtaacaccaaaagttatgtccttttttggcaatttaatatacttttgatggtgcaaatcagtgtctgcaaaatgttgaaatctttggcataaatgacacacgttggaataggtttttgttgggaatgaaatattttgcaaaatgcgccgatagaaatcactaaaaaattgttagaaaaatttaaggtgaaaatttgtctgggggaaataatgttttactagcacaattagtaaaattgagccatttaatcaatcacattgtttcaatttagggtttcaatttaaacttttgctgacacaagtaaatgcgccagcaaaagtaacataccataatacaatctgctcccttcttcctcgccattcttcttcttctctccatctctttgcattctctctgtgtctctctctgtcccagctccatcgccacgaccgcactaccataacaccgtaatccaacttcgaccaccacaactcaaaatcccctaccctttatttagaaaaccactcaaaaaatctcaatctcctttgcccactaaaaaaaagcaccactggccactaccttgccggttgatcccattcagtagacgcgactctcctcccccgtctcaatgaaggtatttgttatttggtaatttttataattaattatttgtatttttcatatgtgagtataattttgtgtatatatttatattgttttaatttttatcattttgcacgttttaaatttgtatatatatatatgaatgtatattttt

SEQ ID NO: 308127 - DNA, 1797 bp, Cannabis indica
aagagaaagaacaaccctaacaaccatgctacatagactatttaatcaactctagttttcatggtggaatgctatcgcccaatgctacaacattgtcttgcattaacattttcattttctaacacctcctctcaaattaagtgaggttgaaaccacacttagtttgccaacaagaaaattaaaccttgaatttgatagacttttggtgaggcaatatgttacttgatcatgagatggtacatatcttatgtcaagagattcaacaatcactttgtctttaacaaaatgaacatccaattctaaatactttgtcctagcatgataaattggatttgaggcaagggcacttgcccccatgttgtcacaccaggtaactgggatttgttaaagaggaaagtaaaattctttgagtagagattgtattcaggtcagttcaacagagacttgagcaagggctctacagacaagagcatcaccaaagtatacacaataaccaactattgacttcctatcatcagggcaacacgcccaatcaacatctgaatatcctgttaagacaagtctgtcaatgtacttgatgtgtagtccatgattgatggtacctttcaggtacttgagaattctcttagttgcagatcaatgaacatcacttggggctttgagaaattgactcagcttgttaataataaaactgagatcatgtttggtgtgtgtcagatattgcaaccctctaatcaagcctctgtactcagtaggattttcaagaagtgttccatctgatatagaaagcattttcccactgtcatgggtgtaggacaaggcttcaaatgtgtcgtcttgtttttttggagcagttctattatgtatttagcttgagataaataaattgaaatagttaagtgatcctaagtcttttagagaaaaactttattcagtttcttgtgaattgccttagcttttatgagttgttgcctgctacaacaatatcatctacatagataagaataaacatgacatccgtaacagttttgtaaaagaagaaagaagaatcaactttagaattaacaaacttttagacgattaaagtttgtttcagcttgtcaaaccaggcccttgaagcctgctttaaaccatagatttttatttaacttgcacacatagtgtagattttttgtcttcaaatcctactggctggttcaggtatacattttcattcaagacaccattcaagaaggtattgtttatgtctaattgtctcacttcccaggacttaaaaacaccaatagtaagcactattctgattgtgcaagctttgacaacacgactaaaagtttcactatagttaattccaagtctttggttgaatcccttggcaactaatcttgctttgaatcattgaaaggttccattagcattccatatgattctaaacacccatctattaccaactatattcatgttaggcaatcgaggcaccaagatccaggttttgtttttcactaagagtttattttcatcatccattgcacctctccagccaggatgattgagagcttcttgcactgaacttggttccttatactggcagacgggttgagtcttcccaacatagggttttggcttgaagatatcagtcttagctcgagttatcatagggtgactaggagccaaatgacctgcaattttctcttcactatgtgcttgagattgaacttcattatcatcatcttaatcacattccacatcctgcacttcagagtgttcactggacacaatatattacaaagttactaattt

SEQ ID NO: 308128 - DNA, 2239 bp, Cannabis indica
tttttttatataattttacagaaatccacacaaaaatctacgtagcaactaacgaagcaatcaaaatcgcaatcaaaatctaaatagcaattctaatagaaattactggagcaacccaaactgtataaaaaataatatataaagtaattcccttaaaaaaaaacttaaattttaagtttttatttataggtatttcatttttattattttcaagttgcaactctatttattttctataacggtatataatgcagcttcaagagattttccacaattgttttttcagaaattttgtaactattattaggatgttgaaaaatatatctttttgcaaacaatacttatttttaattatgctttttgacattctataaaaatgatttgtaattttatgaaaatttgtgaaatcttcaagtaactatattatatatcgtcatataaaaagaaataatgttaaaacttattaaaaatatatgtacattagttggacttagctatagaataattttttattttatcaagtcaataaatatgttcatctaacatataatattattttgaatcttgtacattttataaaagttacactcatttattttgttttttgtttttttagaatcacactcaattattttgttaatattctatattttttaaaataataataagtagtatcttgagctcaacttagctcaattttagacgattttttttaataaaaccaatttaaaaataatttctaacacaaacagatacaaaaaatataaattgtaactagtattattataacacatccagatcgggttattattaagtttaattttgagaaaaatgtgcttagggtactatttgtagcatttttaaaaatacaaggtttaatttgtcatttaacaaaatagatagtccaattaataacttgtgcaaaatagaatgtccaaaatatataggggagaagttgaagaatacccactttttttgtacattaactaaatttacctctatataaaatttaattcaaatatatatctctttttatgagtattatacctaaattatccccacacactcatataattaagacataatttcaaacataatagatttatgttctttgtagatagatgtgtaagtttataggaaagttgacgcaaaatttttattagaaaataatgaaaagtatcgtgaaacaataggggtaaaattggtagaatgattgaaaaaagaggtgaaaataatagattttaaattaaaaaaattaaaattaaaagcatcaaattaaaagaagtatataacgtaatttctctacgtaccgtataaattttatgcaatccttgattatctgctaaatatagattcttgaaatcgttatcgacgaatgcaagcttagatccatctttggaaaaggttggaaaacactacctgaaaccctaaacaatcctacatctggacatggagaatccaacaccttgaaattttcttcaatatcatgatttccaccctgtcacaaaagtaaattagttattagctatttattttgtgaacaaggtttattaataattaatttaaaattaattaatattgtatatattaattaggttatagtatatttatttttttaagttatccatccatgccttatgtatgcagtaacaaaaaagttatctttagtaatgaatttttagttatagtataaaaataataattaataattaattataagtttttttttttttacttttagttataagttttagtaacaaattttggagtaatgacttgcaaatcatgatgatgaatatttgaaatttaattagtatatatgtatggaacagaaacaattagttttaagaattaatttttattttagtcttatattattgaaattaattttaggatgtaaatttaaattattttattataatttaaaatagttttccattttctttagtttgaaataaattaaaatacttattatattttaaaatacattgtaattgtttttaataatatacttactataggtttaaaagaagggcaaaaaagataaatgttaaataatttgaatattttggtacttttcataaaagataaaaaaaaaaatggtatttaactgtaaataaacacaaagtatttatatatatctttatatattaaaagtacctatttaacgacatttcttggtttaacatttcttggtttaacagaatatacttaaaaataaaaaaatattctgttaatt

SEQ ID NO: 308129 - DNA, 930 bp, Cannabis indica
tattttaaatcatatttctctcattgattattctgatattccaattacggtctaatattttttgtaaaaaaatgtatcaaatcttctataaatcaaagagaaaataaaaaaataaaatattattattgggcaccagtagtatttagtaaattctagatgtgttgtcttataattagttagcgatactctttataagtaattgcattaaattatataaaacccaatacataattagactaataatgatattgatacgtaagaaagtgttaaatactacaaaattgagtaccttttaatatttttctttaagataatgtatgtacttattggagatatgctcttagatgtaacggcccattgaagatatgctcttagatgtagtcgggataaagcctctaaaagccatcctaggattttttatttttttggtttaaaaaactcctaaaaatgattattcatcatgtttgatattatgttaaattgtttttgtcttaattaaaaaatgaattttttttaatccaaaggtttggtaacttaatcatgcatgaatctataattatatattccattatttaaaattagatttttataactacataattattttcatatttgttatggtgattaggtagatatcgattttgtaggtccaggtgcatgcgtaatgacatttagaacttaattgcaagaagtgacattttataagaaatggcattttagggatatatatataacggttttttataatatattaagtctataaagtaagtaaatttaatattaaattacattaagaataaaattaaaaaaaaattaacaactctggatatctggaaatggaatggaaggcacttagttgagaacgtatctattatattatttatatatatatctttatatattaaaagtgtctatctaacggcatttctt

SEQ ID NO: 308130 - DNA, 1124 bp, Cannabis indica
atgcatacaatctcatatataatcccatttaattatattcatattcatactatatataaatatatatatatatatagtatcgaccaattaatgaaaaccacgtagctcgaaacattttttatttgcaacatttttcaatctagtacagaagataacaaatctaggtagtcaactacaccaaaataatttatacaaataatcgtaataaattagaaattaatataaatcgaatatgtatatttatagggttagaaaagtttacctaagtaacatagtaatcttttttttaccacattctaatcatgtcataatatatatctcatattatatatacatgaagtgccagttttttcaacttaaatgattggaatgtggcttcttattcctttcaatatcaaatctttatctggaaaaaaaaacccccttttattgttttttgtatataaatataattgattgatttatttatttttctttgcatttatagctgttataagagaaaaaacaaaacaaacgacaaaccaataagctggcagttccctcgtccatttcactgaaataataataataataataataattaataataataaaaattggtcattttgtagggtccttaaaaggagagagataatagccaaagaattgtttttctcatcattgcacgtggtttcgtcctctcacctaagcaaaattataaatgaagacaaaacctctaattgcagtgtctgattttggtttctccaaatcaacatataaagtcaagtgcattaatatgtataattgtgtatatatatataagcttaaatgggttgttttcatatttggtattacaattcttctctattgtccctaactactcttttgaccccctttattgcttaagagttaagaccctaaaaaaaaaaaaaaacagtccttgcttttagtctttgttttttttaggtcttaaaataaataaaacaaaaaaagaaaaaaaatattatgggtttttttctactaagatgacaagtctttagttctctcttttgtgtgaatgagatgatgatgattatactcagtggcggaaccagacgacaaaataaggaggggccaaataaaatgtattttcacctaattttttt

SEQ ID NO: 308131 - DNA, 1678 bp, Cannabis indica
gaccacccaagttatggatattacacatctgccacaacctagggctcgggtcgtgacatgcacaattgtaaaaattgtgccaaataaaaatatatattaatttatttgtgtgttaaatttaacacttttaattaaatcatacattacagataatattattaatagagactacaaaaattagctagtgttatacttgccaatgatttttttttctttctattttcgcataatataaccaattagttttagtcacaataataatattgtataatcatcattagttaattaaattaaatttaattcactagtacttcaaagtttgataaaattcttattacatttttatattaagaaactagtcaactccgaatcgatccattctatcgaaattgcatctaaagaaaatataattaagagttaattgataatcaatacatttcaaaataatatttaatcatagcttacgtgatttaattaattgtaacatactttttataatatatattattttaattttgaattcataggtgatggatggtcgactcatgagttgaccttaacagctcagataatcttaattttctttcctaaagtggagacaattcgtatggtacattgacctttgtcataataatttttattattttattttattttaaaatcatataggagagaaactacttttttttttttttaaatttaagcacctcaaagaagttattactatcaaagttcatcaaatttcgtaacccacaaagttcttcacttttttttttcctctcttattttaaaaatggtaaaattattcctattcccatgataaaattcttcaaattttcattttaaaaaatgtcaaaattattccttctctcctgtcaagaaagtttgttcattttatttttaaaatgataacttatgatcagtaaaaattaacttaattaagcatctgaaaaaagtgaatatatatataaatataatatgaaaaaaaatatacatagatataaagcctataaaaatgtagcttgataacatgattgcttaatattccatgattaagcaaattcttctttgcagtctcattcttttcatcttatctcttcaaacattctgcttctttgtttaactctttatatattatagtaagccaatcatccattgaatggacacctatactataccacagttatcttattgtgtttattaattaattattaatatttttttcgtttgctaaatcctcaattattaatattattattcgttttatacttcattggtgtatatatatatatatataaatattaggttattgtttcatatattgtacatatattcaactactagtaaaaatttacgtgcgagtcacgtatgctaattttatgttaggtattttttactttatttaaaaaatataattaacaattaaagaaaaaatattattacttattaggtgagattattattatgtatatctaaataatgtaatttataattttaacaattaaaagtaaatactggatgtaatatattatagtgtttaagaaaacttgataatttaagtgtaatatgttcttaagataatctaaaaataaaataaaaattcatgttcaaatactaaagaaaacacaacttaaatgtgtgtgaaataaaaaagaaaattaaaaatcaatctctaaat

SEQ ID NO: 308132 - DNA, 6077 bp, Cannabis indica
ttttttaattatgatgccaaacttatacttagtatttgggaaatttgatttttcatgcttgctaataatttaaattagttctcattttcatttcaatctcaaaaattaatgggtaagtactttatttgaatgtcattgttatgagccagtttgatgatttatattattatttagaagttcaatttgtggttttttgtgtttttgttgttgttttattttttgtgaatgctcgacaggatacgatagggtacgatggtggatacaatagtagtttaatttggaggttggggataaaggttcaatagggtacgatagtggtacaataggttataatggtacgatgggggtacgatagtgtttaagttgttgcttaaaatctatgccatgataaagtttgctgatttttttgtgaatgctcgatagggtatgatggtgagtacaataatagtgtagtatgtagattagggttaaaaattcgatgcggtatgatagttgataaatgtactgctaacccaaaaactttccctagtgacgtgaacatcaatgattgacacgtggcaagaaggatgacatcacagagttgagtagacccgagtcatagcagtcgacttgggaggggaccctagccctgcacccaggttgactttgggagctccgagatggaaattcaaacttcaataactaaaatccaactcactatttactagtattatgtaccatgaagacatgtaacaacctaatccaagtcccgggagctaaaattacacaaacctattacccaaaagccaatctaggcacatagggtttcacccagcgcctaggttgacatacccaactagggtttcaatttttgggaccgtcttagtgcaaatgggtcaaactttacatggggacatcaactaggcataccacaaacatatttgagacattagaattagattcggagcaagttcatttttgagcacccaaagcgcgagcaccgcagtgcccaggttgacaatttgtcaatgtgggcaccttccaagtatcagattaacaatctgactttttcatcttctttgtcttcatcaaaaatagggaaagtggcacttttggggaagaaacaaaacttcctaaatgccaaaagcaaggcacaacgcccaagttaacactcggggccagcctagtgcccatgttgaaattttgtcaacctaggctaacttcgatgatgttttccaagaactcttataagcatcttctccactttcaaaagagattgagattcaaatatttctgaggaccaacaaaacttccaaagggccacaactgggacccagcgcccgggttagcacctagcactgggcccagcgcccaggttgatatgttggcaacctcggctgtttctaatcaatttcaccaaaaagtgttacgtgcatttcttccgtcattagaaataatgaagattcaagtaaaatcaggaagaaaaccacaaacccaagcccttagaaatagggcccagcacccgagttgacaatcaacttggtgcgctgcttttgattgatcaaatgtcaaatctaatttgtcaaatgaatccaaaatggtcaaaatcattgtaggagacctcatcctgaagttcaaagagcttggaagtatcaaaacaagatcccaggagctcgagaatggatacgtaaagcccaagttgacaaatggcctggtgcgttgggttctgcttatccaattctgattccatttcaatcatctgtctagtttttcacaataactaagatccatgaattcaaaaaattcaaattcacaactttatatttctcatttccaacaatggaaactcactcaaaaatgaagagtttcgagtttctcatttcgcaagacagcaacatctccgagaattggagaccagctttgccaaaacacagaaacaaactaagtgatgtcaaaatatcacttaggcatcttaaaatacatccatgggcgctgaaaagtaaacctgggtaatagatgtcaacctgggcgttgggtaatgaactacctttagtaaaataatcataacacactcaatattggtctgattaacgcgattcaaattgtattttaaagctaatttaatgatcaatcaagtcatgtctcataattcaatgtcaattatgaagctattagcaccaaaattcactcctgacaaagttacaaaaataagctttgggttacctgtagcaggacccgctgtgctctgaaaaatgaccatcaccatgaaaagctaattttcactttaatatcattatatactatcaaaaacaactgatttgtgccttcttcactgataaaaggagagttctcttagcttatttttactttcaaaaaactacccagaaggttagagtttctctctctaaaaattggagcttctaatacttagcctatttctgtaccaccatcttctgagaaataaaaactcaaagtagaagtagctccattagtgtcgcgatatagggagtgaaatactataaatttgtgtctctcttataactacttaactactttttattctcatcaatctaacgagcgggtgtgacacagaattatagtccagatttattaatcaacatgcacgatagtatgatagtggtatgatagttattttgtcatgacataaattttaagcaacaacttaaacctattgtaccctattgagcactattgtattcatcaactattgcaccactatcataccctatcgaacatatattcctaacctgcagattatactattatcgtacccacaatcataccctatcgttgagcattcacaaaaaatattagcaaactttatcatgctataaattttatcatgccatataaattttatcatggcataaattttagcaacaacttaaagactatcgtaccatatcctacctatatcaactatcgtgccctatgcatatttcaccaaaacttgatttttaccaaaagaaatcagcaaaaacacaaaaaactacatctcaaacatctaaactacattataaatcatcaaaatgtgtaataacaataatatttaaaaaaaaaacccacttaaccattaatttttttcatcgtgacataaatgtgacaaaaattgtgtttctactacagcttcctaaaatgtacctccgatggtgaggacgaagacgaggtcgatggtgggagttgggtttctctcagtgggaaaaggaaaagaaaagagaaaggaatagaaagaaattgagttagagaaaagggagaatgttggggtatcaatccatgtcccatatcgaaagaataagaaagagttgcctttgatataagtgttccacctattctagtaagagatattttgggaaggtgcccaaaaataaaactatgagggtttaggcccaaagtcgacaatatcatactaatttgggagttaagatgaggtggcaacccaacaagataaaagaacgggctccaaaaagtagtatcagagccaaaagttcaagatcgttgggatagtgggatgcatttgcgatgtgtgggagaagcccttaatgtgatgacctcataattgaagatctatatggcgcctccatcaaaagtctattagatattgaggtagtcaggtggcgtgtctcgttgatgcttacggctgtacaagatggagatcagtgttaggacttgtcataaaagtcttcctgacaaagttgatggtcagacgacaagttctgtcggtgatagctccaacataaagtgctttcgctagaggggaggccacgagtatgtagtccttgatttaaagggagaattattggggtatgaacccaagtcccacatcaaaagaataggcaagagttgtcttgaatataagtgttccacctatgccatgggtaagaggccttttgggaaggttcctaaaaaccaaccgtgggggcttaggctttgttgattgtggatttacccaagtaacgccgagtctgactaggatcagatcgttacttatgactgtcacgtgaggaataataataaatgtaagagacacacagatttatagaggtttggccccttttgtttaggtaataacctactccccttttagttgtattccctcttgataataccaagcatattacaagttaagaccttgtaatttctagctaggctctcttcaatattacaatgtgtttggcatgttagaagtatgagaagagagaggacttattgctatagtgcttatgagcatgattgaaacttagaacctgagtctgagcatgtgtatcttgtcctttatatagtagtaggacctacaggctgcacatagagatatccctagaaaataaagaacatatatttgaaatacaaagtaaaactaatccctaaagaatagggttgttatttgttgatggacagtccctacctttgtgggcagtttgaactgttctgaagtcgtgggaatgctgaaggcgagttggaaagcttgtgaggaaaatacgttctggtgtatttttgcacccttggctagccaaccctgttgaaggttgcccagagcgtggaacctgtccaccctggccggccagctataggttcggccaggaccttgctagcttgtgcacaatcctgtcaggataaacttgcttgtgtccactgtgcaaccatgggatcttgcaggttggaaggctgcacgacattaatctggcaggttggaaggtcacacagcactaacgtggcaggttggaaggctacacatcactaacctggtaggttggaaggttgcacgacactaacctaataggttggaagactgaacggtactaacctagcaggttggaaggcttcacgtacaaaccttgtaggttagaaggttgcacgacactaacctaacaggttaaaaagttgtacgacactaacctggcaggttagtgctgacctttcttcaatgtattgtcagctttttgccacgtggaggagacatgttagttggataaaatttgagataacatgctcaaagcggacaatattatactaatgtgggagataagatgaggaggcggctcaacaaaatagaagaatagagcccaacaaaaacttttcaaatggcaagtatatttttgaaattaaggagaaactgagtactaatttcctttgtcgttcaatttggtttattttaagttattggtcaattataaccatgaaaaattattttaaatatatattatatattgatactttacacattgattgatctaacatagcactatctatttgcaatattcttgttggttcatttatgtgatgatggttgactgatcttattggaaagcagtttgaactttcatgcaaaatgtaaatttctcttttcgcaagagaaataaaatattgatatagtagatgcatggggtatttactaattaattagagttttatagtaacagttccactaaaaaggaattccatgccgtaaagctaaaatggccatattagtgatacttggtgtgtctattatttcaattgataatgacgagtgaaaagataataaataataaatatgtataattataatgcatagaatctgactgactcatttattattcactaataagcataatgactaaagtgtatccggctcacaagagacacatcatcttcatatataattttttcaatttttcaatttagtttttcgaaaaaaagaaagaaagaagggcatgtagctgattttattagacatcggattgcatttatgcaacattgtcaaaaataaaattatacaggcatttttatttttattttattttattttgtatgagtaggtaagtaggcatttaagtactagccatatattaatacttgaaaccgctttgttttaatacacattgtgggattagttatgtcgtgtagtttatacgttgccaaaagaaagtaaataaaacgtgttataaacattgactatcttcttgatcagatatatatatatatataaatatatatatatatatagtagtcaccaaaacataaatatgtggtttaatattccctttctaattatatatgggagaaattgcggtattagtacataaatttgacaagttgtt

SEQ ID NO: 308133 - DNA, 1154 bp, Cannabis indica
ttaccaaacgccacctatattgtgattatatttttttttttattttaaacattaataattaaaaaatattatttttacgtgtaattattaactattttactaaattaaatataaaaatttgtattatttctttatattcaaacagtgtaattactaaattttatatttaccattctaataattacacattatcttttgatgtataataattaaacaattacttctaaacacattctatacaaaaaaaaaaaaatgttgaatgaaatcattttggtctaaattactaacaacgaggtcaaaattaactattcgacaaaataaaatataattaataaattgttgaagtttgaggaggagaagtgaggtgcattttgcaatgtaatgaatttatttgcttgccgtacacgtagagacttatccctagaatatcccattcctatccactaatcacactaatctaataaaacattgctccaaaatcacacctcttttccttccaccattattatgattattattattataaaaatgaataaaaaatacataataataataatattccctcatgttacaaatataatattatttgagtaatagattacttgtcgttataagaatcttactagcctactacaactccaatattttgggtacattggatccttccttccttgtattccatttatatacacaaagacaaagtggtagtatgtaacaataaatattccaatattcaaaccccaccatctcactcaaacttttatttgaaaaggaataattcttattgatcaataccaaacaccctcactaatttggccaacattacattgttcaatcacatttaggagaataaataagaataatcatgttgtagattaagttttgctaataaatgaattactagacaccatatattactcaatcttattaccttaccaagtctctattattataccattttatatatatatatatatatatatatatatataagaataataagtgtgtctatataaccgtaattcttggtttatgagaattcatgggtacttttatttatattaaagtaaatgtttattattaaaataaatagtttggtttacgagaattcatgggtacttttatttatattaaaataaatgtttattattaaa

SEQ ID NO: 308134 - DNA, 1346 bp, Cannabis indica
taagcaagtaaataaaatcacacattttaatgatcagtaaaagtaaatgaataaattattagttttaaaaaataaaaaaataattaaatgagatgactcattttaattattattaataaaaactaaatgagtgcataattgtaactgtttttaaatataatttagaaagttacacatgtcactcaattaataccacatacagttttacataaaaatattacataaaataaaatacaattcaatataatactatacaatacgatgtaatatgacgtaccaaacgaactcttagtgaggtgagtatttattagtttgagtaaaaatataattataatggttatttttttttaaacagcttaaaatttttatttttagatttaaattaattatatacttaaaataaattaattttttgattgaaatgtttaataaacttttttagaaattaatatattttttttctagtattttattatagaaaaataaataaagtcatctaaattttaagttataagtaattatttttaaataaattttaaatcaatcacaacctagtaataatctagataactaaaaataaatataattattataattacgtgtaattattgaaatcccattcatacttagtgtcaagatcatataattatttggttttcatatcttcatcaactggtcaaggatcactcattaatttgaagacttattatgaaatataatggcgacctcatacgaccagatatacaacttagttgaataaatatagttcaacataacttgtcacttactgatggggctgagtacttatttccaacctcaataataattatgtctgtcaatatcaaatccaaattcaaatctcactatatagcaatatagtaagaaagcgatgaggtggtttttatatataattatatatagtcctgtatattttaaaatttatataacaatatatatacaattaaaaatgaattggaggtggggtggggttgttagggggcaaactggggttggcatatggtagatcgtcgatagtgttgttaggttcgaacaagagcttaaatgagtttaggcttagcaaggccaaaaagtttccacccctaccagccaaattgtactgtgataatgttgtcatgtataggaggaacaccacgagggaacacatgctttcttctctcatttctagacaatactactattcagcttatttgagctagctacttattatagatatatagcaatgtatatatgtatatatatatagggatatgattttgtcccgtaatgtacttttacggaatgtattctgtggtacattagatgggtctcagggtacattaaatgag

SEQ ID NO: 308135 - DNA, 1334 bp, Cannabis indica
catgcttaaacttgcagatataatgaatataatctttcctctgaaattcaaataaaaatcctcaaatttgattaaaaaaaaaatgggaaaatgaagtttatatatatatatatatatattttgagatataagtgaaaaaaattaataagaaaatcaagaaggagtaatttaaataatcagaaatatatttgttaataattctaattgaaagattagagagaccagttagtttagaaaacagtactgagaattggaaatacttatcaattaattatgatcaagtctttgctatttatgttgaatgggtttgttacagtcttgaatttacagcagagaaaagaaaagaaaggctaaagaaaggtctaacaaccttagatacaaccgactatacactaaccagaattaactaattctgtaacaacctaaactaaattaactgtcaaccatatcagctaatactaatataaaatattgataatagacaatggcgtcatgattatctaactaataagataaagtctttttttccctaagaaaatataagatagaatattaaattccaagaaattgcgcaattgacttattcttagttaaaattttttatttatattatgtgttgtcaacaaacattgaagactatttggcattataagtatgaatatagactttggtaaaaagactcgtgaatttgtagttctcattgaaaatattatttacctaatataaaataaatataattatgtatttaatattgactcttgcttctagatactatagcaagcaattacaacaaaattataaatagcagctaaaatttgttaaaaatctcacaattgtattagcaatatattctgtctagctagctagccaaaccacccatatgatgatgaattcatcaaaaacaataagaagacataaccaaggttccaaaaattctaccaaaagttttcatgatgccctagtttccattcctccatcaacgaaaactatcgaaaaacccgatccaagttcttggtttggacccccaaatattttacttgactataaaagtagtatagttagacctcttcgtgttcaaccaatacaaactattgaaacacctgatccgaattcttgttttggacccctaaatattaatatactcgatcataagagtagtattaaatctcttcgtgttcaaccaatgaaaactatcgaaacaccagactcaacttcatgtgtttggacctctttttttttttcttacaatgccaaaatatccgtatattattaattcatttcatatatcccatttttatattgttgatttgattttttcagtatgtttgaattgg

SEQ ID NO: 308136 - DNA, 1409 bp, Cannabis indica
aaaaaagttcagggggcacgatttggtacatgtcaaagttcagggggaaaaattactaatcagcctaattcaaattcatagataacaattatagatggccagtaaataattacaaaattaaaacagattgtatgaaatttaattagaagaagaagaagaaattgaacaactacattaatttataaaataaattcaagtggacataataatccttaaaaactagctaggattttacttaggttcgttattgttttttactggaattggtagttgattctaaggtattcatagctaagttattaaagaataaaacatttaattaaactcttttatttttctaagttagataaacacaaatacagtcttctctctttaattttctctctctcagcctctctttgaaccaagggattcaaatccaaatttatctctttcttgaggaattaagctagaaatgggagggaattggatagcaatatctaaggtaagatttagttgtcttttctctttctttttttcaaagaaaagttaggtttggttttatgttatctgaattgggtcctgtccaaacttgagaagttttgggagtattttttgggttaaattaggtttgtttgggataattttgatgaggttttactggttgtagcttagattgagttaggtttgagcttttaagctcaagcttaactccacaatggtgatttcttctacagggcattatggttggattttctgcttggattatgttcatatgatgattattaggtgttcttgaatatttcatgaagtttggggtagatttgagttcgaaaggagatgtttggaaaatttgcagtagaaaacgacataccatgtttctagaaacgatctactacttttactgacagcaacctagaaaaatgatctgctatttttccaaaaatggcgtactgtttttcggagaatttttctatggtctcgattttagtattttctcgatatttagggtattaccatggtaataaaggtagggagtattttagttttgattttaaatccctgaaagtgtttagagtaacacttacctattttatgcaaatgtggcatagggcctccgttcagcaagcaatattttcactctgatcaatcgacatacttgattacagagttaaggtaagaatagtataaaatgtatatatagatagatatgcatgtgatatacatgattatattgttagaatatatgtattgatatcatagcggagcaaactataatgtcgagtccgcaacacaattatagtgctggtagtggccaaaatgaatgaattagtatcatggcgatgcatactatagtgtcgggtcaacaatgcgagtatagtactggttgtgactgatatttaattccataaagtattaattgacgctat

SEQ ID NO: 308137 - DNA, 4683 bp, Cannabis indica
tatgttgagtttagtttttttttttttttcataaaacgaagcactttacagttttttcacccatttatcaaggaggaccaattagaaaaataaattaaggtgtataccaatacatcccatttaaccgggtattgattcaatatatcaatattcatagtatatttcttttcatttcatacgtgcaccaattaaattgctttataatgaaggtattaatatgtctattttaaggatctctattaaagaaacaatatatgagcattaagcacaacattaatttattatcatcaacaatgctcataaatatcaaccaagatctaatattttatttagggcattaatgagtaataaaatatacatcctagacccatgtaatccatatgagccatttgatacttctaatcttctaatgagatgaatgcataaaagtttaatggtgaatcttgaagagaggccaatgtggaccaatcccattatgtcattctcattaccatcaattaaagcctcatatcttaaatatatatcacacccctctaactttaaggggttattagttaatagaacttatatggtttaattaatgttagattataatttaatgggccaattatagttataagagtgctctcatgtgcctctaatacaatcagttagtgtaaatcatctcattatgattattgataaatattaagcacatagttaatgattgtgtggttataaattatgcctatgattatattagttcacaataataatcctaacattctctcacttggacaatataatcaaccaccataacagtgtctatcacatataaggtaactaaataaattatacataacatcatatcaataggatatatatatatgtatatattgtggccttgtatggtttggttttgctgacatcatacactatgctctcaacatagagcaatgcaacaatgaacccaaaacttatgctgaagcaatgaggtcagttgataaacacaagtggagtgctgcaacagatgatgaaagtattctctcaagaagaataagacctagattctaatcaagaagagtctaggacaaagagtgattggctgcaaatggttatacaagtacaaggactctgttccatgaggtgaaaaaggcaaatacaaggctagattggtggcaaaggggtatacacagagagaaggggtagattatacataaatcttattccatgtggtaaagcatacctcaataaggttaatcttggccatgatagcaatctatgagttagagcttgaatagatgaatgtcaagacaacctttttacatggagaactagaggagcaaattctgatgcaggaactagagggctatgttgaaaaaggaatggaggacatggtgtgcttacttaaaaggtccttgtatgacctcaagcaatcacctagacaatggtacaaataatttgatgattatacttaagacaggcttcaaaaggagtgttttgacagttgtgtctatgtaaaatcataaaaaaatcagggccaatgtttacctacttttgtatgttgatgatatgctaattgctagcaatgatactcaagagattaatcaagtcaagaagatgctcaatgaggaatttgatatgaaggatctaggccctgtaagaaagatccttggcatggaaatattcagagataggaggtctaagactttgaaactatctcaagctgattatatttctaaagtattgagaaattttggattcgcagatgctaagcagttagcacaccaattgcataacatttaaaattgtctagcaaacagtccctcaccataaaacaagaaatcaaggaaatagaaggaatcccctatactaatctagttgggagcatcatgtacattatggagtgcacaagacctaatttgagccatgctattagcatagtcagcaggtatataagaaacccaagcatggaacattggaaggttgtcaagtggttaatgaggtatctcaaaggtacaacggatactggttcactatatggccttaatgaaaatgaacctgctgtaaatggctttgtagactctgactatgctggtgatattgacaccagaagatcacaatcaggctgggttttcagaatcaacaactacactataagttggaaagcaaatctccaaactatagcggcactctaaaaaaactgagacagagtacatctcttgcacaaaagctgtcaaagaagctatttggctcaagaaaattactagggaattagggataaaccaaaccactatcatgatacaatgtgacagtcaaagtgctctgcacaacaaaaatcaaatgtatcattaaagaaccaaacatattgatgtaagactacactttatcaaggatgtcctagctgaagagaaggtcaaactagtgaaaatgtccacagaagagaatgcctcagacatattgaccaaggcctttccaactgtaaagttcaaatattgtctgaatcttctcgggattatcaatgaatcacagtaatccttgacaatgtctgttgtctagtttgacattctttctttttgtgtctattgtttgtaatcttgaatggccttaacaagtatttcaaccaaggtaaaaattgttagttgtggtcggtatttctgttaagtttctcttaacaacctgttaggttagttagttacttattagacacttaggacaaagctataaataatgtctcattccttgtaataggacaacatagttttagacaccaaaactgtaaatactactactataatcaataaaagagcaagactgctcaagatttcttttcattctttattcaagcatggtttttagtgttcttgaatcaaggtatttgattgcataggaatcgatcgttccttacagtggtataattggaaaacttgaggttttatgcttaatgactaatgaggggtcataattaaaaaaataatcccttacttttctttacttttctcaaaatacaatctcataatttttttcatttctttcttcttaaattttcttatacatgttatagtcgtattatttttgggtttaatgcgttgagccgaaaacaacacatttaataaacatcttaagacgtatcaacacgactttgacacgaaaatttaatgtgtcactccaaacctatttatttcatgttgttttaagttctcatcatgtcgtgtcacaacatgacattgcaagactagcaagagtaagaggcatctcttattcttatttttgtattttcattcttccaaaccaacgtattcctaaatatttagtattgtatcatcagaagcgacattcacacgaaattgaggggggaaagaagacaggaaagcaggtccaagagcaacctagaaaatccgacctatgaatctcaccaccaccaccaccaccaccaccacgaccacgaccatgaccatcacttggagcaagagaaaggacacattccccgttttcgttcccttgtttcatttcttttgttgatttcttattaatagttgtgagattgcgagtattggctaaggttaatgatgatgagataatgagaataataaccaagtatataattaaattaatattattcaaactcatttcttttttcacaaaaattaagaggagcaatatattatggtttttattaatttgtgtcttaatgctactatctatgcaattatatatggtgtagaaatttattaagtaagaattaaaggatagagacattcatttatgtccattcaattattgtgatttgttttgtttgtttgttccattacattcgaagttattattttattgttcatgttttgaaatattttatcatttattgtttatgtttgaaatattcttagtactatttttatattattcttcacagattgacactaacaacttctcataaagaaatttgtttctcaacaactaaacttcttatgctatgtccatttagggtaaaacaaattgtgtgtctttactaattatgtaaaaaatttatttggtgacattatttttttaagaaaacaaaatctgaacaaacatttgaaatagccctttgtttttcaatgcgaaatgttaatagtaattttttaattttatttttaatatgagtgtttttttctagaaaatatgagtgtatttgataaacataattaggatatttattatatctaccactagaaaataattttccttttaagttcttcttcctttttttttctttgtcacaaaacacattaaacgaattttcttctacaataatcaaattataatttttttttttttgaaagggaaatcttcattaataacgtaatcaaacaggattaggcatgtcaagatagatttcttgacttgcacacaagggatcaaccccaatctacatggcgctagctttgttagtcaaagcataattgactaaaacatgagctactctattggcctcacgaaatacaaacgagataccatcaacactatcatacaataatagagttctaatttgatctagcaaacaatcaacatcatgacagccttcatcctatttttggattaattgaatggcttgtaaacagtccgattctatgctaaatcgatggagtttaacgctatcctttttttgtgatattttttttaaaaaaaattctaatgtcaactttttatagtctaatttttttt

SEQ ID NO: 308138 - DNA, 1422 bp, Cannabis indica
taaaatacaaaaaaaaaaaaaaaaaaaacgtaataataaaaaaatccataaatttcatggcccaaatttgcaatgctaggcattattattgctaaaattttacataagacacattgtgtgtatgtataatttgtgtattatttttaactataaactctttaaattattatataaccataataattgccgcagttttcacaataatctttttaagtcttgagagcatttaatttctttaaatatcacattttgtttttccatatgttttagagaatatgtgttactacctcgttacctctaggatccaacaattaataacatggatatatacgtagataataattattaatacctacatataattaatatatatttcatgggatagtgctcactgctcagctagtcttgttttcaaaatctttaagaaaattacccaagagcaagaattagtcaatgatccataataattagacttaaaagatatattgacaaaggggtaaagctaggtatatatataggacgttatatgtgtgttaatcaacctgtaaaattaagtacacatcgtacgtaactaatgtagttttatattcaacgcggtaattaataagaaagcaattaatactagagaactttcacgtgtatatatatatatatgcatgaaagtgagtattatagatcatttgttcaacgttaaaataattacatcagtagtaaaatataattgtcggaattgatgattattaggagaagaagtagagtagtagtagtagtatagtatacgtcaattatgtagattataactaaataaaccaagctaaagctatatgtagctatggagtcctatagctatatatttatatctacctctgaaattaaacaataatgtgttattgattagaaagttaaaaaaggactacccaaaagccgacgtacgtacggtaagtgtattaattgaaaaagaaggtgataattaaatagtacatgtctatcaatgtatgtatatatgtatgtgttgtacagaagatatatatacatatcacaataattataatgaataataatgataataacaataataatatagtgtcagtaacacagcgtaacatatgcatcaccaatgagtcgactactggtgagaatcacatgggctcgattttacgttttgaaataacaactgataatatatatggaagatatattataataataataggggtccagtatactagtactactttttgctgtttcagggtgataagtttttcaattacagacacctatttattcatctatttaaggacattttacaatatattttgtttgggaaatttgacaatatatgcttaaatatagcatatattgttttaatatactatgtaaaaaaaattaaaaaaatactctccaattaattataatcccaac

SEQ ID NO: 308139 - DNA, 954 bp, Cannabis indica
aaccaatcacaaaatcaaaatctaaatttaattgaattagacaagaataaacttagtttaaaaatgaatcaattatgaatctttattgattgaaaagtcagtagtacacgattggatatgtccaagaatataactcaacacaatgaataattataaaaaaaatgactcacattgagattgagtgaaatcacttcaagagtgatactcttattacatccctccacacacacttagtgtaatcttggacttactctctctaaactggattgtgaatctgagcattggaaatatcttgagagagtagaggcacttctatttataagcgttggtgtagttctatttaaattggtgtcagagctaattattataactaatatcaattttcttcagatgtatcttatgagtgataagatagaattacaattgataggagttaagcgagtttaatcccaacactaatatcttgagtgtatgaatcgaacctgtgagtactataacccagatcgttattcaaactaattgcaaagtgaagacaaggaggattattgaacgaataattaaaatcaatcataagcaatagttaaagacagttgagagaattaatatggtaaaagcagttaagaggttattctctaccactaaacactcatctaaacaattaaaatagtattaattctaatttcctatcaaattactaacagtaaataacacgaactcattattatcctaaatatatattcaagttaattaattaaagcgactgctcttaattaattatatcccctaaacaacttaaagaaaatctcatatagatttaatttagtacaacatatattaagcacaatgaagatagattaatttaagctactgttgcgaattttataatgtatatgcttgtaagtgacaagtaataatagtagtcaaaagactcatatcattctacagagattaaaa

SEQ ID NO: 308140 - DNA, 2802 bp, Cannabis indica
aaattaaataatatttatttattgtactgttccactttaaaaaattaaaataaataatatttatctactgaactgttcacttagatagatatttctgttatatttttttttatttaaatatgaatttgaattagaatttatttaaataacaaatatatatttaatatttgataaaattaaaataagcgaagattccccatcacagtaaccacatcttcctctgaaacccctaaaatccttcttagataaactctaattaccaatcctcccaaaactatcttcatgtaaacgaaccccaccattcattgaaacccttctacatctcatcgtccaaacaaaaacgcttcaatgaaatgccttttcattggaatcattgaaggaaattaacaattatcatcttgtcaatggtaaagtgagctttgtgattcgattaccacaaatccctgcgattgtcatctaaatcaaattcatttgtgtgtgctctttattattgttagaaattgtatacctgcattttaaacaggtgccaaatgtttctgatattgggctttggggtcaatatctttgattttctttatatttctttatatttctttatctttgattttctcttgcaatgaatttttttgattggtttttgttcctaataacatagagctctctacagctcaattctttttctttttcaaagatctattttttcattacggagcagaattttttgacaaagagagggttgttttcgagtttttcacatttggtggttgttgcctttttagttttaacccatgttcaattgggaatggtcccaagttgatcacataagaacaaaagattaaaacagagaaaattttaacatatgattattgacaatgaaagtgactaaatagtaatttggttaaaggttttgtcattagtcaccagcacgatggaggagattttcgctcatttagattaaaactatgacaagccttaacaaagttcagtattagtaatagtgctactttggttcttgaaactttctgtgttattttattttattttattttatacatatgacatgtgatctcccttcaaatacctccaaagttgagtacaagaaccaaatttgatttatgttatgaaaatttaccaaaagattttccaattacattggcacaaaaggattgagctaatttatttctaaaagtttgaattattacgactaatcaccaacaatatgaaattagaggtatgttctatttgaattaatttattcattgggcttatatatgtgtgtgtatttttttttttgtatttgtgtagttatgcgatgtttttttatgaattactctttttaaaaataaatatgtttaaatatatttatataaatttaaatctaaatataaaataatatcttttttttctagaaacataaagttacagactaatttcattaacaatcatcaatataaatattcaagtatgaataaatcagaacaaataaatattcaagtatttcaataaattcataaacaaataaatcagaacaattcaaaatctcaaatcaagaaaattaaaagtttagatttataatctttacaaatatgaaaaactttctgaaagtctagaacagataatcttcaaaatacatttatagacagtattacaacaagcaataggtatgtaatccttagctaaagtaggattagcaactttggggaccaaagaactaacagtctcgatcaaggttttaggcaactttccgttagcaaagaaatccaataccgctctagaaacatcattaccaattttactccataaatccttgtaaaactcatacccaaaccccatccaatcttgggctcttagtaaagtgaatgctgaaaagagctttcttgacatcccccttattgaaaggcttaatcaagttgatttgttgctccatatccagacatttaccctacttttcctcatctatcatgcttgttgctgaacttttgctgcccataaagttttcgaagtgcttgataaagtgtttaaccacttcctcatactcatcaataatagtgtcccccttcatgaacgtagtgatcctgttttcaagtcttcttttcctcataacagcatgaaagtaactagtattctcatcactaaatttgatccagttaacgttgctttgttgtctaaggttctgctcaaatctgtcctttgcagccataaaaatcagctacttatctgagacagcttgttgcaacaatctatcatttgaattcaaggcagcaatttcctggcagtcacaataacactcttttgccttcctgtaatccatagcaacatcccccacttgatgtttattaaaaatctttagagcatgtttgtaaagaccgcttatggttaatggttaatatcttgaattatttaaggtttatgtatgagattagttaataattatgaaatgtaaattttgggaatatatttaatatcatttaggttattatgctattttatgtatttatctaatttctgtgtggtgttcggaagctgtggaacgcggcgttggggcctttagagagtcatatgttatattttgttgtatgttatttgttcggggtattttgctaagtattgaattttcgggtttaatattgaccgaattacccttgtgggttattagttatttggtaaatagttggaggggtatagtggtcttttggacttaattagtattttgtcttttatgcaattatatgctgattatttagtttagtattgttttttttttaaaaaaaaaaaagaaaagatgaaccctttgtcttcaat

SEQ ID NO: 308141 - DNA, 1340 bp, Cannabis indica
aaagtttagggggaaaaattactaattatgtattgcagtgaaagggacagcgtgcatgtgttagtcattgaatgtgaaaaaaacttatggttgattagcagattgtcttgacctttaagctcccaaattttgaaattaaatgtctcagctactgatggggattccaacaaggtatcagtgttgtctccaaagtatgtctttttcttacagcttcatattatctaacaagcgatggtaaattcatgtattggttaaactatctttttttatattacaattttcattttgtatgtttttccagtaataattattggtagctttgtttgtcaatctagtgtagattttccaccaaaatatcaagactggaatttgaccgatcttcttgatcttttttgaagctccaattttttttttttttacaaaggctccaattgttaagaatgattcaaatcctaaggtaattttgttgaagtttgcttctattgcattttatatgtttttcctttataatttctttctcttattttattaagcaattgagaaaggtagaattagaactgggaggaaatcatccttatagttttgagggaaaatctatattctaagcaattataatctactgaagaagtaaacgagttgcacaaacatttttttctcacttcctacttaattggattactaataaatgtacatgtgttcctcgctgttgtggaacgttttcgtttcaaactttcattggacctttacactcatggaatgatggctcttaaagatgggtacgttgttggaaatattttaccaagatctagatttactaacaagtatgttgaattaatatcctaaatatgaattaacacataagagtttagaaaaacatacattgattgcagccgaataatatgactccttccgtcgagatcttcccttgttcctttctgtcacaaagtatcatcaacatctgagcctgaatctccttctctctttcgggttagttactaccatcttccgagtacttgacttgctatgtgtatgcatgacactctatcactatgggccgaataggtgaagaacaataaagtagggttcgaatcactatagaaggtgtctctcatctactagttgtcttataaagttagaaactagatttggcaggttgaaggtgttggatgagaatgagagcatcatgttcggtttatagtgtttcaactagggcttaaatttgaattatatggattaaaaaagaataaaatattaggcaaaaattacacatagtggccgaccacttaatggatcactctctagttacaattttgtcactttatttcaaccacttattcttc

SEQ ID NO: 308142 - DNA, 1582 bp, Cannabis indica
taaagtgagattaattaagtccaaggaatttaggcgaaaagaaagtgtaactgaaaccatgaattattaaaacaaaatgtaaagaataccaaccaatccgaagcagtaatgatgactccagcccaaagaggcaaaaccccatgactaagaatctgaatagcaatggcactcccaatcacctcctgaatatcagctccaatcaatgccacctccgccatgaaccaaagaaccaatctggcccaattcggatactcgtcccggcaaagctccgccaagtgtcggcccgtggcgacaccaactcttgctgacaacaactggatcatgaggcccataatcgttgcccacatcaagagccagagcaatgagtacccagcaatggctccagcctggagatctccttccaggttgcctggatccaagaaggctatgctcatcaagaaccctggcccagtaaacaaccatagcttcttccacgagaacggtgggacgacacaggaatcaatggcctccggtgaattcaaatcgacaattaagatcttctctcgctcctcaaaagcaacttcttcttcgtcatcctcgtccggcgaatataatgacttgggaggcgatgaagttgactgggatcgtaataatcgatttgcttcctcatcttttccatcttccattggaatagagctcatcgagtagccgccgcaatacttgttggccaccgaaatattctctagatatcagggattcaataccggcgaattcggtgggtggtggagtagtgtagatattcccgagagatgatgaggaaaaaaagctcacacagacttgtccaccgagatgggtgtgcgcgtgcgagggagtttccgtgtcctgtacttgtatgctttttcgtatatttactttttcatttttcattttttccttttttaaactttttcctatcatccaaatcacaaaacacaacatacatcatagaccagtaaaaaaaaaaaacacacccacacaaacatagaaccggaggaattttccaccaataagtcaacaacttagctaaaaaaagaaagtatacaaagttagagattgagccgctacaagtaatacgatttgctaagatcgagttacctcaaaaaaatttgataaaacaatttgagacaaaattaaactttactactagctaaacaaacaacttaaacaaccttaataaaaacaccacctacacaatagatagatataaaaaaaaagaatagcatacttatatgataatattatatactatgaaaaaataattattttgactgcagatctcaattaatttgtatgggaaatttaatttttttttatgcatgatttcaaggttaatttgtttagaagacttaaactataggtaattgttagaatagccttattttacctaaatcccaaaattacccctctcaaaatctcacacctattctctctacttccctctattctctctattcgtcccaacccaaccatcccaaccccagccaaaaccccaaacgccagccacacacgcacagaggagacccactggcccacggcgctccccaccgacccacgacgcaccacc

SEQ ID NO: 308143 - DNA, 1292 bp, Cannabis indica
tttttaaaaaaaaaaataaataatcaaaatattcaccattgttaattcggtaattgcatcctaaactaaatttgcattaaattagcagttatcaatggacttaggcatgaatttcttattcactcatttttatttttcgacagaagtcgctcattcgattgagatatcaaatcaaggtttgccacaataggtttaatgctatccaagaaactttattccaagccttcttttaggatttctaatgacttctgtctcatagataaattttgggacttaagccttattatcatgtcaagcaatatcttgaagatgaataatttctagagagaactagaaaaccttaggtttagagaagttgagaaatgagaattgaagatgagcttgtgtgttaacttaacacagctcttgatattcattatatatatgctgagaaaagcaagaatacaatataactgaaaatagttagagaagttaacaactgaatataaactaactaataactctaattctcttcactaatacccccctcaagctgtatttggagtgttctaaattcagcttgttacataaaaattgaaatcttggagaagataatgacctagtaaataggtctgcagtttgatcttgagtagggatgtagcgaatttcaagcttgttttctgcaattcgatcttggatgtagtgtacatcaagttcaatatgctttgttcgtgtgtgaaaaactagattcaaggccaagacttgagcactctaattgtcacaccataggactggtggtgttttgtgcaatttgatgccaagttcaataagtaattaaagagtgcatccatatataccagtagagtggctgctgaagtaaaggctccatactcagactatgagctggatcgagccactgctttttgcttcctggtactccaattaagaagattacctcctagaaaaatacagaaaataaaaataaatccagtcccagcgagctccaaccacttctctaaatgtctaccgcatttgtgaaccgacgcaacccaaccacttgcgaactcgacgatacaaaaaaattgtcaataaaaaaataaaaatcaataagagaaaagaacgagatcgacgatcattgcaaaagaagaagaagagaagatcttcaatctcatgagaaaaagaagcagggtgaaatcgacctgaaacaattttaataaagagaatatacttgtacctgggtttgaaaggagcgagaatttcaaatacagacatggcaacaactgtgtgaaacttgtgtgtgtgtgtgtgagaga

SEQ ID NO: 308144 - DNA, 2122 bp, Cannabis indica
gttaaacttaagtatttatgcgacaaattactcttaataatataacgtcaaaaaaatctacaatgcacctatttctgtttcaaaaattaggagaatattttagttcaattttttttctatttgtttacgttgtagttattcaggacataaattagaaaaatttcacaccctaaaaataatagatgtcgaatctctcaaaattttgtgaaatactaaaattgatagaagtacattgtaaaagtatcctataaagtcaattaaaaaaaagactaatatcaaatatcataaaattaatttagagtatatatataataaaaaaagggtttttttttttttaatttttagttttaaccaaaaaaataataatattacaaaaatactttcagctggccaaataaacaaatatacagcccaaataaaaaaattacataaagaccacttacacacaccttcaacctaggatccatgcttcttaggcaaccatcgcgcaaccatcgcgcaaccacgcagtaacccaacgcaactaaaacgaaaattcaaccagaaagataaccaccattaattccggcaactttacttgaaaagatgaccagaatcaatcaaaacagggactgtttcgaattcatgaaaaaaaaatataagaaaactactacgaaactaaaattcaattggaaatccagtttagttttcataaaactaattttctcacttcaatttttagatccataaaatccatatctcaaaaagttgaactcgagttcccaaacaatccaattcaagtataatcccaaaaaaaaaaattacatcaatactacagtaaaatatttatcctggtgtatttttcgttgttttctaaatttctaatgatgaatttgtttatattaaatcatgaagaaacatgtagatagagttacatacgtggaaatactgttccgatttttaatgttccacaacaattgcattacagttgtataaacattttgctaacattaattttgtttgattgaacctttcgtctgatgcaaccttcggccaaccactcagcaaccatcgtctgattgtgtaagtgatattgtaagaggtattttggtaattaaaagcacataaaaagtataaatattatccacaccttataaaagtattttaataaataaagtgttaatttatatttttcatgtaataattagtataataaatttagtgcttgtatagtatatatattaattctaaaacaaatacaacttttaactctgatggttatagaataaaaaacatataaattataataatgacttttttgtaatcattataatgaaatcaaatattaaataaactttgacaaagtaatagttataactctaagcaaaatacaacagttagcaacagcacacaccgccccttacaactcagccacacgaccaacaaaacacctacttattttgtaatctcattaggtagtctctctcctacttagacaagtttataactctgaggtaatgaaccaaattatgaatcttcgagaatcaaatctcatccattatatgtatacaatatttactatatacaattaatgtaggtgataatctatatgtacatatacccaacatgcttattaactaggaatgtcaatgggtcggcccgactattttattttaagaattttaatattagcttataattttatatctatttttaattttgtattactatcaaatacaatactatgtttggtattgacatgtattaatagatactcggttcttaagttccaggtcccgcggtttgggtccgcgtccgggttctgggtcccgcggtctgggttcgggtttcgagttctgggtcccgcggtccgggtttgggtcccgcggtctgagtttgagttcgagtccgggtccaggtctgggttagggtcccgagtttcaagtcccgatccgggttcgggtcccaggtccgggtttgggtctcgcgtcagggtccgggtccgagttaaggttagggtcagcgtcagggttagggtccgggtctgggtcccaggtcccgtgttcgagtccgggtcacggcccgagtctgagtttgggtccgggtcacggtctaggtctgggtcctgggtcccggttcgggt

SEQ ID NO: 308145 - DNA, 1346 bp, Cannabis indica
aattatgtcgtgagttgaatgcaagcacaaaccttgcaggcttcgggaggacctatccttccgaaggcttatattattgttttaatctctccaggttcccaagtgtcgtgttatccttctggatgtttttactcctcctggaatggggtttaattacgatccaatgataaattctagctttccactaaccgggacccacacaaaacatgtggcttaggccacgtatattagtaaaaaattggtggcagcaattataataataatatatatgtagggtactctttaggtgagagcatcacttttgcttttatttgtgagaatattttttaagtcgttgaattgtaatcatgtggttattatttgattagttagaatagggcatcccacattagattattaacatttttatatattattttaaaaaagtgatcagttactttctaaataaagtgatcaattttatttttcttttaagagaataatatggtttgtttctcaataatttttactttctttaggagtctttgtttatgttatatttttttaaaaactatttcgtggaactcaaaaacagtacatccaaatatatattgaagagatgaattttatttttttattcctgtttgagtagaataaatttctctgtcatttttattaaccatttcatgcttctaaaacatacttggttgattggttcattatatttttcatgcttttgagtattccaagtgaaatactgatctgaacaaaaaaaaaaaatccttcatatcttttcaaaacatacacaactttttattaaatttattttgttttactcaatataaataaataactcttgacaaaaattaaaaattgaaaaactaccaaaagcagaatcctatataataaacaattgtttttaataaaaatctaatagcacgttttgcatgtaacttattgttacactgctctcatacatatagtactcatatgcacctcacccttttacccaatagtatactaaaacaattcccctcataggtgagagcaaatttgatgctcctattgttgggattttatgccctaaataaaacttattacaatctaatctgtttgttatcaataagagaattagaagtgatttgtgttaacatgtagttttcatgcttatggtttaatatatgcacaaaatatgttaagtccagaacatatattcattcacaattacagtgatgtcaacacagtggaatgtgattgtgattatatgattcagaagactaagtccctgtttcatcagagttttggatttacattgatgtgataatcagtgatgaagtgcacttacactttgcataagtgttatgttc

SEQ ID NO: 308146 - DNA, 1858 bp, Cannabis indica
gaatttgagataagatgcatgaggttacatattaaaattaattggcaatgggatgagtagtacattcatcttatatatggtaatttatttcctgacattagtattagaactaactctaatatatatcattttaattgagattgtttactattttttatatttattttatttaacactaagttttttgccatattaaagttgaccattagaactttataataaaatggtataaaattagtgtaaaaaattatgtaaaaatatgatgagttcatagaacctatctcccatatagggaaaatgtgcagtttattgtaataagtgacctttcaaaacattttcttttttcaaataacttatcttctcgatattgttataattgtttcacatcatcattcttaaatagagttctggtatatgttatagaaaaaaaggctataacaagccaaaacatacctaattcgcaataaatctagtatatatatttggataaaagagagaataaggtgtgatcagatcaaatttccatttgcataataagaaagttacaataatacattagatttagagtggcttaggaagagcatatgaagagagcacagatagtacggcagtgcaaataaatgcaaggaaaaggagactgatagaagcatacgacttctcaaaaaagtttcccaattcaagcagttgcttcatgtcgtttgttacaccaaatcctgctccggcacccgtcgctaacacatatgatataatctggccccaaaaacaataaaacactaattaatttttatctctattaattgaatactatatacgaataaatgcctacaacttatccaaactttacatgttcttaatttgtaccttgtcaccatagaaatcaaagataaggttgccttcactaccgctaattacactgaagattgtaaatgcaagttgcaaaagggaataagctacgcctatcaccatcgtgaaaagcacgtatctgcgtcattaaaaacaagaaattaacaacaatataatatgtcaatgatctttgtacacagtatacgacccaaatatatgtgtatataatacgtaccggtaagcaataatatcgttaaatctgagtcgcagatcgccagaatcggtttcaacagtcttggaagtggtggtgagcacaatgagcgatatcaagagaagaacaatcgttaggattctcaatacaagactcgcaacttttgaagctgttgattttgccatctttataataataataataattttaatttgcgtatatgtaggtactcttttatgatcagatttctcttttgatcctattgataccaccacaaagtattgtaccatatatatatagagttagaatatagtggttgccagttgctacggtggattcgtttgtgtgctggctggcccactatgccatgtcgactgagctacttgattgatcgaatacaaaagagtttactttgactttgacatatacggggagcactatatatgcatgtgtttgacccggaataagagccattgactaaatatttttatagcctaataaggatagaaatagtgtaccttgctaaaagaaaatggaaatagtgcatatttttttcttgtataggatacacagatcgcgtatataattagcaaaacaggttgagggttgacaatatattagaaaaatgataagagtagcatacttgtaaaatttaaaattgggtctcaaatataaacacgactattaaacaatttaagttacctataataacaatatttatattagggtaaatagcggtataagtaccaaaagtttcaagtttgtaagtggcataatctcaatgttattaagtatccaatattt

SEQ ID NO: 308147 - DNA, 1630 bp, Cannabis indica
tttctcacacacacatgcatcaaaaaatgctccagctctacttatttggcaagtaataaatcaccccaacactttcattcgtacttccccgggggtaaaaaaacaaactttgtttttaaccattttaccttggtgaatacatttcttaccaacccatctgaatcatttcttgtggggaaggtcaaaatcaaaataatattggctaattagaatttttaccaaagaattttgacatgtaccaaattgtgctcttgaatttttaaggtcgttaaaaatactcaattattgagattaataaaaaaaaagtctaacatggatgaaagttcagagtcatgatttagtatatgtcaagatagaggggcatgatttggtagatatcaaagtccggggagcatgagttagtacataaacaattactgaaatagtaaattgaataaaattaaacaaaaatctttaaatttaacaacctcaaaagtttaggagaaatttttaaccgctagaaaagtccaaaaaacatgatttggtacatgttaaagtttatagggtaaaaattctaattagccaataatatttaacaaataatataaatttgatgagaacgattattgaagttgttaaatgtggttcactttcaaatgtgcatggggagacttgtgttggtcaagtcagtcttcattgattcttttatgcatggtttaaaaaataatatggattctctcatcactttatttaatggtaacgatttttaattttgtttgggcatgaaaatgtgatgtaaattgtatctttctttggatcaaaaggatttatgtttgttgaaaagactcaaaatatttgatggaagtttttttgctcttgaattcattcctcttaaattattatttatagggctcgtttgaaacgtcgcattatgtcatattatattaaagtagattatatattatattatatttttatataatattatattaaagtttaatttatactaaaatatttaagtgtccataaaaattaatatcacatatagttttatataaaaatattgcataaaatataattcaatataatactatacaatacaatacattgtaatacggcataccaaacgaacttatctcttcattgtccatctatttgttatctgtttttagcttatctccctctcaagattccacatctatttgttaggatttcatgaagggtcctttgtcattgtaagtccttccacccttagtgggccttcttgtaccctgtaacatgacctcattattgatatcctccactagcagcctaagtttgtcacaaatctcagactagatgatataagaagcactctcacattcggtcatccttgggcctttagggaaacctgttggaaattgtaacttattgtggttaatatttgattgttctaatcaattaattcttttaagtatactatgttatataaattaacaattaacccaagatctatttgtatataacatagaacacaataataagatataataattaggtatgtgtacctgattgatccataacaattatctctgattgatccacaacagttactccaattcgatagtacaatactatcaactaagtcttcctccctagatctctaaatcag

SEQ ID NO: 308148 - DNA, 4189 bp, Cannabis indica
cacatagtgatattattctacctcaacattcaaaatttgaaataaataatattaactatgaaaatattctaaagagcaactttacaaaagatacactaaggtataagaatgtatactttgccacataagaaaaaataaaagagaaacatataggccattactttaactctattattactacatcatctcatcgttataatagatcacacataaaatattttggtgaaaaccattattagcaaaggaagaagaagactcgattccaaaaaactctaatcacatatctgttcattgataaaaaataatgaccatagatatagtacaaacacacaaactaggaatccttcttcggataattaccacctaaaaccaatctacaaagcaaagaaacagggctgacaatctaaaattatatacgaacaccgtagcaatagattactggtcatgggaggtaaaagtaacttcatgcaaaaggggcgttttctatgtcttacgcaggcacccaacatgaggaagcacaaagaatcctacccttccaaccctgaagcatccagttgctatcttcttcaactacaaaatccctgtggtacccatgtttaacaatagacttcattctcttcacaagctccatgtccaacgggagctgcctaaaccctgctcttgtaatccggagctgccactgcttgtatgtttcaggtctctctactctttccgaaccctcacatgctatgacattcataatctcccgcccaagaatatacttctcgaatgagagtctcaattgatcctctctggctaaaatagtatcagccccatcaagtaatgagctgaagaaaaatagtgtttcccggaagcgcgtaacaaagaaggggacattgtatgctccattaaaaacagcatgagcaaaaatgttaggcttgatcttcctgatcaagtttagaacagcatcccttggactccttaccgcagctgtctcatctaaaatgctcctaaatctgtgtagacaattcactgcaaggacttcatttctatcaattttaaggtcatcaatttggacattttcccattgttttgctatgccgttgtactcaaatggaacaccaaaacgctcacaatacttagctaagacacttcctgtttcttcgaccattttttctggccgaaaaccatgttgtgggaactctatccctgtaattcgaagcttaggtggcccaccaggccttctagagagactttgtatgaaaacaggccactggtaaccatataggataccaaaatctataatatgcagttttgtagctttctcagctgctttgaaaatcatttggtttgcaaagataattgaaatcttcttgtacgggttggcagaaatgtaggtatgataagttttcaggagaatatcagccggtaattttgtagcacccaaagtgtcacaaatctcttttccagtgccatccaatcgtgcttcaagggcatctgcgaataaatggcccaatctctgggttccatcaccaaatggagacgaatgcttcctaatcttctttaatagttcattagcattcctaatatcattagcagaaacagcttgtgcacacgaaatcaacaaagccaacaagtctaccacttccttgtcattgtttagtatcttagtcttagaagcagttttaccactattagtagttccatgagatcctccctcttgctgcctagaggagctgtctacttcattattttggtaggattcatcagatgtaccagaaggagcttcctgctcctcgcgaaaaagtaacaccttgtcaaacaactctgatagccctgtgtcatctgtagaaactgccatttgcttgttgcttctaccatctaccaaatctgtatcctcacgatcatggttcttcttcttctctgtcaatctgatatgcaattgctctctcttcttgtccttttttacctcaactaactcatttgagaccttctcatttgtatatggagacatgttcttattgttttccattggaaaaccaagttgattacctttgggaagaaacttattgccctcctctaaacctctcttgaactgcaacatcaactcattctcactcaaaaaattctgaagctcacccagggaagtacctattttgtaagtggagtttgcagaagattgtgagctcgaatctgaagtagactggttttcaaacttagctgaaggtcggtgtgccactgaatcaacagaagttccaacagaatgagtcgagttgccagtgctggaacaagaactagaactgatatcttctgagcagtcactgacacttgttgtgaaactatcatctgagctttgaaaattttggtctctatattgaggttgttcgtgttcatactcggatggcggatacttttcgccgagagcctcataaaaggatttctcagtagctataagagctgaagggtcgtagaacaaagagggctttgcctccatatcctcatccataagcatttggtttatgtaatcaagagcagtacaagaaaactcaccgtcattaacaagagaacccctctccgagctcatgctcgggtcaaaactatagtccataataatctcactagctctaatatcgtttatgctatctgggtattgatctaaactaacaatgaaactcaaattcgataattgagcaacatttccatcaatacatatcaacaatttaaccgattttcacagtaaccaaatcaatgaaaacttttaatttcatagtaataagaaaattaaaaattacaatcccgaacacaaacgcaccttccctgttgagaaaaagaccatagaagctgtaaaagtcaagcttaactggtagtcgctaactctggcgccgacttcgattaccgttactggagaagtgaaatcgccagggatcaaagcaagaagaggaaaaggtttagtgatgaattgaagagttttatattgatctgaacacaatttgggaatcaatagagtcgtcggagtcaaagtcgatcgttgcagagacaacagttcaagagctgcacctatttaaagttgattccccatttataaaatgacacgtttttctcttattatttcaagagaaatactaaatagcactagtggtggccactgttcgtatcgctatgggatgaactaagtatgaggttttacataattaaatataataaatttagagagtatcgctagcaatcacaacgtgatatgtcaagaaagtactagtacctaataacaatgttatatttccaattaaaagcaatgatttatttttttgaaaaaaaaatattgattggtgtccactagaaggtttttgaggtataattttgtaaaataatgtttcttttaagaaaaaaaattattttattgaaaaatcaatcaatatttcaatcaccaatattcaatataaacttagataaaagaaaagtataaagtggtcacatagctcattaaaattactctaaattagtaagtaaatcgtgtttcgcgtgtagttgtttataaaaaattttaaattgcatatataaatattaattgaacaattaaattataccaaataattttaaatatatttttaagtataattaaaaattatgtatataaagaactttaagactatgtttgaaataatttttgtgaaaaaaaaagtaggaaaagtatcgggaaaaaatgtggaaataaaaaaaataataaattctcatatttggtatggaaagaaagattggaaaacactcaattcaataaattttcatattaagcttaaaaaattagtccaaaattagttttttatacatgtatttatatatgttgggtgttcattggatcacatccaatgtttttaggcttatccagatctaatccaatcatatattggatgttagattttaccatccaatccgatccaatcaatttcagtcatccaatcgatccaacatccattggatgttggattggaacggttctatctattagatatatttcatatatatttattggtttaatttgggtttattcaatattttagacctattattttttggatcggattggatccatccaatattttaggtccagtatgtattggatttgactagatccatccagtctaagaaaaaaagagtaaaattttaatgttaattttcatatatagatatagatttgacatataacaatataaaa

SEQ ID NO: 308149 - DNA, 2178 bp, Cannabis indica
gcatcgtatcatattttttacagtattcctagaatccccatcatcatcaggaaaataaggtttcaaaggttttgatgcaaaattggaacatcatacctttcttcaaacaattcaatggactccggtacgcttccgctactctctaatttattatttgattctcttgaattaattatagctatatttagaattttacagtgttcttaacacttgtgtctaaatgctatgttttagttacatatagttttttgtcatactaaaagtcacatttaattacaaaaaatttatattgtgactaataagttatcactaaaaacaacaatttttgaaataaagtcatgttcattgaaccacaaatagcttacatactaacaatgttaattaaaataaattcatacatcttacatataatattatcttttcacaaattatattagctcatatgctaatcaagtccggtagtgtaaagttttttagttttcataaattggtcctatatacttattttgtatctgacttgtaatttacattttgtactaatacatgcacccgttgctactttctttgcttgatgttatcaatcatcattcgtatagttgaaaaaataaaacataaaactatatttatttaattatttatatataacaagttacaagcacgaggaaatcgatccttaatatttcttctccgacttatataatatatataatacaaaactgaaacgttttgcaatatgtctcgtgcaaacgtgttacttaatcaagggtctttattatctagggtttatgatagccgaagagattagttaaaaaacacaaaagatatgtatttttcattgtatagtttataataatatatggtgtttaaatcatctctctctctatatatatatatgtaaatatacgtagataaattaatattaaatattaaccaaattgatatgtatagaaagagatggcgatagagttgaaagagagagaatttctgtagattgatgcaaataatctaccacaatggatgtgaagcggctgagaaatgacttttgcttggatgaatcgcaagccaaagctttgaaagtaatattcaaatcatgtttaaataaaaagacccctatatttattaataagaggatttgaaaggaggaaaatgattattcttagctttaaggaggagcaatagagtgggaattcgggcctaccaaaaaaagtagttttttactttaaaaaaaaaataaaaatttacactgtatattaatttatatacttttatattgttacaacgtataattaacttttatcctgtttatgttttacatttttacagtatatatttattacaaaatttttaaaattttactatcttgagttgtcatttcgagtcttttttctttttatgttaaattcatattatctcataccagactcatttatctttttcatcacaattttatatttttttttataaaaattaatgataaattgtcttgtctcttactacaatttttttttattaaaactaatgatatgaaagtgatgggttgtcttgtcacttgtgataattttttttattaaaactaatgataaaagtgatagattattttgtcacgtgtgacaatttattttttattaaaactaatgatgaaattcttacaaaatttctcgtacacgttttttctaaataaatgattctcttctcttctctttcaatacctctacccttttgtacgtagtaggtgtccaaaaaaaaaagtgagtatgtgaaggatgaagaacaagaacaattgggaaagataagagttttgttctctctccaatttaccttctaaattcaacaagtccaactctatctactattctctctcaatacaattttctctattctttctctctcatcctttccttttcttttctcttccctctctctcttttctccctgtcatcattcgaagcaatacgtagtttttctatattcatattctttagttcttcatattaaacatgtattggattatttaggattgaatatatatatggttctgttactggtttgttttgttattgttttaatgttattatactgttattttatttcatttatttatcacattttttaaaatattattgtattgctctatttttaatagtaataaaaaaataatgaaatttgtatgtaagttat

SEQ ID NO: 308150 - DNA, 1339 bp, Cannabis indica
ccttgtctcttttttcttttcattcttttatattacaaagtacatttaataataaagaaaaggtgtaatattggtggaagaatataattacatttttctttttaactttaataatttgaaggcaaaaaagcagatctttaaatatagaaaataacaattttagtctcacaaaatttaaaataaatatcacggccgtgggcatgcatgtttttttgaaaaaaaaaatatatgctttgattcttaactttttcttattatatgatttcaaaaaaaaaaaaaaacctttgtattattatattttttagaaagaaaaaaaaaaatacggtaatatataactgatcccatctccattaatgacttgtacatcaaaaccacttttctacttcaaaataatacataaaaataatcttcatttgcaacataaaatggcattcaccataatgacacgaactctatatagttttaaagaagagtgaaaaagacacatatataccttcataattattgatgtatactatttatttattttgttttttttaagattaaaaaattattccaatatttttaaaacaaacaaaaatatatgacacaaaaaaatatgatataataataaaaatatttaatattatatatttttattatatataacatgataattatagacgagctataataattaatttttttttgaatgaaagtaaactttattagatagaaacatccgctaaaacaatggagtgaagagcaagggaaacatcgctctcagtaaaaagacgacctgaccaataacaagtaccacgtgccatacagtgctctcacttagtcaacataacaaataattatcaacggtcaaaaaattagttatttcagttagattttcacttaactatatgagagctgtaaataagagtcttaggactcattttgaaaagtaagatcaagattggaaacacaaatagagtgagatgaattctcttaaaattctcaattgaaagtgagagttgtaaaaaaggtttttcatgtgtttgattgaatatcttcaagtgagatcaatttgtaactggtgtgaatgatcaccattagtgcgattttgtgtaagcttgatttgggtattgtaaacatcatcatcttcgccaattattaataaataatctacagctaacagagctgtttctatcataggattacataaccaaatttgtcattattgtggacattatcttacatagaataaatggtagagtattgagtcatatatcagaatatgtgatacttcactcatcaccaattggttttgagatggaaccctataattctcaacatgtatcagagtcatatc

SEQ ID NO: 308151 - DNA, 2308 bp, Cannabis indica
ctgatgtacctcccgttcaactctgagatggttaggttctagcttaattgtattacacgtgctctttgacttgtttgtaaccagcttaccaataggactatcgtgtacttacatcttgggaacacgctagtgtaattgagttgtaacgctaatgatggatatggaatctatagcttctataagtacatagaagtgaaacaatagtttccttagagcttgggtaaatgagtttaaatggtagagtactcattttggaaattatattagtttctcgaaataatatttacaagtagtcaagtattttaaggataaaatacattgaaggttaaaacggtaattttctccctactcgatgtagactatctataaatgatcattgattggttagattaaacaatgtataattataacatatttattcttggtgaagagagcattctatgtaataaagagtgcggtttcgaatctatagtagagtcaagaggaattaataagacagagaatttgctctttaaattctaaaactatctactgggatcttgattacatagactcatagtcctcacactatctgagataatcttcttttgtcatctcaattaattgatttataaatcgattatgattttaaataagactatgtcatatttatgaattttattaaacaagtgattatttgagaagaaaagagaatttaaggtttgtttattaattaaaagaccttgaatggtctaattaataaatacatataaataatagttttgtttaataattaattataattattaaataaagaaagttagcatttatatacttagaatagaaaaataacaattttgaggaaatataatgttgttccactttaagaaacaaaagtggtaaaaataaaactcgtgggccttcataagaagttcggccaaacggttttctttttgaagctttgggtctttttcttcagcccattttagttctaaacctaccctattgtcagttggtatattgtcttgctattatctttttgaattttttagtttgctggtcttttttttgggcttaattctcttgtgtctttttttgttgtatattgtgctttgtcgttgatcataattttccaaggggaagattataagagccatgtttttgtttggcaagttatgttgctttattttggtttagttgtattgttattctggtttttgtcttagctttttgaattgttcatagttgatctcagttgcatctgttttgtctagcttatcttacctttgccaggtccactttttagtttgtttcttaatttagttcaactagttactagctggcttgagctgttgagttagttagttgggtcggttttaccgaagtgtgagatacattaagcttattttgctttttctttttttttttttttaactaactctccatctttgatagaactctcacatagttcttgctctgctagggcagaatatttcttttttgtttgtttctttgattatgtattgcagatcgtaattcattggatcatcaagggttgaaaaaggagtgtgaatttgtaatgtctgaggggagtttagactgatcagctgaagggaattcaacttggtagaagcaagtggatcttgtcttctcaaatctaagagttcttagatttttgttcttatttgtattcaagtattcagtatctctttgtgtaagatcatttagattatgttgttgatttgtaaaataaaactgaaaaatgtactctgattgattttatagtggagattactttatctaatttttaagaacccaaacactactcggttagaatatgttttcaatacagaggaagcttataaattctgtgttcattgatttatcttttcagctttaattcatcaagattcatactttattcaattacttagctttcagaataacttggactttcaataatatacataccaaaaaatattaactaatttattaaattagaaagtaatacacatttcaaaactaaataaatatctcatatttttattttctaaattaataattaaattataaaaacacactcaataaaatttgaaactagaacttaacacacacatcagaataaaaattaaactataaatgagaatttgtgttactattttttcgaatttcggtatttattagcaacaaatttatttttttaagtattaattatgtcacaaattttttaatattaaagttaaaattttaatacaattttattaagcaattattattaattaaaatacacaatttatttttttatatataatttaaaatattttatata

SEQ ID NO: 308152 - DNA, 5108 bp, Cannabis indica
agaaacaaccttcttagtcagcataatcgtttaaggataaagacaaagagcagttgggtagttattaagtattttttacatgtgcataaaaatgaaacatggggaatgtccaaatttcatgaagagttgtaaatgaacaaattccaataaaaataaccgccatcctatacacctagaaataggggtcgaatcaagggaaaaaggatggaaaacttgaggaaaaactactttttacatttatagagagaattgtattatgtatccagagaaatatccctaataagaaagactcgtggagtatgtagattttaactacaaagccacgtcaaatatctggtgttcatttattattataattaaattttgtagtatatttattacgtaaaagacttatgtatttagttaacaaaaatctgcgttttgagagccttggtgataaaaaccaagaaaaatccgtccttataagcataattacacacctatatctatggtagataatattccttatgaaggaagccatccaaaggaggctacgcatcgccctagaaaagaagctcaaggatcgcagagaactaacacgactgaaacaccgcgttttgggaggaatgatggaaatttcaatcttgttggtgaacagatcacaaaaagatgaagtgaagatgcttatgatccaaccagatatttcccactggtggaactagaaaataggcaactttgaaaatgcctggctgaatcgaaccgaaaaaatactaagttggagcgagaagtcgcgacagccagggttgcacagggaaccattctttaaactcaacctgatccatcgataagtagaccacgaggaagacctttatgttccaggaccaacacgcaagagaataaccaagggaatcccacaaaagctcaggaagatcaacctagggatgtgagagatatcctaattaaaagagaaaatctacccaacacaagtaatacaagcaaccaggaacatcgatgagcttctctcggaacttcccattggtttgtaaactagggaaatgaacaaactaatgagccagagtcgtcttgcatgaatgcagatgtaagacagccatgaccaagaaactaggaaatccctcgtaatgatggaagaaatcctagaaataaacatgggtccagtcgactcctgtgacatcctcaaagggcttctcgcacaaataaagagaatacacacacatacttgagtaggggacgtgtctcaaatctcttttgtagaagaaggccattgtgagatgagacatgtgaaactagttcaagtataggagaatcacaatctcacaggcatagtagttgaactagaactaataggaaaacgcgagacaagaatagatattaagattattttactaattaagaaagtatgagtaactcgcgtagttaccagtctgaaagttattcagggactagatcgatgagtaattatgatcagaggggtcgtgaacctaacctccacaaacacataaatcgaaggaaaccagaccatcgtgagcacttaaatcgaaatgcacctcatctgcataatcaacttaatcaaaacttaaatcaacaacctgtggatcccattcaattgcgagtgatccaattggaggaaaagttttggaagtatcaagatggagcatatggaaaactgcaaggatatcaattagatgatgaaattgaaccatttcattctgatatcctaaacatcaatcaacaaccaggagaatcccttaaagtatacttgagtcgcttcaatatagctgcaactaaagtgagaaatttgaatgatagcattcatttaacagtccttcaggctggaattaaaattgttttatccactacagggggagacttatgggatgatttgcaggggagtcctctaaggtatattaatgaattcaatgaaagattatagatttttttgcaaaaagaagaagtagggattgaaatgaagttattaaagtaaggctcaggatataaacccagcactagtacagcaaccacgagcactgtgactacaaaggtagaaaatccaaatggttcaaataccaagagcaaagacgagtcaagagactcatccaaggataagaagaaacaaaagaagcatgagaagtatgtaactatttattcagtgtatactaaattaaatgagactcgcaaaaacatctctctcacgaatgaaaattaggtcgaattttgtagactagaaccaatatgacatgcgaggaataagcgagatccaactaagtgttgtcgcttccacaaatatattgggcatataactgaagaatgttgtcaataaaaagatgaaattgaaagtctaatctcgagaggatattttaggcaatacgtgaggacacaaggaaattagcctaatcaacccaataacctgaataacccaaggatacaacctcctcctatggaagggaggcatatcttagttatttctggagggttgcacctcgcagaaaacagcaatagtgcacaaaagatgtacattaatgaggttaaaaataaattatctacatttgctctagaacctttgaagaaagcaaagtcagatgaactgccaataatcttttctaaagaagactcgaaggatgttaggtaaccacatacagatcctcttgtgataacaattcaatttgccaataaaagaataaagagggttctcgtggacaatgtgagatttttcaacatcctttataaggaaacgttaaacaagatgggattagaggaagccaaattaagacattgtatggtaaatttgtgtgggttcgaaggtgatagtgtcacaagcctgggtatcattgaagttcctttaaccatgggggaatcaccgctgtctgcgactcaaatcaaagaattcttagctgtcgacatctctttcgtctacaatgtgttgaggggtcgcccagctttaattggactgggaccaataagttcgattaaatatttatccgtaaagttccttacacacgcagaagtggggactgttaaaggcgaccagttgttagcttgagaatgttatagggtggaactcaaaaatagaagagccagtcatcaactcattgtaattttgactgaagaaattaagaaggaaacaaaagactctgatcctaggatccatgatgttaattacaaactcaagccaattgatgagtttgaagaggtgaatttagaccttaacaatcccattaagtatgtttatattgggaaaagtttgggggaagaactaaaataacaattaatcaatttttgaaggcaaacaaacaatattttcttggagccattaagatatggtcaggatgaacctgaatgtgattttccatcacctaaatattcaccctgatcatctagcaaaacgtaaaaaatgacaacctctagattttgagagacaaaatatgctcaaagaagaggttgataagttgtttactaataaattcacacaagaagcctttatccctcgtggatatctaatcccatactcgtaccaaagccaaatggtacatggaggacatgtatggatttttcagacttaaataagacatgtcctaaagatttctttccactcccaaggatcgatcaatttgtagatgcaacagcagggcatgaatggatgactttcatggatgcatgtttagggtataacgagaataaaatgcatatcctagaccaagaatatacaagcttcgtgacaaatatggggctttattgttataaagtcatgccatttggattaaaaaatactagagtgacataccaatgcctcgtgaatggtacgtttgaaaaccaaataggatgaaatatggacatatacgtcgatgacaagttggtgaaatcagtcaaaagcaaggatcatacagaggatcttgcagaatgttttgccataattagaaagtatgatatgaagttgaatcctaaaaattgttcttttgggtttcatcagggaaatttttaggtttcattgtgaatgcaaggggaattgaaactaatctagttaaaataaaagcattaatcaagatgcctttatcgacaaagccaaaggaattttaggctttaacgggaagaatgacatcactcaatagattcatctcgaaatcattcgatatatgcctccaattttttaatatcttgcgaggcaataaatagttcgagtggaatgaagagtgtgaggaagcatttaagggaatgaagaaacatctttctacacctcaagttttagctaaagaaattactgtggaaacattattcctttttctggctatctcaaaacattctaaaagtgcaacattagtgcaagaattgggcaagaaccagaaacctatttactatgtcagtaaaaggttactagggatagaatcgtgataccaacctctagaaaaactcccactctgcttgattcatgcatctcgcaaattgcagccatattttatgacaagtactatcgaaatgtgatgcatgaggaagattaataaaatagtcaattgagctaggacagttcgaagtaacttaccaccaagggacttcaatcaaagggcgggcattggctgactttgtgatagaagtagttaactcaggagaagactccccaataggaaatgaaatagaaacatgtaaattgtttattgatggggcctcaaacgagaatggctcaggggcagggggaatagttgtttttgccagaaagcttcaaatacaattatgcacttaggttttagtttgaaacttaaaataacgagccagagtatgcactaaaagtcaagaatataatatgctttagttactcgcagctaatagtgattcaagtcttgggagagtactaagcaaagggcctaaaaatggccaaatacatagagaaagttcggaagaacttggaaatgttcaattatttcaaaatagaacaaattccaagagaacaaaactctaatgcaaatgcccttgacaaaatggcttctgagtttgatcttgataagttgaacttggtccccatggaggtactggacgagacaagtatatgtgaagaggaagatgtcaacatgataaatgtaaggcgtacatggataatgttggaatttattttaccaggatct

SEQ ID NO: 308153 - DNA, 770 bp, Cannabis indica
ttttttattgtataaaaaagacatagcatcaatgccattgtgtggcatcaatgcaaatttcaagaataacattcttttatctccaatggtatagcatctttatattttgccacataagtttttcacctcatcaagcattctccaaaatattaccattagagatgctcttatcggacattatttgtacgtcaatggcttccccaagatcaacatgaacaaaccaataaaatggttaatttgtgatcgatatttattgatgaatttccattagttattgttagaacttaagttaaaatttaacaaaaatatgagatgtattgtgtgtgatagtgctttgagtcttacaataaataagaatacttatttaaaattgtatatcaggtgtaactttgagaattgggtatgggctctaagggtcactgaagtttgtgcgcacggataaggactcacacaccggaccactacatacacgctatcttgcacgtgcggaatgattcatacagagattgttttatcatagagacatcgtggttgcttgcatacttcgggtagagtcgcaaaacatcttaaagactactcagccaaaaattttattcggtaatttattccaattttatattttaattcgatttaatagctattatagtaagattttattgaaagtattttaaccttaaaattgatgtgagaaccaaattataattacataaggcattattttttgtaaaatatttatatttttacgttcaaagaatgtttttttacatttt

SEQ ID NO: 308154 - DNA, 2307 bp, Cannabis indica
cacttggcaccaatatgaatgtacagccatcatgactgagttaataagaaccacacggccaacaaaagataaattcctcgtgctccaagttttgatccgagccattatcttttccacctacagtttgcaatctgctgaagatatcatttttgcacaaataggcacacccaagtatttgaaaggcaagctctgtttttgaaaacctaaggcatctagaatcctttgaacatcttcctctgtcatgttgctacagtatacagctgatttagaggggttaggaaccaaacctgaggtctgggagaagagttttagtccctacaacatgtagtatatgctcttgaagtcaccattgcaaaatcataagacatcatcagcaaaacttagatgatttagctcaagacccccacatctctcatggaaaataaaatctgacttcttcccgatcctcctcatgattcgggaaaagtattgcatttccataataaataaaagtggtgacattggatctccctgcctcaatcctcacttagcttggaaaaaaccatctaatgatccatttatcatcaatgagaatctaggagttctgacgcaagtcattaccaagttgatgaattttggtgggaattggaatccatagagcatctcttctatgaaatcccattcaatggtatcataggctttctgaaggtcaaccttaatcatacaactcgccttttttgtcctcctaccataacgtgtgatgagatctttgaaaatcatgatattgttcccaataaatcttccatgcacaaagtccccttgattttgtgccactaattcaggaagtaccattttgagcagagtgcatatgagcttagtagccgccttatagagcacattgcaacaagcaataggcctataatcccccaccatgttcagacacttacacttgggcaccaaagtaagaaccgtagaattcaattcctataaaagctgccctgtatgaaggaaagacatgatggtctctgctgtatccttgcctattatctcccaattatcataaaaaaaaagaaactcccatagccatttgggccaggagctttattccccgcgatctcaaagatggctttcttcacttcatcctctgtgtactcagcaagaagcatatcttcctgttctttagtcacaatcgttccctgccttattacactgccctgaaccggcttcctgctactcatattgctccctaaaagcttttggtaaaataccatgaatgcatcaatcacctgatcaggttttcccacccttactccttcaagatttgtaattgagagaacccgattctcagttcttctagcccgaagataggcatgaaaaaaacccagaatttatgtctccctctttcaaccaattcaggttgcttttctgctgtaggaaagagtaataggtttcttgtgcctgtgcataaagatctcgggcatccttttcttgcttctgtaattctccatttagagggtcaacccgcaacttttcttgacaaaaatcaagattttccttcgctgaaatagcagatgcaggtacatcattaaagtgcttgctgttcaaggcatataatccctgctttaaacttctgagtttcaccacaacttggtacatcttcgtcccttttacctgccttacccaactatccgtcaccatctccttataagtaggatgctttggccacatcttgaaataatgaaatggccttttgtgtccactaggcaaattatagatagttagaatagcgggagagtgatcaaaaataccttcgttttgaaaataaacctcaaccgctggaaacaactccatccaaaattaattcgctaggactctgtcaatcatggaatagattctatcttccccatgctgcttgttactccaagtaaaaaagttctctgtatatttgacatcttccaatttgcaactttccacacacgcatgaaactcctttgcttctttatagtttgttctaaagccaattctctcttccttgtgaaggatctcattgaaatccccaagaaccaagcaagcctccttaatagccatctcctttaggtcttgccaaagaattcttctcccttcataagagttgaatccatagataaaggtgacaaagaaacttgcctttctctctatggattcaacaaagagacgaatcatttggctagtgcacttaaggatattgaccacagagctatccggcttccaacacactattattctacctcccttattccacgtattattcgatgtaaaataccacccttcaaacatacgaacatataa

SEQ ID NO: 308155 - DNA, 1984 bp, Cannabis indica
tactaacaatatgacctaacacagcaatcacatttgaggttggaagattggctaagatttatgctgaaaacataatatattttccatcattttcaggtagagaaaacctctttgcttgtggaagtacattactgtgctttcctttgtcctttaagctaattttcaagtgtgatttctgttggggaaagttttgaaatatgcactattaataatcatgccatggaacatatattgatgaaattcttgttgtagagcaaattagcttgagcatcatgagagtttccattttcaggttgggatggctgccactcttgcaggtgtatgtcaagtgcctcttacggcggttttgctgctctttgaattgacacaggattatcggattgttctgccgctacttggaactgtggggttgtcttcatgggttacatccagacagtcaagaagaagagatgttcagggtaaaaggaaaccgaaaccgaaacaggaacaaagtcctaatatgcttcccttcagtgcaagtgggctaccttctaattatgctctcatgagaaaggaagatacaacaagtgacctttgtgaaattgaaagctcactttgtatagaagattctgatactgaaactgaaaatttagaagcaaaaatatgtgtttcagaagccatgaggacaagatatgtgactgtgatgatgaacacattgcttacagaagcattgactctcatgcttatggaaaaacagccttgtgctatgattgttgataatgataatatattaattggtttgcttacacttaaagacattcaagatttcagtaaatatgcaaaaacaagaagcagaatatccaaggttgttttctaggactaaacctgttgtcaactttgacacaatctctctgtgaccaagctaccttaactaattggtttttcatttttgcaggaggttttggtatctgagatgtgctcattggatggaggaaattgtagggtaccgtgggctgcaacgccgagtatggatctactctatgtacagatgattatgaataagcgcgggatagatgaggttccagttgttaccgagcaattcgaagatcaccgagggcacctagttggccttttggacagagaatgcatcagtctaactcaaaggttagtttataacacttaactaaatcttaagctctgatttctattactaaatcttactattttccattgttgatgggtgcagagctttagcaaccagagagtatctttgctaagattcccaaaagtgattgatggctcattttgttactaatcatcacaacacctcataatagtgacacaagttatggttttggtaataagtagtgtcataactcagctttcagtcaaaagggtttttacctattctttttggctttgtatatataattggaagatgaaatgttcccatctgttgtatagatacatcatcattcatacaaaaatggattatggagaagattcatgggaactttggccatcgaccctttacggctggtgtcattattggatcagagtagttgtttcatatatcaactgtcatatatacttacatgggattctctcagttttcagtttgttgttgttgttgttatttcatatatcaactgtcatatgttaatgacagtaagattttgtttaacacaatgtattgatattacagttttgttttttgcacacttgtattttgtatttaggggtgttaataaaatactcaatccaatccaacttgtacgattcaatttaattcataaagtgcggatattcgcacttgcacggattgaattgaaaaaatctaaaattcttactaaaagtaaccgatttaaattcaattcacatgtatttatatattacgtgacatataattaaataaaaacaaaaactactattaaaaaaaattattattcgtcctaaaatatctcggaatgaatgaaaaatactcttaaactatcaaaacattaaa

SEQ ID NO: 308156 - DNA, 1745 bp, Cannabis indica
cgcctaagatagttagggtgttacaaagagacttgtctgcatggtcacttgggggcacccatactgtacaagccattgaactagcacaaagaacttaaccagagaaattttaatgtttagaatacgttgcttaacctgcctctaagtcgtgcatgcatactttggcttggctaagtaaatatggtcccttacttgtcaaggccataagaagatagccaagattatagatcgcctggttggtcacacaatccatgataaaaagcattagggcaaaacgatagtagtgttcaaaaacagaggtcctataggcaaaagatatgaacatgaaggacttgggtgaataataaagtagtgttctaaaaaggccacaggccacatggaacatgaaaataaagtcatgttctaaaaatgcaacattccacgtggaacatgaaagtaagtagtgttgtaaagataaaaggccacaggccatgaaagccacaagctatgcgaaacatgaaaatattgtctatgttatgcaaatataatgttgattactactaataaaagtactgcctaaatgtgtgcaagggcaggaggagctgaatctgaagtcgcaagatcgagatacccaaagtctaggccagccttaccatcaacatgctggccggcgtggtcgtcactatgcttacggaccaccacctccataggtggtgggtcggccagcccctcgacatgagtctctgatgatgaccactctcgataggcagcggttgggtttgcctccatctgactctaaaaaatcacctttccacgagccaacattctctccacaaaagccttatttcccatcaatgacatactagctcgggggttatgcaacttgaactcataagtgagttcggagaacaagttagcatactcctcccttatggcctgctggccatcaagagcctacctcaatttctgcttgtgctgatcaaggtcagacttcagcccaaagatgaaggaagcttgtgtactattttctgtgtttctagcgccaagcataatctctaagccaaatccattctttatctctccacaaggagagcctccaactcagatatggcattgtccttaaccaaaagggaagcctccaaggtcttcacctactcccgaagagcatctgaggatccccgggagccatcacatgctgagcttagcttcattaaggcctaaaaataaaacaaaaaaacatctttgtcaaagccataacactggtcggccagcccccccatgggattgctatggctggctagcccctcacaggtacatccaaggccagccagacacatgcaacaaaccctaaggttgactagcctacatagggcaaaaaaggtgaacagagctaaaagtacaacttaccacagaaagatcccaaagactgggaaagtatagcctattcggcttgtcgtcaccaagctcctttagatccacatccatgaaagggagagctttctctgtgcatctattagctgccttagcaaccctctatctagtaataaacctcgctcctctaccgagcctccaagtaccttggcatgtcggtcgtatcacaggctgcccaactggtgtaggccctagcgaagggggaggtaaggacgacccagcagcatctccaccatgaaaagtcttggccagcttggccttcacttgtcttgcgggctcatttgaatgtcccccagcaagacctctcagcctggaagacatatctgcaaaaagaa

SEQ ID NO: 308157 - DNA, 1765 bp, Cannabis indica
aaccatgcaacataaaatgttatttttgatctttattaataagtaaatctgattattttgaaatgggttttacttagggcacaaaacccaacacttatgccataaataaaattacttgtactgtttctcattcataatttggttcatgtacaaattcaaaatgtatttctacactttggcacaatagacttggccatccctcatctgcaattcttacaaaagttatttaagaaataaacacaaagttgtctaaatctgatttacaattctgtgatgcatgccaatttgagaaaaatcatttaatgcattttagcagctcttcattaaaaataactcatcttttataacttatcaattcacatgtttggggtccttctccaaatgccactgctgaaggatacaagtattacattctatttgttgatgatttaacaaagtatagttggatttaccctatgaagagcaaaactgattctttttccaatctttctaacatttagaacttttgtggaaaaacagtttgacacaaatttaaaatgtctacaaactgaatggggtggggagtacagaaagttacaaccaattctacaaaaattaggcatcttgtttaggcacccttgtcctcatactcaccaacaacaaggtagagtagagagaaaacatagacatgaaagtgaaatgggattaactttgttagctcaagccaaaatgccttttagcttctggtgggatgcgtgtgtctctgttgtctatctcataaataggttaccaacaattatcagtggttacaaatctcccttccaatgtatctatggcatcaaatcagattacactttttaaaaaacctttggttgtgcatgttttccattcctcaaaccttacaatcaacataaatttcaattaaagacatctaaatgtgtctttcttggttatagtcctttccataaaggctatagatatttacactcttcaggtacaatctatattgcaagaagtgtaaacttcaatgaaaaagagtttccttattcaagtatgttttacactacacaaagtcccacatatcacaaaattttgcttgcaccagcctttgtaattctcagtgtgtctccagctgataacctttcccaatttcaatttggttctctaagtttaacttcagatactcaacaccatacaccatacgtgtcagcgtcttctcatcaaaatgatgaacaaacagctgagtcatcttccacaaatgacattgtgccaaactcccctcttcaaaatgatgcctctttcactatggaggaagtgattattcgtaatccaactatatctccttctcctccaacattaccttaggctcatccaatgcaaactagatcaaaatttagcatttacaaacccaaagtgtttcttgttatagcatctaaacaacaactctatgagaaacagtacaagaaattttatttgaggcataagaagtacttaaatgcacagtaggtggatgcaatgaggaattggcttgagaagaggcagtgaaaggatgaggatgatggaagagacagcttgtagagaccttgattaagagtttattgcagaaggacctaattcgtgatcttatcaatgacaaaatagtgattagtatcgaattcgatgacaacattgttgtcagcaaagaattgtgaaatactaataagatttttatgtatagtagggacatgtaagacactttttgttgggttttatgccctaaatagaattcatttcaatataatcagat

SEQ ID NO: 308158 - DNA, 1785 bp, Cannabis indica
ttctaacttttaaaaacaaaaaactaactaaaaaagtgttaccaaaagccacctaagtattttgccgcaatttaccctaatattttatcagtgattgctttatgattcatttactttacttgacagattgtaaggcatgctgagagttggagtgtttctgcacttgaagcaattggccagatatttacacctaccactggacagcctgatgactaacataattaatttattattattattaattgttgatcgtgattagtatagtaacaaaaaagtaaatatagcccctgcttatatctgatttgtatgcttctgtgaaatattttactatttttacattatggtttataaaggtcgttttgttgttaatataatcatatataatgatgttatgtttagtttttttgattagtttaagatattaagcgggtccctatagcaacttataattaacgttgcgtttgttagtgatggtctaagagcaactacagtgagaatatgggcaacgttaattttttattatattccttttaaaaaaaagggttaatcaaaactagagaatcaaacacaagaattacctacttaaatcaaatgcttatgttattggggattgttcaactaacttaacctaaatacaattcttatcttgtataatcttatttgaaaccatgttttgtttgaagatagctcaactaacttaagccatcttcagggatgattggctttgtaaatgtaatccatcacaattttccttcatgaagttcaggagtgccatttttttattttctttctttttttcatttattaggaaaagagaagcatacatttgtaatcattataaagagcataaacaaatcggtaaaaagaggactatttatttttatttttgtactttaatgaggagctggcaaaatgggtttatgtgataagggtaaagcttttattggaaagactaatggagcatatacatgtatgaattgatagtttatatactttatatatggatggagaatccaatgaggtaggattggagcagtacttacaactgtgcgcgtgcatggcttttctgttcttaaaatgtttacccttttttgggttttgttagtgaactttcaaaggtttggtattaagtcatccatcttgtgagtgaagtggggtcacatgaatctagaagactttgaattcgtatatatttatatgaagaagaatgacctatttatacatatatatttgaatgttgatccaaggtcagtttgagcatgtctatttttgtatggttacgtttggtttggttggcttatttcattttctcttttagtcttttttctaaacaaattcaaatacaaccattagctgttgtccaaactctcacccaggtttcgcgaatgtttcaaagtcaatgttacgtgcttcatccatttctaaattcaaaagcatatactagaatatacaatatatccatggatacagtcaaatattttatccaaacagtatatattatttatttattaaaatattttctattgaactttgacaatatactactgtaattcctacatttaaatctgaaaatggcgtgtttaaaaagctatattatcaaaattttattttttctttcttaatttaaacttttaaatctccatacatcaattcttttactaatttaattaaagagattttttaatttttctatgttttatttataattttacagcctaaaatttttggggattttttatttttacactttaaaacaacattttttgcattttttacgaaattcta

SEQ ID NO: 308159 - DNA, 2184 bp, Cannabis indica
tacgctctactcccaaaccgcaaccagatctttctgttggtgaatctttcaacttcactacagaaacgcctgcaccttactcatcacacaatgttccacccgttcctgttatgtcgactggcacttctactaatatacatgtcattcaacctcagattgtacctttgttcacaccaccatctcttaacaacatttcctttagtaaatccccagatggctctttcaatgcttcaaccatttcccctagtttggattatcaagcaaaaaataaaggaaaaactgttcttacttctagcagcaaccaaaattcccctattatgctagatgtgtacactccagatttagtgaaaaaaaccctgacacattcagattattgctcttccagtgttttttctacataccctccaacaacaaactcaatccatggcaaaacacaaccctttcggcccttacctgctggtgctgtcacctctacatcggtctcaactatttctcctgctactttgcacactacaaggacaaccctcaaaggccaagagaatgctcatcccaatcgtactttcaaaagacagtttgacactaattcaatgagacaaacttttaaaagatgtcgagccaaccaatctgaagtggtctcttccttgtcagaagaaattcctccaattcattatgtttctgatgctagtatagattcaactgatgctcaagacaacttcgcggtgatttctcagcaatcccgcgattcgccatgaaaattatcagttggaatgcacgggatttagggaacccgagtgcattctgtcgtcttcgtttgcttgttaaagagcaaactcctcatgtaatgtttcttatggagacaaaggtcactgttaattctctttctcgttttaatcagtctttgaattttagttctggtttagaggttcctaggactggtttgaagggtggaatcatgttgttatggaaggatgttgtagatgtaactcttatctcaatgaatgttaattattttaattgttatatgttgtgtaatgatggaccacgatggcatttagctcttgtttatggcttcccgaaaactaaaaataaaaagcacacttggactcttattaaacgtttacatgatgtatctccacttgatccatggatggtgctaggtgaccttaatgaaattttctcacacactcacaaaaatgggggacctttgagacaagataatcaaatgactgcttttcgaactactttggatcaatgttgcttgaatgaattgccttatttgggtgatgatttcacttggactaggagaaaaaaaaaaccctgctgctcttaaaaaaagactagactggtgttttgtgaatactgtttggatggactctctaattctgccaacagttacacaccttgattactatggttctgaccatagagcagtttatgttgatcttaacttctctaaccagctggaaaatgaaaaaagaagatcgaggttttggttcgaaagtggttaaatgatgcagaatgttcagctatcatttctgcaaattggaataaaaaccagaatgcaaatgaggacatctttcaatagttaacagatagcatacaatgttgttcaaccaacttgcaaaaatggcataatggaaaatttggacacatgaaacaagatattaaggagacacaatccagagttcaacaattaaataactgtgttacagcagattctgatttctcaaggaatgtacaatcggctgaagctattttggatgagcttttggcaaatgaagagctatactagcaacaacgttctagggtggaatggctcaaatccggggatcgtaataccgaattctttcatgccaaggctacgtctcggaaatccaacagccgcatcagcaaattgcataatgataatggacaatatgtgtattctcgtgatgacattgctacggttacacaggattttaatactcttttcaaagctttggatgaagacaattgggctctctctcatgttctatcaacaattccaaccacaataacttatgctcacaatgatttccttcttcaagaattcactcaagaagatgtcatttcagctttgaaaactatgggagttgataaaagtccaggtattgatggtctttctgctaaataaaatttcatttcaatgtaatctattttattcaa

SEQ ID NO: 308160 - DNA, 1595 bp, Cannabis indica
tttttcatttttacacttcaaatcagttttttctttttgcatttttacgaaattatacatagaaattcctattgcaactagcgctgcaacttaaattgcaacaaaaaatcgtatagaaacccatattgcaactagcgttccaaccactttagaaactcaaaccgtaaatttaaaaaaatagttaaaaaaatagtatataagataattcccctacgtatacactcaaatccattaatatttatccaaaataaaatttattattttcagagggtattaatgaaaagtatttctattgaaaaaatatataacattatgagagtaaaaataaaaattaagtaaaaatttgatgtaggtaaaaacgaaaatatgtaaggacaaaaataaaatttatccaaaaagaaaaacaaataataagttttattgataatggtgcttaaatatataagatcataattgaaatacatgacatgaattaaagggacaataactgcctcataaaactttatcatgtggtaccccagcaagaaacaaatatgcatattacatactcaaactattactttgtgtaatgggtgcacatactaaaactattacttaaactgtacatatgataaattgtatttaaatatgtaaatacgtaccaacttggcgagatgagcataaaagagagctgaaagaggagtttgctcggcgggtttgatgagcatggtgcagccagcggctaaggcagggctgaccttggtgaaaaacatggtgcttggaaaattccaagggatgatgtgtccaacaactccaatgggctcaagcaatgtgtaggcatgaaatggagttgacattttgagcacctctccgtggattttatcggcggcaccagcgtagtaccttagggtgtttgccacattaggtatgtctatagcttttcccacactaaataattttcctccgtcacggcagtccatactagctagttcctcaatgttttcatcaatcaaatctgcaaacttcatcataatccttgccctctcctattatcatttatattcataaatatatattatataaacaactgtatgtataaattaaatattaattataaacaatgttatgaatcatgacacgaaaggttattatttgactgaaaagtaatcactatacatatacataaaagtttcatatatagttaagatgagataaatcttatgtatgtgtgcccaacctatatatattttttgtaataaataacttaaggccttaattagtgcactatatcactacaataataatgtcacgccagtacattgataactctatggtatagagttaatttttatgcttttaaactaaagtattgtgaggagagtaatgaaaatgtgtttattttgcttatttttaattagttttagtgttattttctatttagtaatctaacctttaagttttgtaaatattgatattgttgggtgtgtttttccaattaactgtgcttattttgttgaaaaaggaggaattaaattgataggtaaaagagaaagaagcaaggaagaaaaggagtacaagctggaactgggttggttgctgaagcaatgctaaagcaa

SEQ ID NO: 308161 - DNA, 2688 bp, Cannabis indica
aatcacgtaatacgcctatgctagttagggtgttacaatcaaactcatctcaagtcaaccaatctctactagagccaaggtcggccttgagcataggcaggctagacctgtgcttagggcccacctagctcaagggcccaaaaaaaatttatcttcttttaaaattataaatttttttttattaattttgaaaaataccatattttttctaaataagggcccatttttttttatctatggcccactaaatttcaaggccggccctgagtctggagcacccatcatgggagttcacaactcaactggaccaccacagtaatctgttcagcccaaaaatattctattattatatagtttgttttcaacaaatctacacatttgcatttatgttttgttgacttctgttcaaaattgaattttgaattttttgcatttttttccttttggttatctagttttttgcaataatttacgatatttagcaatgtttgactaaaataataaatatttgcatattaacaatagcttttgtaatgtatttacgatatgagactaaaagctacaaaacacattgctaaacgttattaaatcactctatgtcttttgtactaagtcttctccctcttttattagttgtaattttattaatgctagtaggtcctgtaattttattgcccacaacgtgactaagtgggcttttatccaccatttgaatgactttattctggtctcttccttaccggagaacttattttgtaatgaccgggaggtctaactatttcgttttatgatattacacttttattcaaaaaaaaaaaagctattaaatcacactcaagtttttacgataattcgcaatgtgttttgtatgttttagtctcacatcgcaaatacatcgccaaatacgcaaacatttactattttagttaaacatagcaaaatatcgccaacctcaaattttgtctatcattacaaatatattactaaatatcgtaaaatatctcaaattattgcaaaaagctggaacaccaaaaaaatacaaaaaaaaaaaaaatcaaaatattatttttgggaaaaaaatatcagcgaatcacaaacacaaatgtgtagaattgttaaaaacaaactatatgtagtttgagacccaaacagagagcaatagaatgagaagtatgcggtggtaagcaacgcgctgtggtgagtttaggtagtcttttatgggaggaagaatagaaaaaatgagatgaagatgagagggaatgggggaagttgaaatgagaaatgtatttttgggtttaagtagaattataatgtaacgccctaacccagaagggcgccacgtgtgtgtgtatttttataaattagtttataataataaactaacaatttatggagaaattgtggattaattaaaactttaataattatttcgtaaaatataatttaaatcgtttttcaaaatattgttaagttggggatccccttgttataaagttttactaaaataccatagtattattttattacaaaatattagtacatattcaaaatactacaaaagtcggatcgtgtcaacttagcacaaaagacggtgaggttgatatgtacattcatcagaagacatctgactcatggttgatctatctttcctttttccttacctgcaccacagagtacatgtgagtcacaaagactcgacaagaaaagtggaaaataaattacaaatttcatgattaaataaaccagtaaatagttcagttacatacttaaaatatatatttacacaaaatatcacggtttatcgtggtactaattatctaattatttgtctaataagacaagttattcctgatactttataaagtatccatcgatctttgtttccaactggtcaactaatgtcactatcgttatttatgaggtaatcgataagtaagaaacctaacagtagtttcagaatagagtaataactctttcatattaagggtcattgtcgtatctcaattagccatgcaatgtggtataattgacttttcttacctcaaatttaaattcaagtgtccaggccaacttgagtgtaacaatgctcgacgatctcagatcctatgtcacgacaatgataaactggtaaagagcttaatcagttccgttctaaggcttaaacttaaaaccgaaaattttccttttcgataaataacatggcataccctaaatatcgataaaacacaaaaatctaagtgttggaaacaccccaaaacgatccactgttttcccaaaatagtccacaattttcccaaaacggtaaaccattttccctacaaaaatagcctaactcgagttttatacctcaaacccaaccaaaactcttccaaaccctgccaaaccttccagaacagtttcataacaagcagggccggccctgagttgaaatggaccataggcaaaaaaaaaaatttgggcacttactataaagataaagggttagttgcggcaaaaccccctaaagtaggaaggtttttgcaactaacccccaattctaaaatttttgcggtaaaactccttaaactcaagttctgttagcacttagtcctttccgtccatttttggctgttaactgccatggtggaatgtccacgtgtacacattgtacacgtggcacaattttattggtccacgtaaataaatatt

SEQ ID NO: 308162 - DNA, 1633 bp, Cannabis indica
cacagtcctgtttgtttctttttttagtggtaaactaggctccagcctcaatctgttaatcggtttaagacttctcgttgggttttattttggcatagaagtccctagattacagttttggtggtggtcttatgttgctttggaaggctgatattaatgtaaatattattaactactccctcaatcatatagactgtaatctttgtgttaatagtaatgaattatgacactttacttgcttttatggttctcctattcatgccaacaaaagatttacgtgggaacttttgcataaatttttttataatgctcctaacctcccctgggctatcctgggcaatttcaatagttacctatatactagtgataaatggggaggtagaaccccttcccacttagacacatcctcttttgtagatttccttaataaatttgctctaattcctctaccttttactggtaataaattcacctggtcaaataataatattcatgaaagactagattgggctattgtttcgcataattggtgtgatttatatcctaataatactgtccatcacttaggtttctatggttcggatcaccatgtcctcaaactgatccttgacaataattcatctaggccttttaactttgttaacagaaatttttgttttgagaacacctggcttgaagagccttaattctataagattgttgatagggcttggcacgatccaattcatgtcactcctaacaacaattttcagagttatctccaaaagcaacaacactgcattgatcatcttaagggttagggtagatctcacaaccatttcttcaaatctatgatttctcattttaagactgagattgatggaattcagaaccaaatctcaattagtcatgctgactctattagactcccccaactcaagtctgccttggattctatgcttctcaaagaggaagtttattggcatcagcgggccagggtgaaatggttgcatgcaggtgatagaaacactaaattctttcataaacatgcctcctttcgtaagaagtctaactctattaagtatctcaaagatgagaatggtataattgttaatacccagaatgatatggttggtcttgtctctgcttacttccacaatcttttttcttctcagagcagtaatattgaggctggtaccactatcttctccactttaaaatctgggctggaagctttagatattgattttcttaaccaagcttacacagctgaggaggtcaaaaaagttgttttccaaatctctggggataaagttttcggccttgatggcctgaacgcttatttttaccaaaagaactagtctactcttgggacggattttaccaatgctatccttgactgtctcaatcatggggcagattttacggagattaacaaaattctaatcgtccttatccccaaaaaacagcgtgccaattctctcaaggatttcaggcccattagtctctgcaccactttttacaaagttatctctaaagtcctcgctaataggcttaaaattatccttgacaaaacatttctccccaccagagtgttggatattattttaccaggaactagatttactaacaagtatgtttgattaacatccta

SEQ ID NO: 308163 - DNA, 1442 bp, Cannabis indica
aatgctctttaagagctccatatttatagaaagaaaatctcaactaccaaccatatataataaatgaagtagctcatcttccaacgatatgaaattaaataagagagcatagttcttaataaatgagcaaataacatgacccaaaactcttaaaagtcgaaccaaatctttgcaacttcaacacaaattaacttttgagacaaacctaccatctttcacatatttcacatagacatgaaaataatacatgaaacatataattttatcagagggaaggaattcacgtcttgcgcatgatggtttgagacttctcatggacctatgacaaggtgagaaattttacttcgagtttttcttaatctttgattgaaaattcaaaatacataacacctattaatataatttgtaacaatcatatttcataaatttgaatcccttaaataaaattgtgtaacaactcttttattacactaataatgtatgattaacacaagagttaccagcgacaataaattgtaactcctcttcaagttacaacatgtaagttacaaaaatgtaagttaaaatcataagttacacattcatttatcatacacttaatatacattatttagataataatatatttcacacattttaatctatacttattatattataaaataatataacagaatgactattctattttgaaatagaagaaaagactgtaagatgaaaaaaaatttaataatttttttaacaatttttttatacaaattaaattttattcatttccattctcattcctattaccattcttatatttacatccctcccaaccaaaaaccacccaaaatacagccattgatgtagtcacaaatcccaatccaatggttgtgatcaaagaatggtactgtacagttttttacttagatgggctattagccaacccctttacataaagtcccattaatatatatatctccatttttctacaaatgaaaatttgtttagcagcagagaaaatgggtctgtgaagtttcccggccaaaaaaagaaaaaagattttataaacttttctcccaaagacattaatagaccatcatttcttaggagaacccagtaagtattaggtccatacacacaaggagtttttcttcttcctttaatctttgtagtgtagaaagaaggaaaacaaaaatgccattcataccataagagggtttgtttttgctttcttctcattatttatttattttcaaaacccatttcatacaagatgatgtatgataataataataataataataagaagaagaagaagaagaaaatgataaaagacaatgtaatggcaaaaattaagtaatagtttctagcaaaaagataaaactaagtaatagtttagttagtaactatttttctctctaatgaacacagaaattctccataaaagtttttct

SEQ ID NO: 308164 - DNA, 2527 bp, Cannabis indica
tcaaaattcagggaaaaattactaattagcctaaaaattaatgccttagccaattattccaataagactaattaggatttttgccctctgaactttgacatgtataaaatcatgtccccctgaacttttaaggtcgttaaaaatgcccactgaactattgagattggtttatctactaaatcatgcccctcgaactttgacatgtattaaatcatgccccttggactttcatccatgttagacttttttactaaaattagaaaaaaattcttaaatccaacaatctaaatagttcaggggcatttttaacgatcttaaaagtttaaaaagcataatttggaacatgtaaaagttcaagcggcaaaaatcctaattagccttccaataattaataaagttaagaaagaagaacgacttagttgggccgggggttggttgttgttatggataacgatcaacttgtaaccgtagttagattaaatagtacttactaactatggttaagttagatcagagtgtttaataatataatatgtcagaaccagatcagaccaaggaagtatagtaaaattgtgaaaagaaactgaatgggatctttaccgatattgaatctgagtctaagcagcatcaatctatgtcgccggggattggagggagacggcgggggaggaaagaggagcagcagcggaagagtagtgagagtagttagagcgatggcggtaccgaaatttaaaggaacacagttgagagagcaggtattgacggagatgatcgagaagaaggtgaaggaggcggaggaagtgtgtggtgggaaaggagaagtggcggcgtcggaggagtgtaaggttgcttgggacgaggtcgaggagctgagccaagccaaggctgatttccgtcgtaagttggagaagcaagatcctctcgagtatttttgtcaagataatcctgagaccgacgagtgttggatctacgatgactgatcgtcgatcatcatgaatgattatgcgtatgtatattattgatcgattatgatgtgtggatgtatgaatcataattataattattgtaatgatcgatatattaatgtttttattagtttttccatattgtatatgtattataattatttcattaaaaagtatttataacaatattttgtttggttcttcaaaatgataataaagactatctttattgattgatatttgataccctaaagtctctcaccatcgaaaagagaaatatacaattttgattttgatatgattcaaatttgccttagaaaaaatcaccaatttgtgtaaaataaactcatcatatgcaaactttggcacttatttcttgttattgttatttatatatttctaattatagttaagagttcacaaattccattacctctataattcatctcgtaagagcggagatgaagcaaaataataaaaataaaaaagaatttgcggcgtaaatatttaagtttaactttcggttataaaagaatatttaaatttaattttcaattgtaaacaaatacttaagtttaactactagttacagataaatacttaagttaaatttttgacgataataatatttaagttatatttttaaaatttttgtgtgtatttaatcgttaagtgtcaaatcattatttatgtgttatgtacttattggtattttaaattaatttttaagtaaaaaaaaaaaagaaaaaatgatcacctaaaccattcatagactaacacgtgattattgactttacacttaacagataaatttatctacaaccaaaaattaaatttaaatatttataccgtaaattactcaacaataacagaagtaacttatcacaaaagaaaaagaagttaataatattgtgcacatgtgtatctagcattacttaagaattgaagagtatagttaagtgtaattatataattaatatataattatctaattgatcaaaaataccaaacctcctaattacttaatattattacacagtgatacctttagtgtcttggaaaattcacataaattactattttataaattttttacacttttacgtttaatttttttttttgacatttttacagtattcatataaataacaagaaaaccatataaaaataataagaaaacaacataaaaaataatatataaataataaaaatcaacaacaaaataatacgattacaacgtattaaaaaaaatacttcaaagaccatacattatataaataaaactttaaaaacggtaaaaatatttaaaattccgtacaattttctaatttatttattttttatatatttttagggtataattacataaggcactattttttgtaaaaatatttaaaattttgtacaatttgtaattttttgtgttttatatattttagggataattatataagatattattttttgtaaaaacaacagcaagaatttacatacaaataataaaaaattagtaacaaatgaacaagaatacaaaataaaaaaactgtattttctgtaaataa

SEQ ID NO: 308165 - DNA, 2419 bp, Cannabis indica
ccagtgagtatgcatcactatttatagggccttgaacttagagaggaagtatttcccttctcgttacaatggatataagcagaaagattgcatgataaatgcagaatacactgatcgtgggatttggacagcttgccatatctctgtgatctgatccccaagttatagggatttctttcatgactcatgatgcgaaagctgaattcactaagtgttgatcgctctgcgcggattgctaatcattttgctccaggcatgccgatgaggcatcctgttcggactgtactttctgagcagatactcaaagttgattccacatgtcaccatcatatgatgccaagttagagtgcaaaaattaggataacatttgcccccaagtctgtacgggactttcgaagttacgtgtagacgtcattcgggctgcttttgcctttggatagggacacgtgtcgagcgcgtctgtccgagactcgatgtgaggctgactgtgcgtctcttcagtttttggctaattaatgctctgacaattaatattaagaaatccgatttctctcaccatggttgacggctgcacttgattattttttatttcccatattcgctttttagagggaaatgaggcgtctgaggtccttttgagatgattacctcttttcgtgacttgcctataaatatcaacaagcattggcagataaactcattttcaccatctttctttgctaagtgagttcagagcgaaaaaagaggttttagagctcaaaaaccaatggtttgacgttgcttgaatccagacatctgactcttgagtaagctctagatttcctttatgcttagttttgcatgtttactttttgaatgtaccttcgactttgttgtggaaaatacataggaaaccctaggtttagaaactttgcgattcttctttgtcatggtttcatgcggttttacagcccataatgctagctttctgaactgcataatgcctgtctttcatcttgcttattctaaacttcatgaaatttttgccctaactcgagaaaatttcaaacttcctgagttttaaattttctttgaccattcttattctttaatctgttgagtactcttggtcggcatatttgcttgttgatatatatatatttaaacttttttttttttaaaaaataaaagtgtaataatttagaccaactaaagattgtcatgtagaaatttacttaacatttaacagccaagtacttataacttaggtattattaccgtcaaaaattaaactaatgtatttatttataattgggagttaaacatatgtaattataccacacattattactcttgttattattagaataattaggatttatcctctcaaactatgacccttgcacagtcttgtcacctgaacttttttttgttataaatatttcctctaaattataaaaaccgttccaaatatcttcgcacagttgcattctgcttatttattaaaataatttgttgatatatagcattaacataatgttaatctaacacaattcaagagttgaaacaaaatataaatacatagattgcaatctaataataaattatgagattgtatatgtatttttagagctactatttgtatcactacaacattcaggattaataggggcggaatagtctgcccgtaataagaagaaaagtcacccctattgatattactaatggggtccgctgctattggccccagtaatatctcatcactaataatgtcttttaccagcggattaataatgacgggacccgtcactaatccttttgtcagataagaatctgagccaacataaccggcagaccccatgccaattaattcacccgtaataacattaagccaaaaaattagataatttaattaagtaaaataaaaaatacaattaaataaataaaattaaaatacaattaaataaataaataaaattaaataaacataattaaaattcatacataattaattattcacacataattaaggaattatccagtacatttaaatgttcacaacataattcaaaacctaaattaattattattgtcttcatcaaatacatcatccaaataatctaacccaagttgcaagtctaatggggttgtttgagcattcttctcagcttgcagtaatggatgtgaagggtaatatggtagttgtgaagttaatgactcaatagattgtcgagtttattgttgttgtgggcgagtgggatggtgttgttgaaggagagttggagatttttgttgttgaaacgaaccaggaaaaggttgttgattttgtggactcaaaaactgactcgaaaaaggcttctgcggtgaaccctcaaactgaccatactgttggaatttattttaccaggatcttagatctactcacaagtatgttgtttaa

SEQ ID NO: 308166 - DNA, 4984 bp, Cannabis indica
atcatgttgtggctacccttgcgcagtttactgtgcaacagctttaactgaagagtgatgggaggccatgctgaaaagtaatgggtactagctcttttatatttggctacctctgcagggcttaccatgcaaaggccatcactaaagagtgatgggaggtcatcgctaaagaatgatgggaggccatcgctaaagagcgatgggtactagctcttttatggattcctgcatggtgaaacattagaggaagcactatacaagttaactagtgagagcacttactgagatgttctccattccaaattttggtagaagagtcaactccaaattctctttatactcaccagtcttgtatacacctttttttttatctgtaacgcgatgttgacctttttagtttggtccaaacatgattgttataggatctttgttgtcaaggaatactctttagggagtaggtctcttacaaagaatttccttaatttgtttgttgaagggcctgataactctttgtaggcaaacatgctggtttgagttggcttggtctcttctttgtccctttcattaagggattctactagcaaaatgtggtttacttcttggtcacagtagaccagaagagtgagagtagactgttggcagatcgggcaacccagggtacagactaggtggccagccacgttggagcattacctggccatttggaggaggctatggtcggccatcctatggaggcactggtcgaccagttagttgatcttatggtcagccaacttgctaaaaccatggtctaccagccttttgaaggccatgtcaatgctgtcatttgatcctatctacaattggttggctttgcccctagcatgattgaagtagagcctttatgcacttatgtcaatagctatttagcttctttcatggtaacactttttagaggtggtattgggatacaatgtctatgcattatagtgcctaggattggacacctaatagccatccccctaatccctactttttagcagcatttttatttggatgtatgctgatgtaagtgtatccatgttggttatccagcatgtctactccttttgaaacaaggattcttaattctttaaagaactgagcagacgtcaagttttccttagttttcaaggcccgactggctagttgagcgagtgcgtcagttgttgcatcatctttggggacctaccttttagtacagcctttgagctgacttgacaattcttagctcaaataggccatcatctttttgcattgagatgtatattcacctaggacatgacctacgactatttgacagtcgtgatgtatgtctaagtgtttagctcgcacttcatgtgttagctcttgaggccagcatttggagcttcatgctcagcaatgttgttagaagccttgaaactgaactttgttgcctcgtgcaaccattacccccaggtgttctgaggcccaagcctgcatcgggaaagtggtcaatgcaccttctaggttgagttgtcttgctcttgctctcacttcttctctggctcttgcttctcaccgaaccttaagagatttggagagatatgcttctatgtttagccatgaagatggcaaaagcttggccttcaatgtccatgtttggatgacaggtggccttataccgatcgagcctcggtggttcacttgagtggttggccaggtgcttcaggttttgatgacacctacgccatggacggttggcatgcattgctttggaagtttggataggagagtgatgcatgcacacttctccttcttctcccttagacttcatggagtaagggaatcgttgaatttcccttttttgccattatgttggtcagaaccatcattgttgcgcttgcttctaacattcttattgttggagaatcgacaaagattttctgtgatggtcagcacaccgaatagcacttggggcaatataacgccctgtgtctatacaacattgacttgccctcttgtttgggtttgccgaacagcttcttccaactttatgaagccattggctctctcaaggaattctttcatgatgcttgttaagatccttctaatatctttctagaagtcggtcaatggtaagatacctctaattatggtcatatatcagccttcttctgtcaggcctttaaccttggcagcctcagccatgaacctttgaatgtagtctttcaaaggctcgtcttgtctttgctttatttcgacaagattctctagttgtgaaggtatttatcttgaagtagagaactaaacatagaactctcaagaattcttctcaagaattaaatcttcgtagggccagcttgaaacatcattgtttggctattttagccagggttgccgaaaagatttagcatcggacatctccagatacttgttggagagttgtttggatctcaaagtattttaggtgtactagaggatcttctttcccctgtacatcttccaagttggcatcttgaatttgggcaagggtaaggcattgatgtacgccaagaaaggtgagcccctttacctatccagctcaaggtttgatggtttagggtcagctaagcccttgagcatgtctcgtatttgatctaattgtgcttgcacagaatgatctgttactgcaggggccttgttgattggcctttcttgattgagttgtattattggattggttagagcctggctgccaataacctgggaaaggtatgttcaaggctggccaatcttgagtttgccaggtgtccatcgccgcccagccttgtaatgggtagggcctggtcacccactcttccttgactggctagtggaccctgtgtgttgacatggggtaaattacaccaattgctgaagtttggtggatctaactggctgaggtgattgtattcacttctcgagttgttgttgtcttaggtgtttcctccaattctcaggcctctccaattaacgattggcctttgggtgatttctctcggattccctagcttaggaattcaccttattagccggctaggggtgcacttctagggtgctagctgaccatgggttggacaattgagggtgttattgtgcccgagactcttagccaacccaccaggcccatggctgccagagtctggatattcttgccatctgatctcatggcaaggcttgtcctccttcaggttaaggaaggtttgtcctagttccaaaggaacttggttggatagtttgtctgtagaccatccccaatctatcaattagtctcccttggagaggatctctggtgagatcctaacctcttctggtagttctttcattaaatagctttattaagtcgctagcttctctattacgacagtctaattctgcctgatgagattggaggatatactcttggtcattcatgcctcttaggaatttgtgtctctattgtgtgagtgtatcgtagccaaagcatgttgttcttcagtttggctgcttggtagacggcctctctaagtatggctaaccgagatcttctcctaagtctacacggggcttgccaattcttggcctcatctctcttgcatgacatcagggatcagatccaactatggtgcctggaggttgctccatattggtcattccttcaatgtcaggcgctagtggagggcgctctctaagtggcagaagttggccattgagacaaactagattggtggttatgacctggctagttgtggtggccaagttcgtggtgtctgtcgggatggcagagttagccacatctatcaggttcgtggagatttcagttgtgactagaacacgagcatcaagatcttcagacagagggtcttaaggaagacccgatgaggcagaagttgtagccagagttctccttatgttaaccatggcatttgatcaaattacttgacaactctctcaatgaaagtaccaaactattgacctcagaatttggccaactaatagcagagtcaaatttaatgttgatgattgccatgttttatacaataagaataataaagtaaataagacacaagattttatagaggtttgacccccttagttagcaagtagtgacctactctcctttcggttatattgataccaagagataataccactcagattactatgatgatgggatctgaagtagctctcttaagattacaatgtatgaatccgtatgcaagtgtcatgagagggagagagagagccttcttggaggcgtgtaaaagataaggagacgagaagattagggtttttagacttagagttgagagcttagggagcttagaggcttaaatgagttagggttttagagataggctaatgatctttatccagtagagcttacatgtctaatatccttagaaataggtaaaataaagtttttatttacatatttaattaataaatataaatgactagattgcccttcaaaaatatatattttcccttgattttcgtgggttgttaagaccaaatctgttgcttgacttattgtccacgaatgagggttgcacatcaatgtcttgccaggcaaaagttggttatagccatgcacctataggatacagcctagccaaccatacaatgtctgaaagtttaggtcttgccagccatgatcctgatagggtctggccagccatgtgcctgccagggtctggctagccatgttcctactagctttggcaagtggaggccaacctttgtaggtgaggctaacctttgtacaccttttccttgcgaaggtcaggcttccttggtgaaacagactctttcttagtctgaaagtcaccttttggcctgccaacttgtgctcaaactctggctggccatacaagctcatcttggccgacctatagactccccttggccggccagacatggtggtacagctccttgaaggctcgcttaacattttttgcttgttgcttgacagttttgccatgccttgttgttggaaattatt

SEQ ID NO: 308167 - DNA, 1821 bp, Cannabis indica
tcgacggctgtggctgagttggggttttgggttttttagtgcggctgagagaagagtgaggaagagagaggttgatggtttcaaatgagaggggtaaattaggaaaattggtaaattggtcatatattaccaattttaataagtttgcatttagggaaaaaataacatggtattttaagcatagaatttcaaatttccctttcttattttgttagatcatatttattgaggagaaaattggagctaaactttcattttttataaaaaaaaaaatcatacttactgctcacgattctataagtacaaaaataaaaattacgaagatttactttaaagaattttctagtaagttaggatcttgttcaaactgtgtataaactgtcaataaagtatatattaattataaatacatcttaaaaatatacttttgtaatatacgactaaagatacacccctaacaataatctcagtaaaataataataataacaatattcgttgtaaagaaaaatgagaaaaaatacaaagaaaggtgctactttaaaaataaataaaagacctcgaaattatatatactttggtagttgttcttccccaaggccaaggccataaccataaatatcttggttgtttggaagatatttatagaggttcgtgacgcacaacatgacgacacattgcatgatcgacacgtggcgttcggactcactaacttaaaagagctaattcaattgttgtaataatgatgtaattacacgtgttcagatgcttttccagtaagctcgccacttgctttttcagatcaatccatagatttgtatttattagattggtttgttaaaccaaccactgttttgttatgaggggctctacttgcatatgcagaaatatatataaataaaagaagaagaaggaaatgaacgtagtagaaaagatagcatagtgatattcattgttgaaggggatcgatgacctaacaattgatgtacaaccatagtaaaaaaaaaataatatacaatataaaaatataactaatttagattttgaggaattatgtccttttaattttttaatcattaaaaattctttttaaactattgagattgttagatttaaaaatttttgctcaattttattaaaaaaagtctcatgtgaatgaaaatttaggtaacataattcgatacatgttaaaatttagagggcataattttataaatattaaagtttgagagacatgattcatattatatggacaattgtcatattactaaaattagataaaaacctttaaatccaataattttaataaattaaaaaaaaattaacgacctaaaaaatttaaaaaatataatttagtacatataaataaaaaaatatgaagtatttttaaattaattcttcatatccaagctttttatatatgagattatagtaaaatttttaatttacgtttatttattgaaaagaaatcaaaatttaatttgacaataaatgaggtgtataattatagttttttttttttaattaaatagtacacaatttgttttttagtaagaaataatgtacaattttttattttggtttttatttttaattagtgtacaatttaaatcaagtatagttgtaaataaataattttatctatttatatagaatgatatgtaatatatcactttaattttaagtgttggtgaaaaggtatggagctggtgttgagttgtttcggatttgtggtggtaaagatttggattgatttttggtctcttattttatgaaaaaaaaaatttgtttttttttatttttttattttgtattatagtttt

SEQ ID NO: 308168 - DNA, 1884 bp, Cannabis indica
cgagagtgagagcaagaccaaccgataatctgtcaaacccaggtggaggcgtacatgagactcttgaatggatccatctgcattgcacagtgtatggcctccatactgtaagtttgcaaggtggatattgagacaattattacaaaactgaacaaacatagaattacaaagatttcaaaaacatgttaagcacaccactatacatccaaatgatgcctatgttttaggtacattataagtataagaactgcaaccaatggggaaaaaatatcataattgaggccctaataattctgttgcttaataacactagtaaaagtaatgcatcttgaacctaaatctaaccaaaaaggtggaattcgtttttactcgaccaaatattggtacgagaagtttcgaacttgacaattgtcacaatgtatgtaaacgaagaattgttgttagaatttggaagagtggtttagaaaataaatagaatagatggaggtgaatagctcatgatcttataaaaggtgttaagtttccacaatgtcagactttctatcagtggcatcaaataacgtttcatttcataaattactgaaaaatcagataaggaaaagaaattaaaatgcacaaccaaaaatctttgttcgcctgacgaataacctcatttccataggatttaatagttacataatatagtattttgtacttgatatccataagaaatttgcatacccgaaatttgcttccattgaacaatgatgcgtttctctgagttttttcattccatatctaaaacagatcaaaaaccaacaataaacgttacactgcgtgtaaattgggtctataatcaaaattgaaacatgaaaagcttatctatacaatttaggaactgattacgtctatgacattgtcacattgtaagaattaataactcaacaaaacaaatttgttctaaataataattataagacagcattgcatataaatcggatctaaaattttgaaattgaaatcaagcttaactcaataatctaattactaacacagtcaaatatctgtaaccaaaacaggaataacagtgcatgagatggaacttacctcagaaatggaattctccaaatcggaatctggatgaggaactctatcgtacgcttcatcaaagactaccgtaagcttttgcatccaataaaagccacaagtgcatgagatgagatgacaatcattgcaaattgaatagtgaatagagagaaaccataaggatcgggagaaaaatgagaggtgatattacctgagacggtgaaagaccggcaggagaagagagaagaaggttgtaagggtgagaagtgatgggggcttcagtgtctgccttctccattgatacggccaccgcagaacaggtgttcgatgaaaagcttccaagaaaaatgttaatcggaaggcgcgagccaaggatgtcgtttaatgtttgagaccgtgtcgtttttgcacatggccaaattataaaaagatgaaaaatgaaaaataccatacaattgtggtttgatgtcgtttaatgttggagacatgtcattttgcataaggccaaattattaaagggaaaattaatgagtaattggctgcaaaaaccccttaactctcaattcacttgtaaataaccatctaatcttatattttagtggaaaaaccctctaaagtggtaaactcatccatttatctcagttaactgctgacatggattgcctacgtgtacattatgtacacatttatattggtccacttaatataattatttaaaaattaaaaaaaaaaacaaattcaaaaactaaaaaaaataatctaaatttataaaattattaataaacaaaaaaaatatttttttctttgattttttatttt

SEQ ID NO: 308169 - DNA, 1483 bp, Cannabis indica
tgaaatgagttatttaggtcacaaaacccaacaggcttgtggtagttcgtatgtgcaaaagggagggcatgtatattagaagcgtgagaagaaaagaggaggaggacaacatccaccgcccccaaaagcaaagctacaaacgccaatggagacaaaaagatcgaaatttgttgagaggttgcgttttttttttttctgaagtgtgactgtgcgagggcttagagaaagagattactttagggttttcgctaggttttcaaagttggagaagtataatatgcttagatttgggttatataatatgcccctttagccgacgattaaaacccgtaggggctaaagtatagtcgatgattctaaatggtcggttatactttagcctacggttcttaaccgccagcaattccaagctatgtaacgatgtacaatcgttgataatacattgcgatatttataaactaaaaaaatttctaaactatagtcgacggttttatacactcacttaattttattagcgacgatcctcgaagaaaaacgttttgatgaccaacgagagtagtggtttttctaatagtgtcaaaacctgaaaaattgtcccattagcatcattgttctacaaatatcctaaaaatttgttggccaaagctctcatatttacccgcaactcttaaaataaattaatttttatactggatatgcgattttgggtgacaaaactataaaatttgatagaaaaatgagaaaagacgataatatttttttattaagagatagttggagaataaagatgtaatgaggatttcaaatatgaaatttagattttatatacgtcttatggcttgaattattgtgaaattagtagtggaagatataaatcttcaattattttgaaatgattgaatacataggtccgtgatttttttctatatttgtcttcttaattttcttttcgggttttatattttctattataaaaaataaaatacacactattttctactaataaatagtttaaacaaattgttatacatgggatcttttatttttggacgtatgaaaaaatatttgttttcaactttgtttttcaatgtataaattatttgattttttttaaaacttagcggaatttattataactaaaatgagaaccatattaaaaatattgaaaatgtaataaaacacatagatgtgccagtttagagacgtaccgatttaacacatgagagtgtgttctactgtaggaatgcccttacgtgcactcttattggtattactcatgaatgggtaatattgaatttttatgcttaatttttctatttaattagaaaaatatctcattttttcattatatgggttgaagctgttccattggttgaaaaaaaaaaataataaaaaaaaaattggctaaaaaaatgttgaaaaaatattaatttttaacttaaatatttttttatagtgtaaaaagatttattttttgaaaatt

SEQ ID NO: 308170 - DNA, 2384 bp, Cannabis indica
cacaaaggctatctatgtgagaacaatgctgagagaatcttcatagctctaaatgttgtgttcaatgagcatgtctatcctgctctttgagttatttcttcatcttaggtaccatctacacctttatttgtgcctactgctcaattttccacaaattttccatctattgatactaaccaattgttcactgttgtccctaatgcacctactacccctaatgttcctgatattcctgacattggttcatccgcaaatacctctaaagcctcttgttgagcctcctggtgatgagcatcactctcgtttgatgttgttaataactctggggactctccttcaagacagtctgtctcctctaatggttctccactaccttatcctatggctgaggaagttgtgtctcacttcaactcccctccaatagcatcaacatctcaagctcctcttgtgcaggctgttgttgttcctgatccatctatagcaacttctgatgcatccattgagaccaatgttgtcccgcatgcaccattgaaaactcactctatggtcacaagatatcaaagaggcatttataaaccaaaagcctacttggctaccaagcatccattgcttgagtcattgcttacaacagagccaaagtctctcaaagctgctcttaaacatccaagctggtttgcctctatgaacaaggaatttagagctctcatttcacaaggcacctggacacttattccttatgaaccacacatgcatctcatagggaataattgggttcagtgttcgattggtatggaccttagccatttcatttcagtgggaaattaggtaacttgatgttacaaatgtagttcttaatgggacattacaagagacaatttatatgtttcaaccccaaggttttgaggacccctgtaaacctacttatgtctgcaagcttcataaagctttgtatggcctgaaacagtctccacgagcaaggaataacaaactcaagtctaccttatttgattggggatttattgcatctaaggcagacacctccttgtttatgtgtggcactggttctaatttgatcattctcttggtgtatgtcgatgatattcttatcacaggccccaatgctcatctcattcaaaacctcatcaatgatctcaactctaccttctctctcaaagaccttggctaggtacattacttcctaggtgttgagatttatagaaccagtgaaggactttacttgtctcagacaaagtatatcacaaattttttaacaagagtgaatatggaaggtgccaagagttgtgcaaatcctacttctactgcacataaactatcccttactaaaggttctccttttaaagatgtcacactttatagaaacacattgggtgcgcttcagtatttgactctcactagacccgatgtagcctatatcatcaacaaactatctcaattcattcatgctccaacacatattcagtgggaagccagcaaaagactccttcaatttttgaaaggcaccattttagatggctttcttctcaaaccagttgacagcatgactattgcagcatactttaatgcaggctgggcaagctgcatcgatgacagaagatctactggtgactatcccattttctttgggtccaatttaatctcttggtatgttaagaagcaacagtttattgctagatcctccacaaaatctgaattttgtgtcttagccaatactcttactaaattaagtggctttgctccctgctcactgagttacaggttcaattgattactgctccaataatttgggtagataatcaaggtgcagcatccttagctgtgaattccatctttcatgctcgatgcaaacacatcgaaattgatcaacattttgtttgtgaccaaaaatactgaacaaagagctcgatatgcgatatgttcccactcaagaccaagttacagatatctttaccaagggtctttccaaagaacggttcaagtatctttgcagcaaactcaaagtggtgtccaccccttttgtttgaggggggatgatatccacagttagtttagactagttagttggagttagttttcactttgttagttgtatctcttttctaactaattctgttacacctattgtaattgtctgaactaaattgtctataaataaagtgggaaagcctccattggaggtaacgttttctgccttagcttatggctttcgtgtttgtgacagtcagtagtcccgtgatccgtaaggaaaaatactgggtaagctgtgcaatcccacatcgcctaaataaggtcaagtgggatgatctgagactgtgtaagtatgagactacacagttgaagaaagcttaaatggattgattggtact

SEQ ID NO: 308171 - DNA, 1566 bp, Cannabis indica
aatgttcactacaaaagcaacatcaaatctgtcagaacaaataatgcaaaagaattaacccttactagcttctatgctcaaaatagtgtaattaactacaactgatcatgtgtagaaagaccccaacaaaataatgtagtggagagaaaataccaacacatattaaatgtgggtcgagctttagcattttaatccaatttacccttatcctattagagttacatgatcaaaactgatgtctatttgctctatagaacgccctttattctcttacaagataaaacctcttatgaattaatgcataaaaaattaccccagtatgctcacctcaaaaattttaggtgtttatcatatgcttcccatgttaacaatccacacaaatttgctcctcgagctagggcttgcattttcataggatatcctgaccatatgaaagcttacacacttcttgatatacaaacaaccacatcttccaatcaagggatgtagttttctatgaatcaatttatcctttacaaactagtactcctaatcccaacattgatactttctttctagatagtgttcataaagatcaccctatcacaatcctaacactacaccagaaccccctccactatcgagcaacaacaagcagtaccagtgctagccactaaatcaggcaggacaataaccaaacctacatatttgctctacagttgtgccatcaaaactcaatccaccagcacgacatatccaataacagattacctttcttacaaaaagctctcaccatgattcagagtagttgctcttaccatcactcacttacttgatcctacttcctatgcacaagcttggaaagataaaatgtgaaatcaagtaatggaattaaatacaagacaacataccattagcaacatatgggtttatagaattaaatacaacccagacagctctgtagaataatttaaagctcggttagtagaaaaaggctacacacaacaacaaggtgttgattattttaaaacctatgcccatgtggccaaatttagcacagttaaactcttacttgctcttactgtcatcatgcaatggcatctacaccacatggatataaataatgtatttatccatggtgatttacatgaagatatctacataaaattttcacaaggtgacacccctaaaggcattgttcccaaaaatgcagtctgtaaattgaagaaaatcctatatgacctcaaataatccttgtggtatgtgaaactaagcaataccatattgcaacagggatttattcaatccaacaacgataagtcccttttcataaaacaaacaacagacattttacttgtcttattaatatatgttgatgatatcatagtcgccaccaatagtaacttggctcttcaataattcacatcaactcttgatgcttattttaaactcaaagagcttggtcctttccacttcttcctaggtcttgaaataactcgctgcaatagagggatattagtaacccaaagacccttttaccttacaactcctacaagacactggccaccttggcacgaaactagtttc

SEQ ID NO: 308172 - DNA, 989 bp, Cannabis indica
ttttgatattgggggttttattaagggcaaaaaatgaaatttccctttagaataagcacttttaatatataaagatatatataataaaacacctttaacagtactccccccacccccaaaaaaaaaacaatgtggccacgttcttgcaagtcgactgtgagttgtcacaaaaattgatttaaattgataattccggggtccatttgacgtgagtagcgtgtactgtccactgcccaatgcccatgatttcgtgtttaggccatggccggtactacaagttaaaatttggcaatctttccattttctctacttcccaactcatcatctttttctctataaataaataataaaaaaaaacaatcatctttttcacccaacagtactaccagtagtggcatgtggatcgatggctttgatgaggtttcccatatgctcttcttaataataaaattacagtttggacgttaccatgtccctttatacattcttacattaatctttcaaagtttggcttatagtgcactcaatagggaccaccatgcgctttaacatctcttttagtaaacaaaatacatgccaatgtcctcaatcatcatccattatgtgaaccaactaattcagttcaagcaatgctttttctttcttctgcatacgagattatcatttatttaatgttgtcttcaattggaggaaaagtatgggtcattttgagtgttaaatagggggtgggttggtatactttttcatatttcatcttaataaataaatatatatttttttttatcacttttgtttaattatgtttgacacgcaaagcaatctcaactactttatggtagatctagaagaaattcggtggcatgacaagctgtatggtccttctctttttctttgtattcatatttttctcaacttccattttcaaaactaataattaataataattataaatattaaagtttaatttttaattgtaaataaatatttaa

SEQ ID NO: 308173 - DNA, 2822 bp, Cannabis indica
aatagtaatccaatggcttaaaaaaatgtaaccatgatggttacaataaaaatgtaacttctttcatatatatatatatatatatactagattgaagttacgtgccaagtcacgtatacttagttttttttaaggttatatatatgctaaaaaaatattgtttgtaaattttaaatagataatgttcaatatagagtgataatagtagaaagcatagtagtaatttttttttttaagaaaaaagtaatcgattgtgtaaaatttaaagaaataaatttagattgtgtaaagttttaaaagataaaaattaaattagtttaaatataataaaagcaaaatgaatctatatgaaatttaagctaaatcaatgtcttaagtttcttaattaaaaaaaaataaagtacaaaattttctaaatgtattgttttaataattaaaaaaaacgcttctcaagaattgattaagcaaaacaaatcaacaaacaagacaaaaagagataaagtaacgtttctttttgctcataggcaatgcaacaaaaatacatatatttaagaatttaagaatttatatatatatatatatttaagaattcttgtgtgccttaaacaaatacagataaataagacacttccttgtgaattcttttctttaaaagtatgatccatgtttaaaagcctcatacgaatctaaaacaactcctggagctatagccctgcaagagctaagagttaaatctataagccaccagctcaaaaatatgagaaatgattccagtaaaatgagggaccactaccaactctcttataaccattgtttacatgagctcaattttattctttcgatcttaaagagcttaaactgtattctatattaataaaattcattaatttaagtgaacaatattttgtattaaaaaggaataataagaaaaacatagttatataactttgtattttggaaagatagtctgaaatcataagcagtcatatacatgttcttcccttcatgctattatggtgaagaatcacataacacaacaaaactaatgatgacaactggagcaacttcaaataaaaatcttgttgtagacatgggcatcacatagagaaaagttgggtaatcttcttctatgcttggaacaagtgatccctatagtccatgaaaactatcagattgggatcatatggactaaattcaaccaaaaagttgagagaagttattagatatgtattcaacctcaacttccacaccatacacagtttgcactgaaacctttggcccgcccacctcatactccattagtttacctgaagtagttcctaatgcaacagtaacaagcttttaatactatgttagaattgggaggaggcaatgatacctatattaaagaagtctccatttatgggaatgaaataaatcaaacaaaaaacctgtaagaaagacgatattttgttcacaggctacgagactatgacctttggcggctccaacaatgctttccactcttaaatcatgatatgaaacacctgactccacacatctaggaaaaattaatacgtatcacatatttatggataccatttccataattctcactaaaaagttactattagcaatttagcatgtataaatatgatgttttttttgctgaacatgccttaagccttaccttcttaacaactcttcctgaagcaaatgatgactaacttgttcataagcacagccaatcagaatagtatcatcttgtcaagataaattatggtctcttgccatacatgcttaatacaccttgtaagtccgagatatgaaaacaatgcatatttcaatatattaaattctataatatatagaagaagtagactttttctaaaggaaaaaaagtcagtaatatgatatagtatttaaatagcttatctcaaattttctcacaatagttggctgagagaaagcgacaaccaaataactcattaaaaactaaaacaatgtcaaataatatattacatcataaatagtatagagcatagaaatcaaaaaaatcaaaaataaaaacaaagcaaggtacctttaaattcatcttccccaaaaccataattgtttgtgaaagggagatttggcccaatgagtccaatgtttaatcctaacatagccgattccgcgactaaagcaagacctgctagaccacatcctatcaccaataaattcaacattttatcaccaactgaaattgctagaagctcccaaaaaataaataaataaggctttaccacatgattcttaaaataaaaccccaatgttaaaatagagattaagaaaattactaatgtcaaaatcaaaataaactcaaaaatcataataataaattaaaataaaatttaagcaataataattacacctattgtttatgcatatgttttttccatggtgccgattactgtatcaaaatacatattgagtattattatttttgtatataaaattttcgaaaaggaaagcaaaaatcatggtgaaagaagatgaagaagagtgattctttagatgaaatgggtatgaattttttgggagaagaggctggacgggggttttgccgaggctttgaaatgaaatgagagagatgttaatcaattttagggttggaaaatagatggtttgttagtagtttgtaacatcaatttgtttttctgaggtttatttaatttttttttaataacctcactaaaatttcgttgaggtttgttacgttaaacttctgtttattttctttatttttttagttaaaagatggttcaattttttggtttaattattgggtttatttgttaacg

SEQ ID NO: 308174 - DNA, 1737 bp, Cannabis indica
taaactcatatgtgtttatttcattgttttagaattcatattaggatgttaatcaaacatacttggtagtaaatctagatcctggtaaaataatttccaacagtttaagactctcgaattttggcagtgaccctgttcatgacccttcattctatcgatccattgttggagctcttcaatatgccaccatcacaagacctaacattgcctacagtgtcaacaaagtgtgccaatttatgcacaatccacttcaatctcatctagtggcagtcaggagaatcttgagatacattgcagggactttggattatggtttgcacatcaaaagatctcctcatttaaacattgaagcttattgtgacgcagactgggctgttgatcccgatgacaagagatctcctcatctaagaaacaaagcactatatcacgatcctctaccgaagctgaatttcagatttgtgctgctgttgtctctgaaattagctggattcaattgttattcactgagttacatgtgcatctatctacacctcctctcatctggtgtgacaatgtcagcaccataatgttcgatgccaatcccatgctgcatgctcgcactaaacacattgaaatcgacctatatttcgttcgagagaaggtcagtcgaaaagaaatctcagtgcatcatgtccatgcttctcatcaacttgcagactcccttaccaagccgatttccaattctcaatttgctgtgcttagggacaaacttggtgtggtctcttctaccacactaagtttgagggggcctattaatgacactcagtgtgctgagctgtcgaatggttagaattggtttgtttgtccagttagttattttccattggtctgttatttgctctaacggtttgtaaccaactttagtcttgtggattcattgtatataaatctctctataacaaactttttctcaatcaataaagaatactcttcaattctttcgtttctctatttcgtttcactcaacaagtgtatattgttttatttttagtttttataacattaataatgacaacaaaaaatcagttacaacttttggtttttttatggcatttcagttatgattctactttcaaatgcctatatatgtacatatatttgttggagtgtgtagtaatattttgatttgtgtttcggtatgtgtaatggcaaatgggttatatatatacacagatgaggagtttgtaaatactcatagttttgttctagcaattttttatttgctttcacttggaatttgtatatgaaattgaattctctagaaaatcgaaggaggaagctttccttagttataaggttctattaatatttttttatccatcaacattgcataattttgtgtgattaatattttttttctttcaatttgctaacattcttgtatttgtgggattactatttcattcatatactcctcaccatatatataaatatatatacacattaatactattgagaggttcttgtgtttgttcttagccaaggttcttgcctttgttcacaacatcacttttattatttttagtgtaaaattctaaatgctattgttggcattgatcatcatgaagaagataaaaaatatgatattttcgcaaaagagaatgcattaccatatttggtataaatcactaaactgtaattggaatcagaataatcaatgggagaaatgtatcggtttaaaatagaaaataatcggaa

SEQ ID NO: 308175 - DNA, 1697 bp, Cannabis indica
ccagaaaaaaattaggcggggcggagcgatctgatccaagatctaataagtatccgaatccgctccaactaaatggatctttttgacatgcctaaatgccaaatgcataaaatacacattattaactaataatctaatcatcatcagtagcagtatcacattcatcagtaaaaacatcatttggatcgtccataatgtgtaacgtagtcccatggctcggcgggtctagtaataatattgtgatgcagagaagagaagcttcataagctgatggatcaggttcttcatcagattgtccagactcgtctgcgagctcatcgggcacatcatcataatttctgagcagcatctcattggtttactttatttgcaacaaacacattaatcgtacaacaaacataaatcaaagatacctcaagaaggttggacaacgcctctgacaaacattctaattcattattattaaaactggatagtaatcgcaggatatttgatacaattaccaattgtatcgaatcgaattgcactcttcgagtcagtgccaaactccaataggaataatcctaattttctctgatttcatttcttgatccccatttgtgtaatagtattacatatttatactaactaggcaatactaaaaattgctaattagtccctataattttcatgtaacaatattattattttgacatttcattttagtttagatctaaaatagaaatttctcgtttttagtatatttttatattgctttattacagcatcccaagtatttgagatggatactagagctgtagcagaattccatgagaaaaataaacatttttattacatttctgaaacacatttctgaaactgttatagaaccactgttcacctatacaatagcacaacctcaatcaccaaaattttatatctacacttgaatacaaaatgctctcttaattatactatcatctcaagttctcaattgtgactgtgaacacctgttgagctacccttcttgggagcacaaacaatgcccaattgctcttcaactttctcgattagaagcttcagcagcagaacctttgatagagtcttaaatgatccaaccattatcaactttttgtgtacagaagtatacgattaaaatgttggcgtacataaaataaaacaaaagaagaacactaatatgtgcagttatagggaactttacctcggctcttgtaagagcaacgttaatcatatgccaatctccaagaagtgacgaactacagtttcttggattttcactaccacacaagcatagcttattcaaatattcaatatcaaaggggcctaaggactcccatagtttgtaattggcgtattcaaatattcaatatcaatcttctacaattttcctaccatttcattgttttggacactcttgtctattcttgctactgtttgtgtgttctttgggtattggtttggttgatcaaaacagggtctcatcaggggcagaccgataaataagacaattgaaagataaagaactataagaaatatctttaatagttctagcttcctatacataaatctcttgcgtttgaaaatatataaccagaactggaggaactggaaagataatactacatggaagaaaaagaaaacatataaaggatttaggggctttttcaattttatatttcaaaactaatttttttttt

SEQ ID NO: 308176 - DNA, 1227 bp, Cannabis indica
tgatgttaaataaaatagattacattgaaatgaagttttatttagggcataaaacccaacaatgccgtcctctggccattccttgaggattaggagttttccattgattaaccacggcctattgtataagatttccacgcagtcatcctcttcatcaaaaaatattccccataggcccttgctaagagtctttatcctccagttgcctttcaatttccatatcttgctgagatatccttcagtctgtttcttgaaacccctactccaccgaagaactttgccaaaacaccagtgttggtaatatcttaagttagttcaaagtctggttcaagctccaaagtcatagagtccaagaactcttttctgagttcttcaacttcctcctctttatcctctgcatcttcttgccattcctgattcgtagcctcattagcagggttttcctgctcgttctatgggccttgttcttgattctctggccccgcttcttcctcattccttctgtcatctgagttgagatcgttgatgttcccatcagccatgttcatctccatcgtggataataactatagcgactttgtttgacgtgtacagaaagtcttttagaatcttaccaaccagaaccgttaaaaccttaaaactgaaggagcaataaaagcttataaaatggtaaaaggtatagataaaatcaccggcaacaatgataagtaattactattaagtaataactacagggtgagaaaaacctcacagttggattcccaacactctcatcctagagagaaaaacctcaccggttttttggagaaataatttatgttattttttactgacaaaaattttgacacctaagccaaaagtacacattaattgttgaaagaataaattttacttagtatagccagttttgttaaccggtgggttggcaaagtcttttaataattatttacttagatagtttggtaattttatatgtatggtagaaacataaatatagttttatagtacatatagtaatgcattagtaatatatactcatgttatttggtgaatataaaccctccataactaatatagttacattattggtaaatataagccctgtatgagtaataaatgtagattatttgaaaaaatttagcttacaagaaaaaatataattttatatgagtaatatagagtatgcttagtaaatatcaaattatatgatttaatgttgaacctttt

SEQ ID NO: 308177 - DNA, 3106 bp, Cannabis indica
gtgtcaactgggtctgaacctctagactctaccacctcttatagtgggactgaagctgttgctgtaggtgatggtaagcagcttcttatcactcatgttggctctacctccttaccttcttataactctagagtcattcatttaaattctgttcttaaggaccctcaaatcaataagaatttagtcagtgtctctaaactcactaatgataataatgtctttcttcaatttcacaagagttgttgttttgtcaaggacaagtccactggggcaaatcttctgaaaggaccagttagagatggcttgtatgtcctaggagcatccaagaattcaccacatactctgcaatacaatctcaccaccacttcccaattagatgagtcaatttgcctttctaatgcaatttccaattgtaataagttcactgctaatacagtgcaacattgtaattcccactcagacgttgatgaagattcaacttctcattccaattatattggtcattctaatatctatatgtctactgtcggtcaagatgtcaatatttggcatgaaaagttaggtcatcctaactcgactctccttagaagaatgcttaagcagctcccacactccggcactataaaagacttgcaattttgtgttgcatgtcaaaaaggaaaatgccataaacaaccttactctttatcccttagaaatgccaaacagcttcgtgaactcattcgcagttatttatggggtcaatctcatgaaccctctaaagaaggctttagatattatatctatttcatggatgaccacactagatatatctaaattcttcctttcacacttaaatcccaagcctttgatgagtttattaaatacaaatgcatggtggaaaagaaatttaatatccctattaaaaatgtgcaagctgattggggtggggaatataaaccctttgctaggtttctaagagatcaaagaatagagttttaacatccatgtccacatgaccatgaacaaaatggaagagtaaaaagaaaatatagacatataactgaaattggtctcacactcttggctcaatctggcttatctcttaatactggtggtatgcttttcaaagtggtctctttacataaatagaatgccaacaactgttcttgattacaaaaccctcatgaatgtctgtttggatctcaacccgattacaagattctcaagaattttggtttttcttgcttccctcatctaaggccctatagatccccaaaacttgattttagatctgagcaatgcatttttcttggctattctcctcatcataagggatacatgtgtgagaactctcaaggcagaatatacattgcaggaaatgttattttcaatgaacaacacttccttgcaatttctgctgcaacatcacctcatataactttctttcaacctcatactttacctactgctacattttctttccctgttgttcccactaatacttctctttctacttcttttggtgcttcttcatcaacatctcccacatgtgagaatgttcctcaattaacctcacctcaaaatgtcaatatttccaaccctcctactactccttaccgctcatctatttcaacacatatccctacaccaccaatcattccaaccccccctaaccaaaacattgatcccactcccataataccaaaccccacaccagaaactaccactacaaatactgttccaacaattatgcaacaacaacatcgcacaagcaaccttgcaccagaaagtaccctcaaatgtctgcaccagaaaccagttctgatgttataacaactactgctcctgaggtgatcacaaattctcgaactcacactatgaaaacaagatctcaaagtgggattcataagcctaaggcctatctttcaactaagcatcctctcaaagtgtctcttctgccaattgaacaaaaatctatcaagcaagctctcaaagatcctaagtggtttaaatccatgcaaacagaaaacaaagccttagttaaggcaatgacatggactttggttccccattagccttatatgactgtgattgataacaagtgggtctataggataaagcttaatgttgatggctctctcaacacctataaatcaagacttgttgtaaaaggctatttacaaacacctggtatagattatcaagaaacctatagttttgtggtctagccaacaactgtgagagctgttctaactcctacagtaacctcaaattgggatgtcaagcagcttgatgtaagaaacgctttctcaatggtgaccttcaagaaactgtttacatgaggcaacctcatggctttgaagatcctaccaaacgtaatcatgtttaccatctccacaatgcaatttatggtctaaaacaagatcctagggcttggaatgaaaagttgagaaacaccttattagaatggggatttgctgcctcaaaatctgacacctctttattcacctttcgttttgccaacaacttcattattctactagtatatgtttatgatatactagtaacgggtccaaactcatatctcatttccaaaatcatacatgatctcaacaattcctttgctttaaaggacttacgttttgttgattgttttcttggaatagaagttcatcgaaattcagagggcatgtacttaccttaaagtaaatacatcactgatcttttagttaaagtccatcttaatggtgcaaagagttgtcccaatctgacaagtgcaaaccagaaactccccttaactgatggtgaaccttttgctgatatcaccgtcaatcgaagtactctaggagcactgcagtacctatctcttactagacttgatgtggccttcatcataaacaagcttagccaatctttacatgctcctatagttactcattgggaagctcgcaagaaacttcttcgatatctcaaaggcactctcagctatggtttgtcacttaaactagcaacaactatgaaactatatgcttactccgatgccgattgggccagctgtgttgacgattgtagatcaacagaggggtatgttggttttcttagaggaaactgttgggttttatgc

SEQ ID NO: 308178 - DNA, 1812 bp, Cannabis indica
aaaatatttaaacaatcaattgcatacttatctcttttattatatatgggagtaaaataaacaatatgaatcatattttttatattataatttattttaaatttttcaaaattttacaatatatattaaataattacaatatacgtgttatacaacgaaaaaaagaattgaaattatctagatatcgaaaatacgaaaaaggtgcattgatgcactctttcttggagatgtaacgtacaaatacaaggtgcatcgatatactctttttggagacgtaccgtactaatactcgtaggtcttataagagtgcatcgatacactcttgcttatgggtctttcaaagcatttctaagggtgcattattggaccgaattcgtgtgaaattttcatattatttacttacactaaattggtcttgtcctttgacatggttgtgtagtttttctctcgttttgttggttatcctagtcgtgtttttcttggtctgtttcagtcttatggtgcttttgcataatataaaggagcttttgcacacttatgaggtggcttcgggtcaaagaataaacttttctaagtcctctatgttttatagcaataatactaatagtgagttgagggatgctatttgtgctatgttggaaatttatgaggctgatgaacatggctattatgtgggtcttccttattcggttgggaagaataagaatgctatctttggttttcttaaagacaagcttcgaaagagaatacaaggatgggaaggtcatatcttgtctcgtgggggaaaggaggtattactgaaatcagtagcacaatcgttgccgaattatgccatgcatgtttttctacttcttttggatacttgcaagagttagaaagacttatggctaagttttggtggcattcgaattctagtcatagtaaaggaataaattggatgagttgggatcggttgtgtcgacataaacatgcaggaggattaagtttcaagagcttgagagattttaatttggcgcttctggggaagcaattttggcgtctgttggtgaacgataactctttggttagcaaggtttataagtcgaagtattatgcacatagtaacttgttttcagctgagttgggagaaaatccgagcttcatttggcgaagcatccttgaagcaaaagaactgatccatgatggtgctttaagaacaattgcaactggtgtgaatgtttcaatccttgatgatccttggcttccacacaaaactaatagctttgttgtctctaggcatcttgctcttgagaacaagtctgttagttgtctgcttcaagtggaagctcgtgcaagtgatagttggagttggaagcttgagacttctgggtagtattcagttagaagtgcctataagtttctgcaggaagctaaaggtgcttggattatggatgacaatactggtttttggaggaccctatggtcgttaaaaattcctccaaagattagtaatcttttatggagagctacttcgggtatacttcctacatgtgcccaacttcaaagacgacatgtccttgtaaacgccatctaccccttgtgtaattctgctgctgaaatagtgcatcacgcactggttgagtgtgtgtttgcaaaagttgcctgaaatcgaagcctggtggacattggttgcggctctgagtcattcagcaactggtagctggttttgtttagcagggggcgtgtttgtgagatggaggaagcggctgtggtgagttgggctatttggcgtgcgcggaatgattttgtttggcagaagaagagttggtctgc

SEQ ID NO: 308179 - DNA, 1058 bp, Cannabis indica
atagagtgtaatttcctcctattcatatgtacaacattactaaatgtatgccaaaatttgacaaatttaacatgagtcaaatttaactttgtaatcaatatcatcattttgtatcattttaataagtattattaactttgttgaccttttcatttattttgtttcttctgtataataattccaaaaagttagtcaaatataacactagacttattttttaggccaatttttgcataaattatgtaccatgcataaatttgtttctaaatcttatttaataagctatttccaatgtaactaatataagttgtttttaattggtaaagttagtagaaagcaaataataattcatgttttatatagtaaataaaataatatatcaccaaaaattaatataaataacgagttattttaagttaaataaaataataggtcacctgaatataattaaaacaataaaaaacatatttaaaaagtaacaataggaacaagttagaatttctttttgttttttttttttctaaaaaaagttagaaaaaagttaactaattagtttaatatatcatgtttcacttgttactaaaatagtaaaaattaaaaaaaaatggtatatattatcactagtctgaaatggtgtttctgctgcagagtattttagtaatatttatgcaaaaatccaaaaaacaaagtgggaaaattatttttagtaaaagatttatacttttatattcaattttgtttatatattttaaaaatattcaagacaaaaaaatacataaaaataagactaattaggatttttgctccctgaactttaacatgtaccaaatcatgccctgaacttttaaagtcgctaaaaataccccttgagctatttagatcgttagatttaaggacttttgtctaatttcattcaattttactatttcagtaattgtttaagtactaaactatgctcccaaactttgatatctaccaaatcatgtccctcaaattttgacatgtactaaattatactccatgaacttttatctatgttagaattttttactaaaatt

SEQ ID NO: 308180 - DNA, 889 bp, Cannabis indica
aaaattttatcaaaaaaatttaaatttagaatactaaatatgtataattataaaaaataggtactaaataatcattaattaaaatacaactacttaaattgtatttagataaaatatagagtaccaaatgtgtaaacatccttacataaatgaaaaattgattaaaaagttgtctcttaattaaatagaaggggcttgagtgattaattaattgtgactcttgtaaggctaggagaagataattagtgtaggatatattttatatatttttggccgtgatagacggactcatgactttgtttttagttcactatatatacaatgtccactttgctgcgctcaagtcaagttgggattgggactcttgctactttgactacctacgatcgatgcttgtatatatattttaatagatgatgaaaagtatatggtaatgtacatatcaatgagcagtgatattacaaattaataatctatattatataatatataaatattgttgagaatctgcagctaagatacaaagattaatacaagcaaattgtggtattttgaagttttcttttctaattttcatccacaagaaagtggtatttttataaacaactttcaactttctttcaggtccaacaagcaaaggcaacaagagtcaaagactcttcagtcacaacaaaggggttcggcccatggtgatgccagcccaagacaagaaagcaaaccctatccaacctataggagattttttaagggaaaaaaatataaatatgggatttattgttgccttttactttttttatggagaaaaaataaatgaaaaagatataggaaaaaattaattaaatggaaaaatatgggaatccaaaaacatataaatatgcttaaaatggaa

SEQ ID NO: 308181 - DNA, 1394 bp, Cannabis indica
ttgggaatatagcaattgttgacctatcttactattttaggtttaggggaaaaaatttcccctaatgtaatgtatgcataaaaaaataaattcccattgttagatttaaatttttttgtctaattttactcatagaagcttgacgtagatgaaagttcagggagaacaaattaataaatgtcaaagtttagagaatacaattcaataaatattaaaattttgaggacaaaatttagtacatagataatcgctactttagtaaatttgaacaaaattagatagaaatctctaaatttaataattttaatagtttaaaaaaaaaatttgaacaacataaaaaattgaaagagtacatatcaaaatttaaaaacaaaaattataattagcatttattttaatatttgagaggcccttatcttaaagggtaaatttggaaaagacatcaatcatatgattattaaggccacttttgataggcatagaaagggcgtgtgtgattgtatgcaaggttggatatttggaataaaatggtaatagaagggtaggttctcaaaattataaatattatattatataataaaatttcaatggtattattgagaattcatgtgaagaagacaacatcacatgacagaacataagagtagtaatactaatagctatcatcctcacatggctagtctttttgtatattcattcatttccattaacttttgaaaatagccacatctcatcaataagtgagatttcaatgccctaatcaaaccactcttttcatatgcttttccaagattgccctttattgttattattcagaaaccacttgtgttattgtcaacaaataatattgccttaaatacttcatttaaaataaggataataaaaatactcatataattcaatgagaaatgctaaaagaatactagtagtgcttaatactaccataaatgctaaaagaaactactagtacctaattatctcataccgttattgatataattaaaaattaagtcttatattacttaataaaataaattttaaagagtatcaccaaccaatcataaaacatcaattagatgtctcattgcttttaaagtatctggtccacataatataatttgataactaatagggaataccattaactatttatgagatatcacttctaatttaatttatattatagataaaaaaataccacttaatgagcaattgtaaattattgttttacttatttcattcttttgttatcattagtcccacaactaaactcatcctcattgtttggtaatcctcaaacaattatcttgagtaaatactattttggaccctgtgttttgcaaaagttaccgattagaccctgtgttttgttaaatgacaaaatgaaccctgta

SEQ ID NO: 308182 - DNA, 3404 bp, Cannabis indica
aaaaagtttaaggcgtaaaaatatatatttttttctatgttaaagtatttttgtattgtcttttaaattttgatctatcgtgtaaatgtttttttttaattattagaaaaacttgttcttttttaaatgatcattatttgtgatgattggttatcttaattgtattagtacttttttgtttgccaatctttattgattattattttctcactcttttctctcttaaaggtttttctattgaatttactcaataaattttaatgagttattttcttcataataataaaaaaaaaaaatattatactaacattgtaaaaacaaacaaatttacacaacataaaaaccaataataaaaataaaatactaataacactagaaaatttaaaatacgaactttaattaagagtaattaataacaaactgtatattaacataaactagaacaattattatttaatcatattattattattaaattagagaattaagttgcgttttgcgtagtgttatccaatttttataatctttttatgtatattgtacttatactcaacgatataatctcattttgatgtgtcattattaggattgttcatcaaaccactcaaactgcaagcactgaaaaaaaaaaaaaaaaaaaaaaaatactgtttgaaattctctgcgatgcggttgtggtttgaatttttcttaaactgtgcagtgcggtgtggtttgcaaatttgaattgttaataacggtttaaaccacaccggaccacatattagaaaaatactaatttttatatttatttaggtccaatatgtgaaggcccagcccaaaacccactaattattgtattgttgaaacttgaaaccttttttcatatttaatttcaagttttatggtatttttaacaagtgttgctcaagctttgttgtatttgcaatagtttaattatttggtgatagtccaagccgcaaaaattgctaaaactgcaccgcaccgcaccattttttgtggtgtgatttttgcagttttttagttttgcagtgcgggtacggtttgggaaattggaaaaactgcatgtgctggttagtttgaaaaaatggtcaaaaaccgtaccacccgcaccgcaaacaaccttaggtattattaataaagtaagagtattgagatgagaaccataatttgatatttttatgatatataaaaagatagtgaatttgtgatattaaagatagtaaaattaataaagatattacatgtgaagtgaataaaataaaaaaaaatattaattgtttacaaaatttaataaactggtcttatgaatctaattttttagttatttttaaaagattataaaatactttttttagtttaataaaaagaaaacaatttaactactacttatgaaagattttattattttattttgtggtgttgttgatgtcttctccacaaaggtgaaaggagtatgacaactaaaaagaggtcatcacaatattacctgttttttaaaactaaaaattaagagattcatataaaaatattagtgatagaattttctatataaaatgtttagataagagtattgattttaataatttatgtgaatgtgaaatttatatcttaaattgtaatgataaaaatgaaaatcacgatctatatgattaattattttcataataaattttttatttgtcttaatatattacgataattaaaataataggtaccgtagaaattggttgtgtggttgtgcgatcactataaatttatcttctgcctcgcacgattgttataatcattgaaaaataaaatttaatttataattatatttttattttagaaatttatattttaaatagttgttaatatttttacgaaataaatgaaataataaacaaaaatagaataatattaaataatatttttaagtaaaattcatgatcattgattattttttaattatttttaaataaaaatagaataattttttaattcctattctatcattatttttttttattaatttatttaattattattaatgactataaataaattgattacatattctttaaattatattccatcattatgtatattttattattgcatatagtttttcttttagatatgtatatcaatatcacttaataaaatagagaaaatcaaatcaagttatcaatcacctatatatttggacaatcaaagtgattttgaaaatactttatttatatagttggaagtatactaactatgtagttttttaatccatgtgggatttttataaagaatattgacgcgatttttcgtcaactgacctaagaagatcgtaaaataaaagtggatcacggtgaattaatctgactaataaaattgcaaaaaattaaatagacaccagagatttatagtagtttacttccatatcgcgataataaaagggctacgtctacttctagttttattgattagatccgacacactagagttatgttctcaagaatgtgtagataaaaatacagcaaaagattttctaggtgtaatcttaatcgagatttatgaatatatggctaatgagagacttgatattcataaatctgatctaaattaaaaggttgtaaagttcttgggaacaataaaccaatcatttgtggaaaaaggtgtgtatcaatggtgttttaaggactgataactactaacaaaaagggacatttgcgacggtcctcaaaactacttttttttggggagcatcgctaataaatttaaatgactattttaaccatcaggaaaaattagatattctcgaaggttcagagcaatcgtaagggaaatttgtgacggttttaagagcataatgcaatttttaataggggtgtacgtgacggtttacaaccgtcgcctatactataaggtacggtttaaaaccatcgcatatagtataggcgacgattttaagtcgtcaagtatacatcgagcataataaaactccacaacaactactctttcgtcatttcacacaataaaagcctaacccatcccaactactctctctcttcgccgaaaacaccaaaccctgaaccccataccccattttctcaacaaaaaccgccacccaccactaatgaaaactccattttctctctcgttctcaccattcttcatctctctctctctctctctcaatatatatatttatttatttatttatatattatttatgtaattatttttatattttttttgaatgaatttatttgtttaaatatttagatttaaaataatatatatttataaataaatagataaattaatttataaatatattttttttaggttttattgtatatttgtagaactttaagtaaatacataaatatgtgtattttattttttagaattaggtaaataaataattt

SEQ ID NO: 308183 - DNA, 3285 bp, Cannabis indica
attgtggctaaagatgggagtggtaagtacaaaaccatcaatgaggcactcaaagatattccaaagaagagtaatcagacttttgtgatttatattaaggaggagtttatgaggagtacgtcacctttcagaaaacatgaccaatgtcatggttatgtgatggtgctaataaaaccaggatcaccggtagcaagaatttcatcgatggctttccaaccagtcttactgccactgttggtaagtgtctgatctctataattatattgatatttgttttattacttgaaaagctgaataattatcatcggatcttatgattgatctcatattaatttgcaccaatatatatttcacaatttatatcaatataattagctagcttgcagtttatagcagtgccacaataatttcctttttgagaaactgagcattactacaaggcatcatgccacaccttagtatttattggtgcaattaattaaatatcacgtctaacatgaaaatctaattctaaatagcagatatctccgtttcacaaaacacatactttacccaccatttaagatttatagcctgcaatcttaatatgtacgtaatatttcagttgttcttggagataacttcctggcaagagacatcggtttcgagaacactgcaggagcaagcaaacaccaagctgtagcactaagagtgaactcagacgaggccattttctaccgatgtgccatggacggattccaagacacactctacactcacgccaagcgtcagttctaccgtgagtgtaacgtctccggtaccatagacttcgtcttcggtgacgcagccgtggtcttccaaaactgcaaattcatagtcagaaagccaaacgacaatcaacagtgcatagtaacagcacaaggccgtaaagaaaggaggcaaccaacaggcattgtcatccaaaacgggacctttgtggccgatcctgaatacgtgccagtaatgaaccagagcaaagcatacttgggtaggccatggaaggagttctccaggaccatcatcatggaatctttcattgatgagttgattcagcctgtgggatggttgccctgggctggaaattttgctctcgacacttgctactacagtgagttcaacaaccgcggccctggcgcagcagatcagtctcttcgcgccaagtgggtgggagtgaagaagatcacagctgaggaggccgctactttcactcccgaacagttctatatgggagacgcgtgggttaaggacagtggtgtggattacgtccctggcatgttctccattgctcccaagaaataagtgcaattaaattgatgagaactatacctacatttttctcataatttgtgtatttttatttcttttttgtattattgtattttgtatttttgggttttgttctctcatatcgttgtttcaccggtataattaatcaattaatttatacccaccattaacacagttgagtacacattctcaataagattaattattagctaaatattatatatatatcatctctgaattttttttttttaattatatagcatgctttatgtagctattatattcaaataactttttttttttaattaaaacgttcaaatattataaaaacatgtaatgtaaaaccggttttatttttcatgtcataaaaccggttttattttttatattctaaaataaaaatcacatctgagggggctggacatttaatttcatcaatatttaatttatttagggggctggacatttcgtacactggaccccgacctgaattccatacctgcgcaactagaagactagaaccccatacctcagctaagatctgatcctaacccaatacctcgacatgacttgaaccctattcactgacctggaccttggactctggatcatcgctcggaccccaaaactagacctcggcctcaactcagtctccggatcccagccccgacctggtcctttgacccagacctcaaacttggacccaaacctcaatctcagacccgaaccccgaactcgatacggtagccctaacccaaatcccagatcccaaaccccaacccaaacccatactcaaatccctacctcgttgttgggctttgtgccctaaataaaactctatttcaatgtaatcttttccattcaattatcaataaagaaacaaaattattttcattacttatttagtatgtcatttggttcatgtgatcatttatatgtttatttgatttataaattcatccaaattcttatcacattgatattcttgtttattgtgtcgtcaacatagtgaaaagtgatcaagattatgtgattaaatgtattcttagatttatcaatacacagggtttaactaatacgataatctacaatatagtttacttgcaccttagataaatggtatgtccttaatttcagggcattggttaaagtaataaagcttggattgatgcatggggtatgcattggaagggaccgatattcactacaacaatttgcattaataccggcggacacaataccggcgggccacatccgcccctaataatggcattaataccggcggatgtgggggccgccgatattattgtgtatttatttattatttaaaaaaaataaatataaaatttattagcgacgggcatttattaataccggcggatagcccgccgctaatagtgtaggggatttaatttcaaaaattaaccgggaaaattcgcgggttttcatttcaaaaattattagccgcggacataaaacatattatcagtggaccttccgccgctattacagttaatttttttttattgttgttttagaattagcggcgggaaagactaatagcagcggactccgccgctaatactttttgtatatataaaataatatgaaaaccctaatatatatatcatctctcccattcttctacctcttcgtctcttctctattgggactgtttgtccctttgctcctccagatcgtcgacaagattaaaataactaatagtattcatacggctttcactactgctactcttcctcttatgacttctaacgttttgaacaccattatttatgatagaactccaccgaaagtgtatccacactactcttttctctcaactagtttcatgcatcaaaacactacggaaattagtaatcatctttttgctgcaaaaaaactgagcatcattttgatgattttatttttttattcttatatcactactacaaaaatgggttttcccgacgcttttaaaca

SEQ ID NO: 308184 - DNA, 2424 bp, Cannabis indica
actgaactgatggaatcttagtgtattattacagcttttgtaggtggtggtactttgttattattttgtcaacttagaaataagatttctatattcatttgagacacatgaaccaatgattggacatgacaataaaagactacattatacctattccccgttgtaattgaacagcattgaagagcttattaaattatgagacaactaacctcacatgagaaaataatgcctttgctataactagaagcattgaagaaaacactagaatattggtttttgcttgcaattcagaagaaagtgtcctcaacaattccaagacccttgctttagccttggcacctgcttcatggtacctaagggagaaaaaatagttaccatataattgtatgtttgaaaaacaattagagaagcttaattaaggcacacaaaaaacaccttgttaaagcatcctccacccttattgtagtaaaccactcttctccaacctttctgcctttcgaatctaaagctggtttaagatttttaatctgttcctccccaggggtaccagcccatatagcaggcgaaaaccgtttacccttaaaccaaacagcctcatgctctctagcatataatatttccccctttgggccaccaagtggggctgtggtagcctttattcttgtaatgatgggcatgaaagcttcagtaacctgccaaaaattgagcagacagattaaggaaagtaaaaaaacatgatcttaacacagcacaaactattttttggactggacaacgcatatttaataaagccatatgtatatatatatatatttaaaaaaaaaaccaccaaaaagttcacctgaattgaaaaaaacacacaccactgtccagggacttccatgaagtttcaaagtaactaatgtagaaaatcagataaatcatgagatgttaataccctatataatttttatatttaaacttaaatcattattagggctagttgtatgatataagtctactggatgttttccttatttttggcttatctttcttgtaggttctaatcaattcagggattgttatctaacactaggtctataaatagagttgtaatcctgttagagataaaacaataaagtccaatctttcaagcagccttcctgtttcgtttacaactaataactctaagagaaatttgtcctaaaaagaagcacatgaaacttctattctttataattgcttaagaaaggtgggtgattattgtctaaaacaaacaaatgcaattaaactgtaacaggtgaattaaactctaaagactcacagctagaattaaagcctcagcagccctttccacttccgcaaattcctcctctatatggatcctcttgacacgacatttccatgaggactccatgtcctcaaagaaatcattaggaacaacagaagagtagccttcattgtgatccatttcgccatctaaagtgatcatttcaccaatcttatccgaagcccatttacaattatcaatctggaaaaaaaaaaatcttacaatttcatggcgtgcatgaaaattaaacctggaactaaagttacagagataaatatattcaaagcaaaatttttttcagcaagtactaatacatttaatctaagttgaaacgttacgcggctgatacaaattacaaaatctataaatttactatgatgtgatgcaatcatgctttcttcctttgtcaacaagtattgaacagaacttaatacaccactcactaatgtttcaaagtcaattttcaatccggtggccacccatgtaggatccatcaacaactttaagatttcattgagctctgaatttttgtgcatgtgcaatacttcatcaactacgtttttaatcctacagaactcgatatgattggcctcccttaattcaagtagcttcacaagctgctcaacaaacaaaaacttaagatttagatgccgaaaaatagaaatacagagtgttgtaatgtaagttgttatttttactttcttggaatctaatttaaaagattacctttgcaggtgaaacacaagtgaactcaggaattgagcaggtgacagtgctcataattttgcaagttgctgctcaagtaaattatatataattagaaaaatattaaaattggaaaatagtatgacattccaatgaaaaatcatgaagtaaaaagtatgaaaatcttcaccgtgagatgcaatacatgtcaacttaccataagaattatgcaaacatttaaaagcattagtgacaagtaatattttaaacagatttatgacaatgttatgttaagatgatcttagaataacatcaagcatattgaagagccttgaaaagctcattaccctcttggcgcataataacaacaaaataattaaaggaaacaacaaagagagagagagagagag

SEQ ID NO: 308185 - DNA, 2353 bp, Cannabis indica
tataatgcaattttatacctacggtttttatcaaaaaaccgcctctaaatgtcaatttcgaaaaaaacgggtattttcacaccctttagcttccctttttataagtgggagtgaaaaaacagcctctaaaggccaaggttgtagtagtatacagttgcaaggtctcatcttttagcattaaaatttgtaaaaggtgttgctcaacaagtacatatttgtagcaataattgtggtgcatttgtaattgcttttgttgatcacatagttcataggaccataaatgacatatttcctaaattaaacattaccaattgttgtgatggtcgatttattgtttgtctttacaatcatgctaaaaagaagaaagagaaaagggcacaagactgatgaagaggcacttgaaaagcctaataataagaagaagatgtagtagttttatgttttttgtatgaacataagttggattcttattttcgatgaaaaacattgcttgttttcaaggattaatttctatttgtaagggacaaattactagtatgtgtattttgaaaaattgacattatttatgattttttatagttataaataagtaggcttttttttaaaaaaaaaaaagaaagaaaatctttacttattcaacacactaaaaatatttctatttatgaggtaacacgatactttataaatcataataatgcaaagctttatttttgtatgctaaaaacattttgtagtgctgaaatgctattatttgtttttcctgaaaaaagaaaagaaaaagttaatgaaaaactagaaagaaaatttaacaaaattactaaattattttataaatcaaagcatgcatagattactttctttctattaaataaacatatatattaatttttgtaagtaaaaaaaaataacgtaaaacaaaataaaatctcgacgcaattgaaatttgatgctacttattaggttatttagcaaagctaaatagaacgccaaaatacatatattaagttacttttctacctaattaaactactttatatagcataacaacatatcatgttattttttttttttctatcaaattcttaagattatgtagtgaacaatatttatttagaacatgtaaactaaccactttataatttgagttgctgttatttttattcaactctacttcataataaattaatgctttaataaaatcatttcttcaagaaaattacaggtctcgagttgcttcctgaaaaagtaaaaagaaagaatataatcatttaacaagtaacttttagaaagaaaaaaaaaatagcaatgtttctttgttaaaaattgatgtcacaactcatcacactcaatgataagagcactttaggttataaaattgttaattcttttcatatttaaagtgtgttgtttcttaacatctttagtgtttctcgtagttttataattttttgggagtttaaaagtgaattgagtgaaagttaattgatttgatgtttttatgactaggtaatgtttggaggataaaaagactcaccaaaacgatatttttctagagttttgaaaattcataaagtcccaaaatctgagatttgacattgtagcgaaggttagagattcaccgcagcaacaaatgagtaaaattgttacaaggcgatgttgtcgcgacgaaggagaatgcttgccgtggagaggaaggtgtggtcgcgacgaacacttcccttcggcgcgacgaggacacaattatagatttcttttaatattttatcttttttatatcaaaggatttttagggagtatttataggacttttatggttcgtttttagggactttgaggctgtgtttttgagagagaaactcagagcaagaaagagaagaagaaggagattgcatcatcaattgttcatcaccatagtttcttttcttcttcttaatcttttactttttattatgaattaatttcattataatgactagtttggagtagtttctttttagttaagggttatttcaaagcccaagacatgaattcttaatttttatgatgaatgttattttcttagtttccattatattgaattgtttctattcttttattttcaattccatgattattattttaatctttagatgatcactgaattaagttttgttttaatctattatcatcttaggattattattcacctaatagtttaggattctacgtgtttgcgataaattgtaattttgatattgtcaaaagtatatttaattgtgatgaataatagaacctagattaaatgaattatatgcttcattaatttattgcctagattaatctatctccaatgaatttaaagttttatctaagt

SEQ ID NO: 308186 - DNA, 977 bp, Cannabis indica
gagagagagagagtgcgagagtggagtgagagagaatagtagcctctcaccgtcacagcctaattagacgaccgacaatttaaatcccattattttcacagctcagcttcggcttcaacttggattttttttgactttcgctctctttctttcattttttttcctttaataatatttatttattttaatttttaaggtaaactttttttaattttttaacagtagtaatgacctaggacttagttgtgctttggtaattaggattttccttttatataaattggattttttttttttgtcctcgaaatataattggtgtagagttttctactaaacatttttttgtgaattattttttctccaattataataattattgtaaatatattctttaaataccattaatttttaatttgttgatgtgattgtaggtaaaatgtgtaatattacattatgaaagtttgtttaactaatttcagtctattaaaaattcaaaattaaatttgatggtataaaaatataaatatatactcttaaattatcattagactgtaccattagactattatttatatatttattttttgtttaaattttttaattatattaaattagcactgttttaatgttgcattaacaaactattaaaataaatgaagggattagcaaattcaattgagcaaatacatttgcaatggttataatttttttttttttttgaatagattgcaatggttataatagtggaagattttttccctaaaaaaatataaaacaaaattctacaaatatcatagttcctatttgtttttttctgaagagaatattattaaaaatagagagagaagtcacaagttacattatgatttttcttaacagtactcgtttataggtgacgttttatgattagttagtgttgctataatttatgaacactacgcaagtatacgcaatcaagtagtaaatctcacacaggt

SEQ ID NO: 308187 - DNA, 2100 bp, Cannabis indica
tttttaaaaaaaaaactgaaaaataaagtattctgtttgagaatttttttactttaaattttcaaaaaagttctttgtctcatgttggtaatggtatatccttaaattagacagtgagcttacttggttgggcgaagattcttcaccgtttgtaaatcttaataatgtttctagctagtaatgtttctaactacttattaaaaaaaaaaagaaaattcttattattttattgatgaaatttaatattttatttacaaagtgtaaaagaaattaaattgaaaataaaaaatctccaaaatgaatgcaaagagaatagagacaacaccatgcaatttttacaaggctgagacacaaattcaattctcccattgcataaaaaacaaaaccagttaagtgataagagatttaaaaatttaaagctaagcttaataaatgatgagaaaagacactaatttagaaactcctttcttctcatcttttatttatttttttgacttcttattggtaggaataggaaataacaaaaggaggcacaagaaactgaaacccaagtacatagcaagttcaaataatcttgttaaatcatgtcaaaaaatgcacccagggcaaaacttttacagggacaattatacatattacaaggtatgatattattattcgggtaaatactattttagaatttgtgttttttaaaagttaccaattagactctttgttttgttaaataacaaaatagaccctatattttttaaaatgataaaaataggatcctgaactcaattttcaacaattttatttattactataactaactttaagacaatttctaacacgaatagatacaaaaaaatataaccagttttatcataaaatttctagactagattattattaagttgtattttgacaaaaaatcagttcaggatcctatttgtacaattttaaaaaataccagatctattttatcatttaacaaaacagaaagtctaactagtaaattttacaaaatacagactccaaaataatatttacccttattactcttattgttatctttcaggatctgtgacccgggccacctgggcttgggccggaatgcttcatgagcctgattgtgaaccggtccagaaaaccgggtggctttgttgttctccatggtgggccggcccacttagcgttcaaagcccgagcttctgtttcacggacaacggagaagctcaacaagaagatgaaaacaacaagagcacaaaaacgcagcgttctacctcttccacttccacccatatttgattttgatcttggcagtcaacactagagaggcttatacaatattataacttataacatgaacaactatatatataactatattaatgtattgatcttttgatgatgatggatatatatatatatgtttgtacaataatgagtgaattgggtcttactatatatatacattgaattaggtaaagttattgtagatacattatattttgaaaattgtaactgagcacgtttggagtaattcgtaaggaattggaaatgcatttattgaacaaaaaaaaagtaggaattttctcgccgctgtttatggtatttttcatgttgaaaatttgatgtggacttttctctaactaatataagaaaaatataaagcaatattgttcagccaaatatttttgtaattatattaaaaggctagtatgagtgtacttttattgttttagtacaagatatatattttcttttatttgtggattagggccgaacaactgaccagctaagattcttctactaattgggtgaacaacaattttgtttttgttgttgtcagaatattttatgaggaataacataaataagtattgtttatttaatgtggatcttagtatataatgataattatataatcgataatagatgatattactatcagattataatggaatgaatataacgtactaacacactctaaaatatctttagttagcttattgagccaaaacaattaagtgaatgtttgacattataactaaaaaattgttttttatttttaaaaacagaaaattgtttttaaaaaaacaattttgcttgtttggc

SEQ ID NO: 308188 - DNA, 2790 bp, Cannabis indica
atatatttttttaaaataaattgaatcaatttcattactaatcaggcaacaaaataggaaacaggctccacaatgaaaaaacaatcaggattagaaaaaaaatagccatcagacaataaatttttatatttaattttattatctaattaaagaaatacatatttagaatatataatattaggttgttgcatccgagataaataagaattaagtttgaagatagatattttttttttattcatttttaattaaataattaaattaagtatataaatttaaatttaatttttaatattggtggttgaattaaatttaatggtttaatattttaaagttaatatttatagtttttttttataataatcatatatatatttgattagtgtattattgagtagtatataatatgattagtgtaattttatatgagaaagtatatatttcttattttagatcaaaatatataaaacatggtgaatagtaattcgattaaatatatctttcataattttccataataacaagtcatattcacgtttcttagttaacgttgcttcttgagaagccttaattaagctgtaactgatgttgattgttctacttactcttgtttgctagtttgttttttgtttttaaatttttcttctaatggtttcattaggtcatattgtttcttttgttgatctttatgtttttatttttggatcgacattattttctttaccattattctcatttattaggtcatattgtttctattgttgtgttgatctttatgtttttttttggatcctcattattttctttactattattctcatttatttgtaggaataattacttaaaatattgatttttgtaaattattttatatttttacgttaatttttttttttacatttttacggtaatttataaaaacaataagaaaactacataaaagtaacaaaaaaaacaatatcaaaacaacaaaagaacataaatattaataatagacaaataacaaaaaaataatatacaaatacaatataaaaatacaccaaaatattatattttatataaataaaatttaaaaatcgtaaaaatattgaaaactccatacaaacttatttttgtaaatttttttatttgattttgtattttttttttaaattatcccttatttttatacactttttaaagtatattgcagaagcatcctatttttctttataattttccaaattctttaatgtcaaattttgtgattaaaccaaatattatttgtgtgggctcgtggctggacctagttctgtatggcctcttgcgtttctttttcaatggaccagactattgagttttttaatattattgggcctttattcgggctaagttcattatgttgcttgggcctttacattttcttacagtatttaacattaaacttttttttttttgaatacattaaacttaaacttaattacattatattgtacattttataaccccatttaaatgcatctgttgtaattgttaggatcatctcctatggtgtaaaaagtgtgctaaatttgacacacaaaataagtgaatattatattttacaattgtacgtcaatgtaaaataataaattaagatataaattaacataaaaagtaatcatcattgataattaataattaaatatatattttaaaaataatgataatattgtaataaaaaaaagtgtattaaaaacacttattaatgctacaggataatattgtaaataaaaaaggtacattaaatgtatgtcaatttggcataatgtatatcttatactaaatctagcattatttttagcatgtgtcaaatttagtacaatttttagcacattattgggaaaatatttgtttacataaaatcaaatatagttttacaccacttatttaaagttccattaaagatgctcaaatgctataaaatcaacaatgtaagaccattctaaaatgatgccacaaattcaacactaatgactctttccaatatcacaaaatgaacatgagtccattttgagcttccaaattgacaagtgtagggcatctatctgaaagggaataaatacatttacacatgaggatgagtaaatagtaaatacctacctagccttgacaaagacacccctctttctcttttccaggactaaaatatccaatttttcccatgaagagtttgattaatttgaagaactttcttctttgattattatttcaaggaaaaatttgtaaggactttgaaggaactaatttgacaaatataacaatatctagaagctaaaaacatcaatgattgtaatttgcacgtctcaattctcaacagttacgaaaaaatatttgtttcataaatgagaagaaaaaaaagtctttgaatttggttcattttctttgagaaccatatttggtgaccatgcattacatttacatgaaccaccaaacaccaaacaccaatctgtacatgttaatgcagattatgtggttgtgattccttgcttgctctactagtatgcccaattctattcattatatgaataaacaaaattaataacaagtggcataagttatggatatataaacaaaattaataacgactgacataagttatggacaaaaggaataattttatatgaatgaatcatgttatgatgaccagccacacacatgaattatgttatgatgaccagccacacacatgttataaataaaaattataagtatttttttaaaaaaaaaaatacaaacttaagtttaatttcgattgtaaataaatattta

SEQ ID NO: 308189 - DNA, 1412 bp, Cannabis indica
atttatttattttttaaaaaagactttgaaaaaaaaaaattaaaaatctaacaaaaaaaaagtgcacggaagtgtaacgtttttaatatttgtggggttaaagtgtaaaaatattatgattataaacattacttaatagtttcatatattttctcataaggtgccaaattaggatctcctcgcctaatataaaaaaaaagtgtaaagagtaatagattattcttatatgtaatttattaattatatatattgatattaattgaaaaattccttggcccctctaaagtttgagatggcctatattatatgtattaatatatatttttaattttgcagcattattttcactctaattaatgtatacataccacttcaaaaacttgatcagcccgatcagaaacgcacatttaatctaggaagaatgaaataatgaatattcattgaagggaaacaaaactaaattaaaataataagaaagaataagaaaaagaatatataacagaagagcaacaaacaatgatttggtgaaagaaatatatttcaagtaagatcattaattgttgaccatatatatctcgatcgatcatgatcatgtggttatattattagtagtactatttttttggttgatcatcttcatcatcagcaccagtactactctttattgtctttgtctcttctttttcggcttcatcttcttggacagacccttctaggaaagattccaccttctcctccacttcttctacctgcaatatattaatggtaattaatacttaattagcacctaatttaatctattatttatatatttgtacacaacatttattatatacatacatgtatatgtgctacacttgaatatttttatataaaaagaattccacactctacctactttttccacgtgcttattttattaatagacaaatttacattgatatacaattgagaaagtatataccttaaatgtagttagttatacaaatataatatatttcatcatttttatttatataatatgaaaatagacagttagctaaatatatgagtcaagcacagctatattggttgcttaaacgtggtgaaggggcatgaaatttcagtaggcttgggcatgcatgacgatgacatgatttcatttgttggtcaaacccattacctttttaggttatgtattgactttttcttatatttcctcacgtaattattaacatttttcttatatttcttatatattgactttttcttaaagagttctaataaaatatataagagaaatagactctttctcttattcaggaacagactcaattattttaatgtggggctatagcccccactaacaaaaatattgtattttaaaaaatttattttttttttaattttgataattatagattaaaataata

SEQ ID NO: 308190 - DNA, 1931 bp, Cannabis indica
attttgttttggtttgtctaagtagtcaaacttatgtcatggtttattttaggcttataatgatcttttgtaatattttggttgctttgaatagaaactaagtgagagataatcctgaatgataagaaaagtaaattctctatatctctatgcatatgttaaggtaaaatttcaaacttacatttatctttatttaacctctccaataatcaaatattttgctatcatcgaaaatgggagattgttgactcaagatctttttgtcatttatattatgatggtatgctatatttgattattaatgctactaataaattattgatcatgtagaagaatttcaaaatgtaatatctcaaaaacaaagaaaaccaacaacagaattattttcaagttgagaagaaattccaatcaagcatcgagatcaatttcaagactagtttcaagaaagtctatttttcattagtcttgtgaaattggtatgcatgcgtactcttggttaaatttatatttggctcaaaaagtattttaaaagaaaattattattttaaaaatatacgaaaagctacttttaatttcaaaagaaatcaaaaactatttgcaaatgaattagaaggaaaatttgttttaacaagtacctacataaatatgcaaaactttttgcaatacaaagtttcaaaataacatttttattttaaatgtgcaaagaagcatttcccagaaattatgccggcctatgcacgtcggtcaaccggtgtattaaaatgaagggtgcgcttgcatttttgagtgagctcgccatggtcataaacagttacagttatattagccagtcaacgcctatgtgccttactcaggtcaaagagcaatataatgctccaaaagaccatttctcattccctccataaatagaccactcttaaatgcttgaaaagacacttcatcattctaaaattgcttatatattgctatcaaagtactctaaccaatttattcaaaaaaaaaatcttttgaaaattattttcgaacttaagccaaaattgatctttccatttgagtgtgtgtgcatttctctctaggttcttacattgtctttcataaatcaagaaagtttattgtgttctgacaccctgaaaagccctttcattgtaacaacctaatattttacctggtataggtgaaattggcacttcaacaattcaaacaaggttgatagttcttgagaggaactattgtataaggtttaggtaccaccttggttaaaatacttgattgtacaaaaaattggtcaagtccataacttgacatgttagtggaactcaaagcttgttctaattttgaagaccaagaacttaggtgacttaagtttcactgaactttgtaaaatcgagagtttgatatttctattgctaactgatttcattttaagtatatactttgattgtacattcgttcacctatttactttaatttcattatttgtgtaaatagatagttcgggattatagtcccaaaaaagttttaaactttcaattcaccccctcttagaagccaatcttggcctactactttctatatttctttcaaaataaataatttctaaggtcgagtgactgaatcttcgaatatcagcaaagaaaagaatgtaaacagaaattgtaaaccagtaaaattaaattgataaaaagaaagtattatgagttcgtgaccaaaactcaccagtccaactttgaattgacatctaaggaaaacgttgattcaataggtgtcatagcctcctcagctgtctgttttagaagatttaaaaaaaatagaaattattcataataaagttagatgctgattttctgagcatgacatattattgcaagcttcaatatcacattcaagttacaaactttaaacaactttaaagtgtgtgtgtgtgtgtgtgt

SEQ ID NO: 308191 - DNA, 2200 bp, Cannabis indica
tgtttaaacaacatacttgtgagtagatctaagatcctggtaaaataaattccaacagatacttcaccacagaaccttatggcgttccaagatcctagaattccaaagtttgttccaaagagtgagagcctccgtggtagggggtgctcttgcatgtcaaggcctaagcaagagaggtagatttcgtagtccaaatccatttatcactgtcttggccccttggcctaccccctttgaggatatttctagttgtctctaggtcaaaaaggaaattgagcttggaaacatcctaattcccatcatcagtaagtaggtcagcaactttcttcaaaccctcgagacgactgttttttggatggggatgaaaatcatgaccatgtatcacccaccaatcatcccaaatatttgtatcttttccatccgaaatgagcttacaggctcctttcttaattaaatccttggacttgacaactttcttctaaaaccatgagtttgaattcttacacgaacacttcaagaagggtctacctttaaggtacttagcactcaacaccttgcaacacaatgaattatccttggtaaggagagcccaaccccatttagcaagaaaagcctgattcatttccgtggtcctctgaaaaccaagaccacctctagactttgggagacacaacttatcccaggccttaagatacatgcatgccactgttacctttatcacaaccccaccaaaaatctctaaccataccatctatttttgtcgcaagcttcttggacaacttcgtcgtttgtatggtatacagtgataaagaaagacgactgatttaatcaaagtagcacgaccagctttagataatgattttaacttccacccatgttactttgagaccaaattatccattatgaaattagagtctgcatccttcttacgactttaaaataacaggagacccatgtagttaatgttacctacaatagagtttagccccatggcatgtttaatattacgcttcatcccatcactggtattcttgctaaaaaaataaatgttttcactttattaatacattgacccgaccagtcatagaatttctccaggcactgccgaaatcctgtagcttcttccatcgtggccttacccaccaaaataagatcatcggcaaagaacagatgggaaatctgagggctattctggctcaacttgatccctttaattctacctttgtctagggcattctccaagagtcgcgagagaaattcagcagcccatataaaaaggtacagagaaaggagatctccttgtctaatactggattccggattaagtctactcaccttaccaccattaaggaaaatattgaatgttgtcgcaaaaatgcactgacggacccacccacaaaactttttggagccttgaagctactaagcatctgatatataaattaccagcttaacttatcatacactttaaccaaatcaatttttatagaaagaacccctcttttcctttttttatgctttaaacgaatgagtgatttcttgcgctagcacattgttatcctaaatatttcgacctgggacaaaggcagcctgagttaggaaagtaagcctggggagaacctatctaattcagtttgcaattatgttcgagatgaccttgtaaaccacattgtaaagggaaattggtctaaattgcatcactttttttgggtttagcaccttgggaattataactacatttgattcgttaattcccttatgcatagcccagatatgaaaaagtctaccactgtctcacagaaatcctcccccacagaaccccagtattgtttgtagaacaaggccgacataccatcggcacccagagctttaaagcttcccatagagaagagagtttgcctaatctcctcatgcccagggattaaaacaaaatcatcctgctacataggggttacaagtaaggaactaactatttgacataatctaatctattgatatttttttggatatttctaaacttttaggatactgaattttttcaagaaatatttttttcttaaaattcataggggtgtgcataaatcgatctaatccaatgagaactgaccgatccaattacattcgaccaccgaacattagatatccaattgtgatcggatcagattggatgctatttttaaatatccaattggatcgaatc

SEQ ID NO: 308192 - DNA, 730 bp, Cannabis indica
agacccagatttgaaatctgatattggaagtttcaattgggaagaaaagaaatctaaaaacaaagctgggaaacatgattccacagtgggaataggaatatgaatcatatgatcgagtttttgagttacggctaagccgaaaaacacagagacacaatggaaagagtaacattctgcgttttggagagaaacgacatcctgaactacccaactcattaagacatcgtaaacaacgacaagtcgttttgagttttgtgatagtgattttatgagaacctcaaccggttcgcggaggtgtttgctggctttgaccctgcaaatttcttcctcggcgttattggttttggagaaaagatcagttatttgagcatgaggcagtggaatttcatagccatggaaatggatttcggttaattggttaagagggtttgaggcacgagattttacctgtgaaatttggggttttgagctgatgtagtggactgggatgtcgtatgaggaagaaacgacatgggcaaattgaaggagttggttcaaatggctttgagctaggaatggaaccattacaaccacaactgataatggattattttcattggaagttgccatggattttcttctgttcttctcgatttcctttgcctttgattgatgaaaaataggtgattcatgatcattttcacatcgtgtggcccaggtgtctgtcacttatttttttgttttttttttt

SEQ ID NO: 308193 - DNA, 1013 bp, Cannabis indica
acacgcgtataaaataaaatagtctcacgtgcaacagatttattaaaccctatttacatcgtgttaatttttttttaaaatttctctaaatttagcaggatgtcttatatacaacatagacaaccatgaaaaaaaatcgaactaaaaattctctcatatggaaaaatagatagaggtgcatcgataaactccttttaaggagttatttaaaataatttcgatttttaacaatacaacctactccaaaaaaaaaaaagaaatccaaattcgatctgagataaactcacatccaaaataataattaaaagaaaaaccccaaccaaatactgagataaaccaactgaaaaaaaaaaaaacaaaaaaaaaaaaaactaacaaactactcaattttagtcgtttgggtccaccttttggtttcgagataaaatgaaggatgggagagaaagagagaacgcgaaagagactgtactgtggagtaggagtgtcaatgatgagttgggttgattgggttagaggtattttaatggactattgtgaaaatttcaacatgcaagtaaatgtattattttctaagtaatttctcacgtaagtaaagtcaatctactaaaattgtaactaattactgattaattgaatccaatttagttttatttagtaaataaatacttgaagttttgaatcactaacaaataccaaaaattaatcacttaaacaaattaaaaaataacaatgatttagaaaattagggattcaatttcaattttttaactcaataatataagtaatcttcttcttttaatctagtgtgatagatgattataaattaatctctacattaagacataaaataacactatcctaatataatacacacatataatacgttaagcaattgaaccatccacatacatacaatcaaagaaacagaaaagaattaattcctccttaagatcaaccaaaaaatttaaaaaatgaaaaaccgtgtttttgcaaatgtcagttgtatataagaa

SEQ ID NO: 308194 - DNA, 3329 bp, Cannabis indica
tttttgtaaaatttttgaccactgtaggcagtaaaaatataactttaaccccaaaactctagtatttttgtgaaccacctataaaaattccccaaaaaatgaaagagaagtccatagtctttgtattgggcctgggcttgggcctactagcccatttaatttggatcagacaaatttatttatttatttaatttattattttgtttagtgtggtcctgagaatagtcatgtcttcatcttgtaattaaaacgtttagagtttcagatctaaaatctcaaaaacccaactccaatttcccctcatctttgttccagctctgtgaaatcgtacgaatccttgttcttggattctaattcactccaacatcgatttcgtttcaggtaatcaagttcgtattgtttcttcatttgcttattttttcctgaattttggagtatatagtaaaaccagttcttgttaccctaaatttctgttaattatggtttagagatcctcttaaggttctgataaatgggtagctttgaatttttgaaatttcggattcatttttatagattattactggacctttgagcttagaaaagagactgagatttaaacattcaattatagagtttaaggttttgggtgagttgattgttgctatttaagtttgtgaatctgtgatattattagtataaagaaatgggtgagaaattttgggtgaaagttgaggataaggtgatggtggaatcagtggtgggtactgaagcatgtcagttcttgatctcattagcttctgacaatgggatttccgggttgaacaaaccgggtggcgattcgggtgtgcagcaagggctttgtcaattagttgaaaactgtaattggaactatggcatcttctggcgggttgtgagcttgaagtctggcggggcggccttgatttggggtgatggacattgtaggaatcaaaagggtagtgttgctgcagagaagaattcgagtgagagtggtactaattttgatggaagtgagaacaagaatgagttgaagaagagggtgcttgagaaacttcatgcttgttttggtgggtcaaatgatgatatttatgctaggaaactagatggagtgtcagatttagagatgttttacctcacttctatgtattataagtatcgagtcgattcggtttgtggtcctggggagtcatacaagtctggtaaagcaatttgggcttctgatgtatctaattgctcccaccattatcagtctagatcttttctagcaagagtggctggattccaaacagtggtgtttgtacctgtgaattctggtgtggtggagctcggtactgttaattctacccctgaagatcaaagtgttgtggatatggtcaaaactgtttttggagctgggagttctagttcatcacaacaaacaacaaaggcactcccaaagatctttggtcatgaactaagtttagggagtacaaaatcccaatctgttaacattaacttctctccaaaggtagaagatgatacggcttttccaccagaatcttttgacttgcaagcaattggttcttctaatggtcgaagtgacacaaatgaaatgaaactttttccacaaatgcttgttggaggtttcaatgcccaaacaagagctacaggtgtagtagagcctcctaaggatgatgccttgcctcagcttgatgaacggaaaccaagaaagagagggagaaagccagcaaatggaagggaagaacccttaaatcatgtggaagcagagcgtcaaaggcgtgagaagctcaaccagcggttttatgcactaagagcggttgttcctaacatctcaaagatggacaaagcatctctgcttggtgatgctattacttatattacagatctccagacaaagatcagggtgatggaaaccgaaaagcagatggtgaacaatggccagcagcaacagttctcaatgccagagatcgattttcaatcgagacaggaagatgcagtggtgaggatgagctgcccattggactcacaccctgtttcaaatgtcatcaaagcttttagggaacatcaaattgttgctcaagagtccaatgtttccatcaatgaaaacgatagaatcgtccatacattctccattcaaactcaaggtggtgaagctgagcaactgaaggagaagctgctggctgctctatcaaactgatttgaattgtagacatgtgtatttatataagatgtatttccctgttgcctaactgattaaccttgtgtactgtataatactcgagataatggatcatgctactagtataattctcagagaaatgatttactttgtcatttttgtaatgttcaattcagattatgcattttggggatcaacataatatcaaaagttcaactcaagataaagaaattacaaattttctctttagtgtgattttgatgggaaagaaattaaaagaaacaaaggtggtggtggcggctctttgaccacccatgttattcattttgttcacctgtttgaatacagaaatgatatatatatatatatatatattattttataaaggtgataattcataaacaaggattagtaacagttgaaaaatgcagtctgttttgtcaataggtgtacttggtcaacaaggaagtaaaaggttggctcaatcgtattttacactgcgttttgagttcgatatctaagtttgaagaagaccaaagaaaaagtcatatacttgtgagagccttcttagttttgctcctacggatatttttgtttttggtatacataaaaaaattataaattaactatttatgaataatttactctgctgaaaacaatattcagttgcacacatataaatacctgttttagtttatatgtgtacaataattaaacaattgattttttgtacaagtgaaatctctttagtgtttgtttatcgttccgctagcagggagactcatgactctgctagagtttcgtattcttttccaaattaaatttttagtgggagtgttgttacaactaagtttatctaattaggcgattgatctttcttaatgaaattcttttctttaaaaaatatattttgaattttattttcgacatcataaaaaagtattacaaaattcttaaaaacaaaataaaatatctattagaataacaatatacaatgtcacataaaaaaattaaatataatttattaaagtaccaaaaataaccaaaacaaactctctctctatatattatatattttaagaagagcacatgcccttaaagatttgagcattaaaaaacaatgaataataattctcaaaaaaaaaaaaaa

SEQ ID NO: 308195 - DNA, 1244 bp, Cannabis indica
aaccccattaatcattttgttttcttaatcattttgtatagagagaaagattagagacagacagaccttgtctgaagagacacattccaactcaaaccactttaacccagcatcagtggcttgagttcgaatcatggaaggcaagctagaagtttcatatgcacaaattaaagtctcatccaagtccaaaaccacctacattacattaccaagttgacccatattaataaacttacaaatatattcaataaagtctctaaagcgaacactaacacacttccctatgtcctcctgtgactaaatttgtttattattcaaaattccctataagaaaaaagatcatttttttgtcgaaattgcaagcacaatgcggatcaattaatcaaaagccctaagaaaacaacattcacgatgaagttaataaagaggaactcacagtgagcttttcaagaggatcatcggcgtgagagacaccatcttcgaggcagagagggagttcaacaagaggcaagggcttaaaggaaggagaagaggaagaagagagaatgcgattatgggtgaaaccgatgcaggaaagtacctgaggtacacagggggtacctctcaggatctgaagaaggatctcgaagaagaaatcaatccagttcatcaatgctcgccatagctggacagacctaggcgcgtagacttcagtcgccgtcaccgccgcgtggtcgatctccgccattgatctactactactgagtaccgcagtagaagcttttcacagagaaaagaagaatagaaaaacgatgacttttttttatatatatattttaaaattttaaaaataaaataaaatatgatattcttttctcactggacaagaagaagaatatcatataatatattatttttttaaggcagtgtgtttggggaattatctgatgcgccgtagttaacgttgatttgaagctaattgatgacgtggcttaatattatttggtttttaaattgatttgctgatggtcgtcagtgctactccaactctccaaggatctttctttctttgatctttttttatgtttttaaagctaaaattggtaaagtatttttctatttagccttagatcacctattcctattcaaaatacaaagaaatttttacatgaaaaatcacatttgtacaacttattacctaaatactcctacacgcctatatctacttttttacttacaaaattagttttattacacaaatacca

SEQ ID NO: 308196 - DNA, 906 bp, Cannabis indica
aatacaatatctattttatcatttaacaaaatagatagtctaatcaataatttttacaaaatataaggtctaaaataatattaatcttttgaaattttaagttttatatagtgttatgatgcttcgaacttcttacagtaattttctcataattttagaaataatttcgtctaaaacatcaaacttttccctaaaatttatattttggacatttcttattggctcaaaatttcaggagtaaccttatttactcaaaattaggctgggggaacctagctaggatcacattttaatagccaagttagaattcatgttaatgtttattattttataattttgatttattaggttaaacatctttcttgagagattagtctaatcttagtacattaaccttttaagtgtttgtaattaccaactccaataatattaatttgtatgatttttaatcttttcaataatcttcaatctaaatcaactatttcttaattacttttgattattttatttttaaaaaaaaaatcatcttatcttattataataaaatttggtaaaaaaaagtatattttctaaaattttattttgagaataattttttattgttatattattttatttttttaaaaaaatcatcttatcttattataatcaaaattggtaaaaccaagagtaatttgcggcacaaatacttaagtttaactctggttgttaataaatacctaagtttaatttttggcggttaataatacttaaattacatttctggatctacgtaagtaccttgaccattaaatgtcaagtcattgtccacgtgtcattttcttattggtatatttaaattattttttaaaaaataatttaatgactttgactaatcagggattgccacatggtaatttacttaat

SEQ ID NO: 308197 - DNA, 1066 bp, Cannabis indica
aaaaaaaaaaaaaaccaaaaaatcttcttctatgccaaaacatagaaattgtaactcactttaatgggtttactatataggactataattttcacatctcaattaaactacatagacattattattattgttgtttttttaatagaatattattattgttgttattaatgtaaaaagaacattcttcgaatgggacaacatcctagttggtattggttgttttaagaggccaaccttagattatgttagttatctatcgaaaaataaccaatttcgaatcacatgacaagttaccataagtaatgttgataattcactatggtgggttgtgagattaggacctatgaataagtttaagaaaatcattggtaacttgttaggtaacacatcatattacaagacctaaaaaaataatataccaaaaggtgatagtatagtcactcactccataccttatagtagctaaatgtgaaaatagtatctcttaataaccaaacaagatacatcacttataatttaaatttcattttaaagaagaaaaaaaacaacttactagcatagagcaatgctagacataataaaaaaaaaatacatactcaaatcaaacattatgatgtgtcatcaatcttaagaagtcaaatatttttgtgtgatccatcatttatggtttggattagtgatacattattgtgtgtgattgaaatgtatctcaatcattattcactaggatattttggttagtgtgtttgtctaaaactaatgagtaaaagtaaaaggtaaaaaaaaaaaatagtacgttaagtttaatttttacttgtctatgtttgtttttagaatctctaaatataggtcggattttttgacacaacactaaattgacacgagcacgagatgcataagcacgattacactcaaaaaaaatatagatttaggcacgacacgacacaacacgaaaaaatatgagcttaggcacgagacataaacacgaatagattatttcgaaagtgtccagtaatttgataataataacattgataaatatttatttatcaattaaaataatagt

SEQ ID NO: 308198 - DNA, 3141 bp, Cannabis indica
taagatcctagtaaaataatatccaacaaaacttactcactgttcaaagcttaaaatctacttagatgatgctgctcggtgtttccttgggtttcttcgaaggatttgagagaagaagacttcttgttctgattcttcaaaaaagaaaatggataaaagtggttgattagggattttcaccctatttttaagaagatttatgacccaaagtaatcatttcaaaattttaaatacctcggtttccccctaaaagtgtacgttgtacactctattacctgaatggtaactgtcaaaatgtgctaatttttaggcatggttcgaggcacatctcaacaagcattaatgagccaaaaattgaagagacccttggtcagagtcacatcagatcatcaagcgacagttcaaacatataccacccgttcagatcaggatccagaccgagtgaagtccacatacaacaacaaaggtcccgcatagacttaggggcaaatgttatcctattttttacactatgacgtggcaaaacacacgagtgacatgtgtccaacattccttgcatcggggcagagattaatgttcggaatagacttcaggtaacacatctacatgtataatctctaattacccaagcagggtaaaaggcagagtacccgaataggggaaagtttgactttctgaactacttatcagggcttgactacctcaaaataatatcgtgaagcccaagcatgaagaaaatccctacaatcatgagattgagtcataggaatgtgacaacctgttccattttcctattttgtacattgtaagcaaaagggaaaccttccttcatgcattaaggccctataaatagtgatctagcctcactgtaaaagagatcgaaagaattgattcagagagagaaatcaaagagaattactcagagacttcgttgtaaaagctttgagagagaaaacactgtgttcttgttctcgagttaatacaatctaaggggagtaggctattaccatactaacggggtcgaacctcttcaaaatctggttttctttattacttattggtttttgctctatttttattatattcttaattacttaataattgactcattgtcgttgactaaaagcgaggtcaacaatatttattttaatttgaaaatttatacttaaggttggaaaataatttatttattttcagaactacctaagttagtaattttcataaatatagattaaaatttatactagatataaaattacttttataattattttattcctaaattagtaatttgaataaatatattaaaataaatagtgtaataaaaatacaactctcttcaaataatgagcattatttgataagacattcgatctcaattgtgatcttacaaagttattattctaatgggacctcaaggcgcttgtctttcccctaattgatggtcaccattaaataatttaacaccgtaagatctcgaaagataagtattttcgtagattcattttctagtaaactcatccctaaagatgactacttagaaagagatttatttgtatgaaataatggtagaagctcatctaataggaatgaccttgactctcgcctaaatggatcaaagttggattctttttttaattagataaaaggttgctaaaatagtgtctatttttgaagagctcactactctatttaactaggtgatatctttgactctcgcctaaacgagaaattgtatatcattgagttgaaaactttaaaaaatttgagatgtgtttgttaatatttttttccatatttttcatacttgattatgtgcttacaatttttcaaatatatgtgaatataatttatattgaacattactttgatttttgttattcattatgtagtattaatttcgaatcttcattgttggtctaacttagtaattactttaatgggacacatccctaatggatagttatccattagataaattaatagtattagatctcgtgagataagtattttataaatacaaaatctagtggactcacctctaaaggttgtaatttagattagtgtttacaatattgaaataatgaataaatttataaaataagaataactttaactcttgggatatcgttagattctttttttaattaaaattgttccttagatttcctctatagctttttcattagaaaattgctgaaataatacatcattagacaagaatgattataatcatctgcttatgatattgctctattttcttctaagaaaatgagtagcgcggatgacttattcaagacattatatccataaaatgatgactattcttaatttttaggaattgaatctccttcttaaattgctgtttaatatttattgaaaatatacttgagtgatagttctgaaatcgatattaagcattttgcaagatgaatttagagtttgataatgtcttagtgatggtcaaggattgaatcgttataaatttctagactacataaacactgagtttaactttcatatgtttagatatccatatcaatggttaaactaagtgttgatgtatgaacatgaattttgtttgggagaaaattcaacaagctcaaattaatataaaaaaggcccattctaaaaagaaatactatataagatgtattctagataaaataagtatataggtgggagagttagatactagatagatgacatatctcaagtggaatgagatagccagaagagatgacttatattggatgagaaacatatctcggtcggctgacgtatcttggacagctggcctatctcggtcagctggcgtatctcggtcagctagcatatctcggtcgacaagcctatctcgatcgtctgacgtatctcagtcgatgggcatatctcagtcggcaggcgtatctcgattggcgagcgtatcttggtcaaccggcctatctcggtcaactggcctatctcggtttgtcgacgtatctcagtcagcaagcctatctcagtcaacagtcctatctcggccgactgacattcccttggaaaagctaaaatgcccttgatgcctaattttagcctatttcaaacttggggtaaaatggtcaaaaaccataaccctgcacaacctcggtattttatttt

SEQ ID NO: 308199 - DNA, 1880 bp, Cannabis indica
gaagaagattttgtacctgaagaaaacaaagaagaaaaaaagttcaggcaaaagttgtgctttaaccactttcataataaactattgtatcacagagaaaggtagacaaactataaacatctatgaacaagaaaactgcagtttgcagcctatacttagtgtttagtcagtacgataacaataacacaaaaacaatgtaaatctgtgaaatgcagaaaccagaaatggtatacaaacccaaagacattgaaattcatttaattttattcacttcattgattcatttgctggtctctacattcataccgagagtaccatcctaaaatattcaaaaaaatccacaaactttgtcatctctaatctatacaaaatgcagctactgcaagtaaggatctaataactggaaacttagatctaatacataatatccatacaacaacatattgttcagataaatagttagccagaaactcacaaatgctgtcatgtcagcagtgctctgctttgattcatccgcatcatgtccatcctgccaaaagtgccacaagtaacataatcattagcatgtgattaatactgtcagctcaaggtacatgaagggttgctcatggagtcactcatttgcagttttatcaattcaagtacgtttaattgactcatacatactattggtcttaataaggaacaaccaaaaaaaaaggcaattatagctgcaatcacaaggaaaaggaatagcttcctctgaccaatactttcctgactagtaatcaagaatttccaaataagtattacagtaacacagaacttttggggaaaggagctaatactaaaaagctcataagataagaagcctagcaccgttcatcgtattgctattggtacaatttaagtatgggttccacaagatttaatatataatttttatagaatatcgttaagcatttattcctcgcacactggtttgaaccctttaactcattattcatgctctgctataataaatctcatgctctaaaattattcatgaaaacaaaagcctcaaattttagtttgaacccattaactcattcatcccgagctctaaaaagatggattaaatactaaaatgagaggacgagcaatgcatatttacaaatataatttttttaaaaaataagaataagaaacaagcaatcatacaaaagaaaatgaaatacccaaatgtgatcaaacaaattaaacgcagttacagatccaaattgggtaattttcctacgccgattcaaattatcaatcatgtatatttcttacaaaaatatataaatcaattagaacaaaattcaaggagaaaagagaaaagcaattaccatgttggagtgtgttcttctctgttggttagggcttggaaactggtttgtggcgatatgcagtggtggtgtaaagagaagaggctcagcaaatttcaaatatcgtaccaatagaaaagctgttcaggtgtgaaattacgatattgtcccggtcagtggtagcttttttttactatggaaattaacccattaattattattctaggtgttaaatattgaaggaatttaagatactattgcgagtctatgtaatttcatgttggtttgatccctatttatttgtgttatttaaaaaataaatcatattgtgtcgtgttatataaaaatatgaattgtgtcgtgtcttattaatatttttaaagggtaagcctggcactgccgtaggctcgatattttcgtgctgtgttcggatttgtatcatcttctgcttgtgacaacccatatttcttaaacagaccaatttgttttcatatctggacttaaattcttgttttactttttcatatttttttataattactaaattatatgtat

SEQ ID NO: 308200 - DNA, 1742 bp, Cannabis indica
ttatgaaatcgaatgtatagtaaaagtaaaaggaattaattgagtccagtctaaatttcaactttccattttttcccggttaccccaaccaagtcaaagaatctatatgactaaatatggttctctatggactctcgtcaataatcttcgccacaaggtctaaaagttgagttttgaagcccaaaagatgaaagaaataggctttttatttttattaatattaacattattgtgaaatgcaattccatcatttccacataattaaaaaacctttcactaataaccatgtatgcatgcataattatgtaaacattctaatagctaccaaacaaattatgatgattaatgagtggacgtgagtgagtgcgtctttattgactataaattacgttttaatctctttttcaattctccaatagttgaagcaaatcttagtccacaagaatccaatttagaaagacttgtggggaaatacaacatctcctatcattagatacacttttctctctttattttctttttaaaaaaattgctttaaaacttcaagactaatcacaccgaccgtgttctatcaaatccgccaacctagctaacaacaaataataaaaaaaaaaatcatgacattatacgaggcaaatcaagattttatttctccttaatttaattttttttttttaaagcttctccttaattaaatattaaattaaatatatatcgtgttattgctattttgagttccttagttttaagtttttaacttaattgaaccattaattaaatgaaaatggtttatcgaaactaaatttggtgaaaatattttcaaatataaacctagaaaaatggttgctttgtcaaagatccacactttttagtaaactaatgatctcgtaaacaaaacacgagggtttaaatattttggcggaattcaaattcagaggactacattttcaataatttgacaagatataaaactcacaaatatatattttaaaacagagcattaatagtaaatttaaaataaatgtaaatataattttggactctgtattttacaaaaattatcaattaattcctctgttttgttaaattacaaaatagaccttatatttttttaaattgtacaaatagaaccctaaactaaatgttagtaaaaataaaacttaataataatatgatctagagatgttatgacaaaagtactagttacattttatgtatctattcgtgttagaaattgtcttaaagttggttatcttacaaaataaaaatagttaaaaattgagtttaggatcttatttttactattttgaaaaatacaagatctattttgttatttaaaaaaaaatattctctaattaataacttttataaaacacagtatccaaaatagtgtaataaatcatgcccattttaggttgttaaaaaaatttctaaaattgttgaattaaacaatttttgtctaattcacatgtactaaattatacctttcaacttttatccatattaggtttttgttagttaaattggacgaagctcaattcaacaatttaatagctcgaagaaaattttaaaaggtacatatagagaaaaaattcctaattaactaaactaaaacaaaagacttaaaatgatttgaactacctcatattcaaataacattattttaaagtctccttaataaacatgtcacactaaggtagtttttggttggaggtaatgaaatggaatggaatggaaaggaa

SEQ ID NO: 308201 - DNA, 1215 bp, Cannabis indica
ttgattcacaacgataatcattgtttcctaacataacatgctatgtagtacaaatgattttttttcttacttttaatccagattcatgcatgtcagccaatccaagtggagaaaatactcggtgatcttgatcttatttcacaataatgataaattgctaagtgtctattccaaaataatgcttaatatttgcataaaacaatctagtattttctactaaatctcgtggtataaacaacttaaaataaaacttataatttagctctaaaatgcataccatattttagatctcattgaaagcttcaaaatatagaacaattgaaatggaaaactcgtgtgaaaagttatggccaaaatgcgaattttgatccttaaaaaaacaattatttgcaaagacaaaaaaacttaagttttaacttctcaaaaccccaccaaatcaaactaattgattccaaacttcaacatccatacaaaatccctacataacataactcaaaatcatgccctgaaataaaaagtaccattaaagctcaagctttgagctttaaaagctgaaacttcattcctacctcaaaactaccacaaagctataaaatgagcatcaagactagtcttaaaataccctagagaaaaaacccaagacttaacaatctccaagcaataatagaataaaagtcaatcccttaaaacctatagttcatcacataaaactcaagaaagagagctaaaaccttagctcaatcttttatctttaattgtctaagcatctaccatctacttgggttaatttggggtaaaaaattcaaaggaaaaatgatagtggtactggtgtttggcttgcacaagaaggagaaggagagttttttttttagtttaacatatatgatatatatatataatcagaagatcatcataataataataataataataataataataataataaatattattttattattttttagcactaagaaatttctaaacctaaggtatttgatcaattctgagtagcctaaaatatcttggtaattctataatcatcttatctcaataatctcattaaattttttaactaaacccgttgtgatattttaggcctctgatcgggtctccaaagttgtcaaacttggaaatatttttattctaccaataaatcacattatacccacatattccaaattaaatttttataattaataaattacgctt

SEQ ID NO: 308202 - DNA, 2193 bp, Cannabis indica
ggaagtaggagcccagcacattgtagtgcatagagattcttagctggtggtgaattaaatatttggtgagtaccaaacaaaaggtgaaaaaatggttgcttacatcatgatgtttgggagcttctacaggggtttaaaggctataacgtctgctaggtcttgagggaccaaaatttattcgcaaatatacttgccaaacttgcaacagatcttgagatcatttaacacggagtagtctcgatttgtcacctagaaaagccaagcattgtggtctaggggtaatttccattgtcgaaaattctcgttcttggatggcacccatttacaactttttgagttcaggagagcttcccacaaataaagccacctccaggaaattttagtattaggctccccgttatgtgattatggatgggacactctactgttgaggactgtcaatgccatatatgagatgcattgcaagaaccaaaatcagcattgtaatccacgaggtttatggtggcttctgtggagatcacacatctagtcctagcttgtaaaaaaaaaatcctccgctaaaggtattttttccacaatgaagaaggattgcgtagagtatgtccaaaaatgtgaacaattccaaaggtacgctaaggttccacgtgtagtgccaactaaaatcacactcatgagcaactcatggctttttgtagtttgggggtattaatttagtaggatctctccccactaagaaaaaaggagtcaaatacgagatagtcacagttgattaatttactaagtgggttgaggcagagccaatgaacattgtcacctcaaaaaaggccctagactttgttatcaagaacactgtgtgtcgttttgggcttctatacaagattgtttccgataacaagaaacaatttgacaacgaacacttcaccaaattttgtgctcaacatagaatcgtgaaaagtttcttagttgtagcccgaccgcaggccaatggacaattggaagtcgtaaacaaaatttgaaaaacaacattgaagaagaaactctaggcatgcaaagctcactggctggaagagcttatgcgagttctctgggcctataggaccatagagagaacttcaatgggacacacaccatatgcgatgacttacggtgtgaaacagtaatcctagtagaggccacaatcccctctcatcgatgagatacttacaacccttcccgaaaccactccctgctctaggaaacgttagacctaatcgaggagctccaggaacagtcacaggtccaactcaaaatgtaccatggcaagattgcacgacactttaactccaaagtcaagaatcttacatttgatgttggagacctcgtctgagaagagtattcccaacttcacaagaactgggagtgggggtactcgggccaaattgggaaggcccgtatgagatacttcagcaagtggaccaaggaactttttaaattaagaggatggatggattgagggtccctaatgcctagaatgcagaccacttacgtcggtactaccaataggctgaggtgaccaagccttgatgtgcctctttagtttcttgtaaatttttgaacaattttcttcttaatataagcctacaggtacaatgaaatgaaaatagaagaagtttgcacttaaaactgacctttttttattcttaaaccgcaagatatgttttaaacaagtgattgggaattcggagacgtctaaacttcccatctcacttggggggtaccatgcctagtgtcacgggccgactatttgaacactcccaagtaggcagaacatgcagcacttgctggcacaccgagctagaaagtcagccaaaacgcgcctgcaggcaaacaagttcaaaggttaggcccgatacatgtctcgcacatgttgagtgcaaacaagaagcatgagcaagcaaacacacatcgtacccaaggaccactctcacacaacccacaagtaaacatatagacaaatggcaggcaatgacccaactaaggcaacaaacatgcatcacaaaggcaacattgaagcatacacaagaagtatggagaaacatcgttttttatacggccttgatagggcaagggagtacatagatgggccctttcatgctagtgaaaaggtgcttgataagtcaccaggtcacccccctaaagagcttaatagggttt

SEQ ID NO: 308203 - DNA, 4380 bp, Cannabis indica
ttaaattatatttttatcacttgcaaaagataaaatgtagtttataaaaaatcaacttatcgcttttctccttcgtttttgctctagcagcttgaagctggagccatggcaaaaactaggtcgaaaacccgggggaaagcaaggaattctgataagaagtaaggaaaaaaggccctaactcggtttcggatgttattcgcacaaagtcagtagatgaaatcattggtgttactccattggagttctcagaagacgagggagacgatgtaccaggtatggcagggagcagagtcgagagccacaacaggatctatatccacctactctgtctcctaagtcctcattacaggaaatcaagcgatatgatgaagctcgagatgacttgctgcactttattcacctgaataatcaatgtaatagtgaattgaatcaaggtaagaacactactcctcctattttacgatccaattcagtaattaggaatttggagcaatccatgagacaacctgaacaggttaacaaagttaaaatcacaattgatgatatagaagatgaggtgaatttctggcaaccttcaattgtttgttatgtcctgggatcaaatccccctttgcacatacttgaaggttttgctaacagactctggaaagacaagatcgacaaggtcagaatgctctcatacggagtgttcattattcggttcaactccatggaatacagggaccaagtgctcaatggggggtatattttcttcaatcgacgaccggtgataatgaagccctgcgatgcgaatacgaatttcagaaaggaagatgtgaagataatgcccatctggatacagttagaaggacttgaacttaagtattgggggcagaagtctctattcaaaatcgtggggcagataggcaaaccggtgatggtggattcagtcactcgagatagggataggttgaattatcctagaattatggtggaagtttcactgaatcaagagtttcctagcacactggagtttgaggatgagtatgataatatggtgacagtaggggtgaaatacgaatggaagctagatctctgtactaactgttctggtatggggcatgtgactacagattgtaagaagaaaaatggagttaggcaagaatgggtggttaaagaggataaaagaaaggagaaacctatagttgatgatgaaggttttcaagctgtagtgaaaggaaaaaaagtgcaggaacaaaaatctgaagcaaaagagacaagtacttcaaatggttttgcaatcttaacaggggtacatgatgatgatggaactctgcatagacagtgggctgatgatgaggaattggaaaacacaagagaggggggaggaccctctcttggtaatggataagtttctagtttggaatgttcggggagccaacaaccagcaaaaacagcaacaaattaaacagttcattcgcactcaagaggctgggtttgttgggcttctcgaaacaagggtaaaggttcataaactgggaaccttgtaccttaatgtctttaatggatggtgtttttcatcgaatatagcatggcatcaaggaggcaggatcgttatagcttaaaatccaaaccaatttattgttgatattatcaaatgcacaagccaacttatgcatttgaaaataaaaacaatggatggatcttttcatagtttcttgactgttatttatggcttcaatgaaaggaaagatagattggatttatggaaggatttacagtccctaaagacagctgaaagttggatactaatgggggattttaatgcaatcactggcaaagatgagagagtgggacacaaggtaaaataccaagctgagcatgagtttatagattgcattcaagactgccagcttgaggacatcaaagctactggtaatttttttacctggacaaataaacagaatggccaagacagaattttttcaaagattgatagaattttggccaaccaaaactggttaactacctacccgacagctgaagctttatttctaaatgagggcacctatgatcataccccgggtattctgtctttgtttcccaaatggaagtgtgggaaaaaaccctttaaatatttcaggatgtggaaaacacaccctgaatatgagaggagagtagcggatgtatggaagcaacaacttagtggcaccagaatgtaccaagtagtccacaaattgaaggccctaaaagctgtatttagagagattaaccaagaaggtttttcagatctgcaggcaacctggactcaagcaaagcaggttctagatgaaattcaaaataaactccattcagaccccttgaatgaagatctgcaggtacaagaactcactgccaggaatgcttttattcaatcacagcagcggtacaactcttttttacagcagaaagctaagattagctggattcgagatggagatagcaactcagctttttttcatgcgagtattaaacaaaggcacaggcagaatcaagtatactcaattgagaatgaagctggggtgagggttactgagccagaacaggtcacagaagcttttatttcttattacaagtctttgctgggatccaaaatggcaaacaggaagaaagtttcaaacagaatactgagtagggggccaaaagtgactgttgagcaagctgagatgcttagtagacctttttcaaaggaggatgtcaagaaagtagtgtttgagataccaggaaacaaagcaccagggccagatggtttttccagttacttctttcaggataattgggagctggtgggagatgatgtgtacaaggcagttacatcattccttactactggtaagttactcaaagagattaatagaacagtccttactatggttccaaagctaaagtgcccaaacactgtcagagattttaggccaattgcttgttgcaatgttatctacaagattgcaacaaagcttttgtgctctagaatcaaatggattctccctgagttgatttcaaacactcaaggaggatttattcagggcaggttcataggacataatatcatgatttgtcaggatttagtgaggcattatggaaggaagaccaacaaggcaaattgcatgatcaaactggatttgcaaaaagcctatgatacaattgactgggagttcttagaagagatgcttatagggctccaattccctactcacttcatacagattgtaatgaattgtgtgaggacacctagattctccataatgtttaatggctctgtacacggattttttgaggcaagaaggggattaagacagggtgaccccatgtcacccttactgtttgtgctaggaatggagtacttatctagaattcttaaggaagttggagacaaaaatgagtttcattatcatgagagatgctcagcattgaagcttaaccatctggcatttgcagatgatgtactgctcttctgtaatggggatttcaaaagcattctgtatatgctccagggtttgaaattgttctccatctcttcgggtctgcaaccaaacccccagaaatcagccatttactgcagcaatatggctcaggaagaggtaaatagagtctcattagcttcgggctttactcaaaaaaatatgccatttacttatctaggtgtgcccatttgtgctaaacgaatatcagggaatgaatgcattgccctggctgaaaaaatgacagctcgaattaaaacatggagctctaggaacctatcctttgcagctagggtagtgttgatcaattcagtacttatggccatacatacatactggtgtcaaatgctcattctgcctaagaaagtgataaggcaattggaatctatatgcaaagccttcctttggaaaggccaagcttgtacatctggaccaggtttgattgcttgggaaacattgtgtcaatctaaaaatgcaggagggcttggctttaggaaaatccatgaatggaatcaagcagccatgggaaagtacatttgggcaatagctcagaaacaggacagtttatggctaaaatggattaacagtgtatacctcaaggaccatgaatggtggagttacaaggctcctccccagagtagttggtactggaggagacttgtgaatctgaaggatcaattccgagacatagctggccatcagaactgtactcaacaacaaaattaccaggtacaaactggttattcttttctatgtcctgttcagaacaaggtgcagtggtctcaacaagtgtggggtagattaaacactccaaaacactcatttatcttatggttagcaatccagggaaggcttcgcactaaggatagattgaggagaatggggatgaacattgatgaac

SEQ ID NO: 308204 - DNA, 1395 bp, Cannabis indica
ctccaagaattgacgaagagatcactcaacttattaataaataaatatatatattctgtttggatggcaagaaaatcaatcaaaaagggaaaaaaaaaaaaaagagagaggtttggaaaatttgggttgggtttactgtgaaattgtaagaagagtcgatggaagaagtggacatagaaaaggaagaggccgaattagttcctttaaaaaaacattaagacgtttctctccatctccaatttaggtaaaatgaaataaatacgtttcgataaatgaaccctcgatcgatacgtttcgttttagttttaatttctttaactcaaacttattatcatttcctgtaacacacgacacgccttcacttaaatttttgctttcattaattaagggttattttttctcatgaaactagattttttcacaaggttcaacagcttttattttaacaaatttccaaatattaacaaaaaaaattattgcccatattaagtaattttttcttctatattgatttcttcattccaaattgtgttgtaaaattttggtaactaagaaaaaaaggcattggcttcacctctcacttttcaagtaagtctctctctttttacctttttaagttgattcaaataactactaaaattcaattagtttatgtatttaataactagctaaaggcttagacatggatataactattaaggtaataaaccaaaaatatatccttacatgttacacagtaatattactcttaatattattactgatggtaggcttacaatacaaaatacaagaaaaatgtttctccaaagagaaaatttacaagagttaacataatggcattgcatatcctatcctatcttatcctacaataaaacataacccagaaatcccaatagtgaagaacaaaagtgttgtcataaattcaagcaatgcaatgcagatcaagaatcaaaaccagagtatataccactatctctcaacaaccttttctcttcttcaacatagttatttcccctacttgcctgaccaagttctcttttcctcttttccttctgagagaaagaaacactctctctttctctctcaaactctccttctcctgcctagtcagtgcaccaagaagctgttctccctgcattaaggcagctctggttttctgcctttcttgaaaagactcctcgctctccttggcatcacgtttctccttaccactagaccaagaccagtcttgctcttctggctcttttgggggtggaacactcaacaccgatggtccacctttatacccatatctcttcaatgcgtcaaagtcaaccgtagtagtagtcttcttcccagatttcactgttacaaaaaaccaaagctagttgacacaagactacacttcatttttta

SEQ ID NO: 308205 - DNA, 1471 bp, Cannabis indica
cattacagtaactttcacccccaaaatcccccaaactcaaaaaccccacctccgattcttcttctcttcaccacttacttccttacctctgcaactcaactcccaaatttccatgggcaaaaaggtaaaatggagctggacctcagcggctctcggcgcggcgtcggcagtggcggctacagccatattagcagccaagccaaaagacccacacttcgacctcatctcaatcaacttcacctcatttaaactcaatcttccagttctcgacgccgagttaatcctgaccgttcatatcacaaaccctaacatcacacccatccattactcctcaacaaccatgtccatcttctaccaaggctctctcctcggctcggctgatatcgaggccggctcacaatctgctaagtcatgtaagatgcttcggcttccggctcggctcgacgggcttcagctagctcaacacgcttctaagttcttgtctgacgtggcaaaacgtgagatgttgttggatgccagcgtggatattggtggaacggctaaggttttgtggtgggaccatagatttaaggtacacgtggatagtcgggttaccgttgatccggtttttcttgatgttattgatcaggaaaataggtctgagcttgatgtttttgcttaattaattaatggaaaaaaatgtttgtattaatggaaatgatttgagtgagttaatggaaatttataattaattacaacaattttataatgctttttcttacgtttatgtttatttatttatttatttattatttttttaagagattatttattatattttagtattatgggatgaaacaaaagaatccaattagtggtgaacaaaagtgagtccaattaattatttatttttatttgtaaaaatagtttgtaaaataatttttaaataaataaataaatagtttatgctgccattttttaattatatttttaccgcaaatatttttaaaaaaataattataaaaaagaactcatcatctatatatattgtatgatgaaaatgcaaagaagttccaataaaattagacttcatctttatatttttcacaataatactgggagacttttaattctacttcttcataagtataataatctcttgaaataaatgaaaaaggtaataagacacgtttttaataccttctaattctacttcttatacaaggttgaatgttctcctcccctcacttctatttatactcctttttggtacttaggtgtcaacttctcaaggtattcttgaatatttgtctattattatttatgaggtgtcattgagttataagtctaaggtgtgtggatcatcctctccgatatattgagtcattccgtgtgagatatataagtcatcttgtttgggatatgcgagtcatcccatgatgtgtgagccatctcgtccgagataagagagttatcccgtccgagataagta

SEQ ID NO: 308206 - DNA, 1617 bp, Cannabis indica
ttgatgagtggtaacccatttccttattctttcatcataatttaaactttctccgatcttgattgtaaaagtttgatctcgttttcattttaaaataataaaacaaagattttactttactagctcacatactacttttggcaaatgggcttctgacattattcgtaatatctctagctaacttttagtttgatataacaaactgacaatttggcttgttcatttcgtaagtaagaatatatatatatatatatatatatatatatataatgcatgctagctaggaagagcgcagtaattgaatcgaatgtgagaaccactcaacttttcgaccaaataaagttttgagtggctcaccgttgagaagattatatatgacgaaacaacttttattgaaattaattctagtacatgtgcaatttgacgaattagtaacactatagtgtgggctgaattagtttgacttgtcgtcgatggaaagaaaaaaactataacttaattaaggttcgctttgtaaacgtcgacgaagaaccaaggttacgtgtcaaaacaaatggtccaaatacggtgagttctggatcgatctcattctttggaaaagtattcttttagtaatatatatatatatacgatgttatgtgtcacgtcacgtttgttaattttattttaattttcttttagatatcataattttaaatttaataatatttaatatagtggtaattattgaaatttgaagtataatagtgatgatttaaataaaaataaaaattactattatactttgtaatagtaattaaaaaaaaattataattcatcttaaatttatcttcgtaattaatgaaaatgctcatctcattaaactattaaaacaatctaataattaattatgtatttttatttaaaaaaagtcaccaatatattcaaattttatatagatatatttgttagtttgttaggtcggatattgcgatgccaatcgatgaaccaagctttatagagtactctcactcaaaggggttcctatatgtattatcaccacaactctatatccgaacatatataatatatttatgaacggaaacactcaagactataatataagttaacaaaacagagttactaatcaaagtcttcaattaggtagaggaaaatgattacccgagcaaagttaaagttggcattatttctttgtgtcacttcaacttcctttgatgagaccccaaatccaaatatctttgccattaacaacagcaaaatgtcttcaaaattcaatcaacctctctagaaaacacaaacatgtcacgtttggaaattgacctggcctggctggccctttgtcaatacttatttacgaaagttactacccctgaaacagaaccggttacaaggttcaaataatatctttattctttgcatttttaacctttaaaaatgtaaagatacttttcttaatcattggactgctatacgtaatgtcctcaagagcgagagctagccacaattttcataattcatttatatatatatatatatatatttctattctatataaagtgtacctatataactgaaattcttgttttatgagaaattttgggtgacttttaattttta

SEQ ID NO: 308207 - DNA, 3277 bp, Cannabis indica
attgtgtagaatccaattaagaaggagaatcagcatcaaaggaaggagagaaagagatccaagtttagatcttgatttatgtcctgctacaggaaggaatcaagggctagagatctgaatggaaggagtcattatattccgctgcacccaatgtaaggatttcttaaactcttatgtgtttattttattgttttagaattcatattaggatgttaatgaaacatacattgtagtaaatctagatcctagtaaaatattttcaacatgttatactattaaaaataggttaattaagattttcactcctcaaattttgatatatattaaattatattgaacttttaaggctattaaaaaaatttcctgaatcattaaaattgttaaatttaaaattttttatctaattttataaagaaaaatttaacatgaatcaaagtttaaaggacataatttagtacatttcaaagtttgaggggcatggtttggtaaatatcaaagtctgaagaacataatttaatacatgggcaatcaccgaattagtaaaattgaattaaattagacaaaagtccttaatccaacaattttaatagttcaggggagatttttaactgccaaaaaaatttagggaacatgatttagtagatgtcaaagtttaaggggcaaaaatcgtaattagccttaaaattatgtgtcaagctatataaaaatacaagttaagtcgtgttgtgctcagattcattttatgcttggatttatgtcggcctttacttagactgacgtggtttcttgtatgagctcaaattcatactctattttttacattttatttttgtaattaataagataattactaaaattatgtattttttataactttaattatttttatataatgtttcacataaatctaacatgtcacactttcaaaatagattattcgtgcttacatgtcatacgttttgtgcttgtcgtgttgtgccaatttataacatcgtgtcgtacctcaacttatattttttcatgtctggtcgtgcttgtacctcctaaattcatgtcagtttgaatcgtgtaaaaaatacaactcatatttagaacactaatatctaacactaccacaaaatattataatgttattaatataattaaatattatacatataattataataaaaatttacaaccattcataaaacgcctccccataataatagtaattagtaagcacttttcgtataaagtctataatacactccatcactattttttttttaatgattatggatgttatatttatttagagttacatgtaaattttttaaaaaattcgaatagtttacaataatgataataaggtttaaatattttgttccatacgtaattattttttattatacgtgtggtaagtaattatttaaactttattttcgatactgtaaactttaaaaacagcaagatacaggattaggaaaaaaattaaactataaaactctcatacataccgaaatttacaatttcttacaatattatagagtaagttagtaaacccactaaaataaatgtttcagtagacctgttatttgttttggcttccacaagagcttctaagtctttttttaatgatagtgtacgttataattatttgaccacaagtagatttaaaaaaaattctaaatagtttacaatgctgaaaataagatttaaatattttattgtacgcatgaccattttttttttatatgtgtggtaattaataagtaactgtttgaatcttatttttgacactgtaaactatttgaaattttctaaaagtttacacgtaatcttaaataactaaaacgtatataattaatcataaaaaaaaattcactaaaaacttttctaaataccgaaacaaataaaggaatttaccagtgttgggctcctgctccaataccacttgtttggccccgtccttctaccttgttgggctaccacctcaccttaactctcacattagtatgagtttatccgctttgagactaaatcctcataagtttaatttttgaacaccttctcaaaaacctcgtactaataaagtaatatccattcttatatactcataaacttttttattaaccaatgtaaaactttagttacataaattttcacaatattttatttataaatattgctattagacaccaacgatgtttaatatgttctaaacgtatcattttgcaattaattaacgatattctataaaaattattatgttaaactatatgaaactcgatatttagtgaatcaataacaatattaacacgtagtaaagtactcgacaacacataccttctagcattcctctatatatatagggatataattttgtcctgtgatatactttcacggaatgtattttgtggtacattagatgggtctcagggtacattaaatgagtgtcagggtacgtttatactttttaaccataattaccccaagatcaatctcagccgtcaaattaaataactctctcatctgaaggttgccgtatatcatggattacaatccgtaaaagtacaataacggaacaaaatcatggtatccctatatatataaagatagaaaagtgagaaagaaataaaatgattaatagagtaaagtcagcaatcaaatccatctatccttccatacatctctctcaatcagaaagaaagattgatgcaaatgagaggattttgacattacattacgctcgaattttgaggcacactttttatatatataaatttcaccctctttttttttttacttatatcatatctcacacgttcaattattattgtttttttttttttttaaatattattttttacaaagaaaaaaaaattatgtaatagataatagtttcaaattagatataaaacaaaaaaacaacttttatttaattccttacccatctattctcattatttgacataggaaaatggtagtttgtttgtttattagtttgatagttcttatgcttctaattctaatttggatactagaatttaaatatacaataattttaccacattacttattttttttttttaatttgtttccaaaaatactcatatgcctcaatcactcaaactctattcccctccctttttcttacggcatgtttagtttagtgtaatgggaattgtaatggaatcattattactgttacattttttgtttttattttttaaatctttgtaatagctttacattgtaatggtcattacactatgtattgtaatctccattacat

SEQ ID NO: 308208 - DNA, 1064 bp, Cannabis indica
tgaaccatgcaacattaaatattatttctgatctatattaataattaaatctgattatattgaaatgagttttatttagggcataaaacccaacattatcttctagacctagaaagttattagaaaaagctatgtcctgagaattagtattaggcgagaaaagcatggaagacttagcaaaattcacagattgacgaatgactttattatatagattaagaatgtccttaatggctctacatttttgaggattaatcatggtatagagcaaactatcatcaacaaataaaagatgagaaatagaaggagcagaacgacaaatagaaataccattaaaacaattagcatgcactttagtacgaatagcaccagaaagaccctcagctaccatgaggaaaacataaggtgacaaaggatcaccttgtctaatacccctagtagggagaacaacagaagacaaatgactattcatacaaagcttgaaagagaaagtagaaatacaattgagaataagagagacaaaactatctaaaaaataaaatttaataaggatatacctaataaaattccatttgattttaccaaaggccttcgccatgtcaagcttaagagcgacctaacctagtttaccacttatcctattattaatagcatgtataacttcattagcaataaaaatattataaaatattgttggaatatattttaccatgacctagatttgctaacaagtatgtttattaacattctaaatatgaatttccaaaataatgaaacttaaacacatataaagtttgagaaaccttacattgattgcagctgaatataatgactcctcccactcagatctctaacccttgttcctttctgtcgcagagtattatcaagatttgagaccgattctcctttaattgtttagattcttcatagtcttacacactatgattgagtactagacttgctatgcgtgggcatgtactcattcactaagactcgaaaatatttgtgaagaacactcaagaattcaaaaattagaagaaagaagaggaagaagtctcaagaac

SEQ ID NO: 308209 - DNA, 808 bp, Cannabis indica
tttcagtaagtggggatgagatttttacagaatcaattgctttgctcatatcttcaatttcagtaacaacaccattaaacgttgcatattaacagctgatcttctgtttgaatttggattacccttttcaatcaatcctaattagtcaaaactcttcttattattatcattggagagatgtaattataattattaatatcagtagaaagaggcaaatagcatcttagtagtggcagatatggtatcttatactaaaaattatatttataaaaaaatacttttaaaacagtgcattatacaattttcttgaatataagaacaatgtgtcaagtctcataataaaaataaaattaaaactcgataaaaagttaatgtaaagcaagtcttatatgcatgcacagtcaattctcttttaattcccattttgtataagaaagaatatttgatattaagttgggaaagactgacacgtcatagccaattcactctttgaatggtcattctttaacgtgtggttatattccagaaatcttcacacttcttttggtactgtatatacacttggcacagagtggcatatatgcaatttgcccatctctactaatactattaatcttcgtttaactataagaagacaattggcaattacttatgtttgtgtacagtggtggtgataataaccttgaattgatacaatttatcacaaaattataattaaaaaagggataattcaaaaaataacaaaaaaaaacacaaaaaacataatacaaaaacactaataccatatacaattctcttgtgttaagtt

SEQ ID NO: 308210 - DNA, 1637 bp, Cannabis indica
ttaaatgtcacttttcaacatggaattcttgaatattagtgaaacaatctatttttagtaatgaatttttcttaattttatatgctgaactatgtataatacagtgataggtgaaaacttttttcatttctttgtcattatgcttcaggtttacagtgaagagtgaccctagatggtgctgtacatatcttcttgatgcaactgatcctttgtttgttgaaattgggcgagcattcattgagcagcagctagaaggtgaccactaatcccacaccttgtcttttgtgcttataggatttccagggtgttgtgctttcttatggcaagactgacactctaaagttcatattctaatttgttccactggctggtttacatgttttggcagaatatggaaagatgggtcatatatataactggtaatgttctctaattccatgactgttcctcccaagtttctctaacatcctaactatagattgggaatttgatttgaaagagaaagagggggggttagtcagtctagaaagaggtttggagaatggaatttcaagcttccttctgctgcaacttcttttactcctctaattttaagctataatgctggatggtttttataaatcagatttttaagattgagagaaggaggttttgtggataaattaataatgatatgtgaaattctaggttcacttttctcctaggctagacgttatttcttgactgataggcttttccccacaaaactattatcgattgcatcaattaatacataagcaaatgtagtgttcgatgctgttcattccaaatgtgcatggatctaatataaattgatgttatatcacaacatgttaatgacttattggacccattgcagtgacacttttgatgagaatactccacctgttgatgacccagagtacatttcttcattaggagctgcaatctttaggggaatgcaaagtggtgatagtaatgctgtctggctaatgcaggtaaataggttaaatctcatttgatcttttactcagagcttaagtatgttttttatttatttatttattcgaaaaagagaaagagttctcttgttttagattgaccccctccaaagtttattgcgtaatctcacatatggcggaggaaaaccgtagtaacaaagatatattaaaataaaacataacatatctgcttttaaatagggatggggattaatctatcaatacaaaatattgataggccttaaagcactcacaacaaatgagttataatagctaaaagctaaaaaaaaatagctaaaagtttaaaattgagctccaacaaatgctttaaatccttagctattatacctcatcccaaactccaaaacaaaattctctacatttagctcatgaatagtgaagaggtaaaacatagtttatattttttctttctctctttcattcaattaattaattttttattatttttttactcattttcatatttttttttgttttaattaataaaatatatgtaaaaatataatatttatatgatatagagaaaaatatttagaagctggtgtgtggtgtaatgtaaatgtgcgaggtaaaataaagaaaatagtgttttagtgaggtattttaaagaatagagta

SEQ ID NO: 308211 - DNA, 2043 bp, Cannabis indica
ttacatcataataaccacatgatctaacatcaatggtaaaaaaaaagttccctaccggtaaggaacttttgctaagtcctactatagtcttgccctatatatatttgttttcctttttcagttaagttcctgatgtatgtacgatatttgttgttgaactgattccactaatttctcaaatttattttctcttttgttttattcaacaaatttattatattatttcctagtgaaatgtaagattaagttagtttcattttcttatgtataattaaatttcaaatatatcaattgtaatcaatatatatatatatatatggatcatgaataataaaatacaagttttcactgtatatcttttcttcacatggtattagtagaataatttcccttgtttcttcatcatgtcagataataatcaaacctccactactccattatcatcctctcacatcaaacaagacccttactctattcatcattttgatagtcctgcaacagtccttgttacaccgctcttaacaggagataattatagatcatggcgtcgcgcagttagaatggcacttcgtgcaaaaatcaaactaggttttgttgatggatccttgcccattcccaaagaacaaaatgatatttccaattgggaacgttgtaatgacctagttggtagttggattctcaatgcagtctctcgtgagattcgtctaagtatcttgtatgctgaaactgcagcataaatttggactgatctcaaagatcgtttttctcaatctaatgctcctaaaatatatcaattgaagcagtcaattactatcctcaagcaagaaggtatctctgtattattatattctactcaactcaaatccttatgggatgaactcaatttcattctctctattccttcatgtatttgtgatcatgctaacaactatattgatcaacaaaatcaagatcgttctatggagtttcttcaaggacttcatgaccgtttttctgctattcgtagtcaaattctcttgatggatacattccctttaattcagcgtatctataatttagtacgtcaagaagaaaaacaataagagattaatattcgcacaactccgacaattgattctgcagaactccaagcatcaaaactaccttttaagtcacctggcaagcgccaacgccctttttgtgaacattgtaacaagcatggtcatactctcgctacatgctatcaaatttatgggttcccagacaagcaggtgaagaaacaagggccaccttcatcgccttccgctactgtttctaatcaattgacccctgaacaatacagcaagattcttgctcttttatccaaagatgaatctaatggatcatcagctaatttagcaggttcaatcctcacttgtttatctccttcttggattattgattcaggtgcttttaatcatatatgtacatctcttttatttattttttttcttcatattccactgttaataaaggtatttcagttcaattgcctgatggctctcgtgcgcctgtgacacacataggaacaattcatttttcaccatcacttattctgaaagatatttttcatattccatctttcaaattcaacttattatcgatttctcaattgaaaaaatcaagcaattgtgatgtcttattttcatcttctcaatgtatattttaggaccgagcaacgaagaatatgattggtcagggtagtgctcgcaatagtctattttatctagatgctagtttgcattttaattttgtattttcttttaagcgttgtaataagtttgacatatggcactctcgcctaggtcatccatctagttctcgttttaattttcttgttaagacttatccaagtattctttcaaataaaagttttatttgtgatgtatgtccaggtgctaaacaatcacgtctttcttttcctcatgtaacatcccgatttctcgagatgtcacacaaacaatttaataagatgaagacaataaaatatttctttattaaaaaatatctaagcatgagatctca

SEQ ID NO: 308212 - DNA, 1327 bp, Cannabis indica
tgtgattaaaaaattaaaaaacaaaagtgttatcaaacggcaccttaattaattaattaggacgtgatcatataattaaatttattaagtaataataacaagtgaagtgtatgtacctgagatttgagattatcattgtgtttaagaatggagtcataattagcagaaagggaatcataagaggatttgagaagatcataatccctttccagttgctttgtcttccaccgtgcccggcggttctggaaccacaccgccacctgtctcggctgcagacctaacttctttgccagctggcttttccgatcaggctccagcttgttctctgactcaaagctcttctccaacagatgcacctaattaattatcatcatcaattttatcaatatccaatccaatccatatatatatacataaatatataacttttaaaactaaaaaagggtcaaactttatatatatcaagaaaagctataattaatcgaatcattatttagtaatcatacagtgtagtagtgtgtatttggacaaatgggacataaacaaaatgtgtctaaagtgactaaaactggtctagtgtacaataacaattctcttaattaatatataactctagatattattctaatattcgatccgttaattacttttttccctataaaaaccagatacattaaatataaaaaagtgaagaataaaaagacaagctatatatatatatatgatgtaaaggaatattatttttgtagattatgtgtataatatactctcttctttaccaggattaggatacaaattaggagctatatatatatagtttattatatatatatatatacctgctcaggagtgaggcggcgcttcttctccggcaactggtcatcgtaataatcgtcgtcgtaaagatcttcgggtgagctaaagaaaggtctctttttggagctttcattaatatccatgctcatcattgatgatcttgttggccctataatcatacaatacaaatcatttcatatattgcttaatacaaaaattagttacatcaacttattaattaattatgtatatattacacccaacttcttattctttattccaaactaaatattaactcaaaatttaagtacgtgtaacgttattatattttacttttttaccactgtaattaaaaaacaatgtatttgttgtatttcccaacataaagctaaataatgacaataaaaattagttaaaaagggtgaatacttagaatttatgtttgtttgaaattattaattatacattctatttttttaaatgataaaatagactttatattttctaaaat

SEQ ID NO: 308213 - DNA, 850 bp, Cannabis indica
cacacaatataatgaaattctcaaatatcaaaataacaaaattaaattcgagaaatttatcatagtaactcaagttagatgagatataatttataagagttgatataattttatagctggcacgtagttttcagaattatcaaagctaccgaaagtgtgggaaaatgatctgcaccacgggttcgggtctggggctaggccgaggccagcgtgacggcgtctgtggacgggccagtgtctggggccgagttgggtcggggctgggtttcgggccgagtccaaggtcgagaccgaggtctgggccagggtccaagtccgagttcgagtccaggttgggttcttggtccgggttcgagtccggggtctaggttcagggtccagaccaaggttcagggccgagtccagggctaggtcagggtcgggtctagggcaggtacaggtccaaggtccaaatttgtctcttgttcatataggatctcaatattaaagtatttttcaaaaaaataaataaattaaaataaaataaaatatttttcatactgtgacttatttaaaaattattttttgttctcatttctataaatactttttcaaaaataaaaaacaaaaaataatgtcctctaaccttttagaaaacaaatattaattcattttaagagtggttatttgtctcttcaagaatttttttcaattcactttccaataaaaaatgttaacgaaaacatgtcaaaagtttcatttttgtgtatatttcatagagtaatgatataagcacacacaaatcacactaactcaatacacatttacataacaagtaattgcttatgttttttttcaaccaaaaaaaaaa

SEQ ID NO: 308214 - DNA, 1416 bp, Cannabis indica
aaaaaaaaaaaaaaattgatgtaaaagtgttcctaattttattgaaatctaacaatgtttatctccaatagtgggataaattgatgtaaaattgatgtaaaaattgatggaaaaggttatctccaatagtgagatacattgatggaaaaggttatttccaatagtgagattttgctaaaataatgttggtcgcttgcccgatataataattgtaggcttctattttctaacaatgtttcccttaatttgcaagtgttttgtaaaataaagtttagtaataattttagtttttaattttttatttataaatgtgaaagtaaatttttattttttatttttaaaaataaaaatatattctataactaattttatattttagttttaataagaaaaaataaaaatatgtcatgtaaagtatatttttattttctgtttttgattaaatgatggataagaaaatgaggtgaaagaaagtaggtcagagtccaacatctcggtccgggctcttatttttgttatgagtttgagtttgaatttgtgttcaaatgtaggtctgaagtcgtggtcttggtccaaggatcgggtttgcggtcgaggaatagggttcgagctttgtgcctaggttcaaaccatttggcgggtccaagtttggggtccgagtttaggtctatggttcagggttcaggtgcaggtgtgggtccgtggtcagggctgggatcggagtttggggtcttggtaatggtccaagttctgggttcgagtctagggtcagggtttgggttcgcagtcagggtcgaggtctaggtctgactttgattttgggtccaaggtggcggttcgggtcctagtgcgaggtccagggtttgggtctaggtttgggtctggggtcggagtcggggtcctgtttgggtcggcatctagtgagggttgggttgcaagtctaggttttatttttgggtctggggacgaggtccgtgctcaagttcgggtcagtagtcgaggtcagggtcctaggtcaaggtctatgactggaccaaggtgtaagtcctaggcacgaccgacccaagatctttcggggccttgggcaaaaaaaatgaggccttttatttcagaagaaaagaaattcaaaacagaattaaaaaaaaaacataagaaaaaaagaaactaacaaacataaattgacttaagaaaaagtaaattctaaaattaatggacattaggaccacattgttaacctcaaaaagtgatcaactgacagcgggatcgtatggatttgatgcttgccacgtgttttcataaataagaatgaaaagaaattaactacatatgtgttatagaggttcggcccctttgtgatagcggataatgacctactccccttttagttgtattaataccaagggttaagactatcca

SEQ ID NO: 308215 - DNA, 1596 bp, Cannabis indica
tttttgaaagaattaacataaatgaaaatgctattggtaatatggtcgtaaatcctcgttgttcaaaatattttttaccagtaagccatttggccagactaacaattacaacctttattacatatgaaattttccaatttggattagacactctgtcataagatctcgtgtattagcaaatacttgccgcaatataccaaatctccaatattaaaaagtctttctctaattcttttattgaagtttcttgtgatcctctgttgatatgcaacattttgcattcgtggctcgtcgcgtctttcatcgagaaagtccatagaatcttcaagtaatttttagtttttatcctgatcgtaaaactctcgtctatggggcgagatattgaatttcataggaagcattgcttctaagccaaataccagcgagaaaggagtatgttccattacagtccttttagttgttcgatgagcccaaagtacttgtgtggtaattcatcaactcatcttcctttcaatgcgccgagcttcttattaatagcgccttttagggttttattgactgctttaactagtccattttcctgtggtcacgagacaggtgaattttttttatggttttattccgctcgcaaaatcaatgaacaaatcgctatcagactgagttttattatctggcactatctatatgggtatgtaaaactaacatataatatttttgatcacaatgtccaagactttatttgatgtaatcgaaactaaaggttcaacttcagtccatttggtgaataagtcaactgcaacaactgcatattttcacctcctcaccctgttggtaatgaccccgattatatctatctcccaaatttcaaatggatagggcaaggccatcatgtgaacttctattgaaggaattcttggtatttgtgagaatctttggaatttatcgtatttctttacaaactcatgtgtgtctttgttgatggttggccaataatagccttgtcagattatgttctttgacaaacattgccaaccagcaaggtcaccataaaaaccctcatggatttcctttataatgttctcagcttttgtttgtaatacacatcgtagtggaggcattgaatttactctttggtatagctttctttctacaatagtgtatcttggtatcgtctttgtttgatggaagttgaccatttaagagataattcatatgggcgtcatccaagttggacttgcatcaatcatttctacatctcgttcttccatctctaaaatgctttattcttttaacatttcaattggcaccaagttgaggtcatcatattcatactacgatgccaattttgccatagcatcagcattggaattttgttctcttggtacttgttcaattttgcaaagatcaaattttctcaagttttccaaactttttcaaagttttttttccatttcatctccctttgcttaatgttcaccatgcacttgatttagaatcaattatgaatcactaaaacaatgtatggttttatcatttacagcattagctatccttaaagctactagaagtagtgtttcattgttggaaattatttta

SEQ ID NO: 308216 - DNA, 885 bp, Cannabis indica
tgacagtaataaaaaaaaaaaaaaaaaaaaggaggacagtataaatgttaattctgccgtgtgacagtaaaattgaaaagtattaccccaaatccagtatttttgtaaaatgcccaaattatatttatttctaattaacttaattctttcttatcacctccttattatctagtccattaattaattttcaattttttttggcccaaaggaagccttgatcatttctgcatttttcttttctctctggccaaaccacttcaaactttttcccaatcacccaaaattccctgcagcataacataataatatatttctttatatgtacaaacaacttatgtacatgcattatatatatatttgtgtgtcctacattacccaagagatccccctttcagcatatcatgttttcaggttgtcttattcgaagacctatgtatagtgtatttatatgtatatatttatataatatatatagatatgggatcaatatctatagttccctctctaaatataccctatatatatacgcccgcaggcattataatgcttggtcttttttttttctaagacagccaagctgaatttgagggttatatgggaatatcataattcatatgtatatgatatataatctagttattatatatatagagatacagaataatgcacattcatgcattggaatattttaatcaggtagtgggaatacactagttttgtttattacttgttttttcttttgcttgtttcggaatctttgtagtataaatataaagtctttgaatattgttttccaaaaggaaaaaaaaagtctttgaatatacatatatatatttatagaaagtaaggtgtatatggtaagatatattaagttttttttttttt

SEQ ID NO: 308217 - DNA, 1360 bp, Cannabis indica
aaggtttgggatcagttgtgtctccctaaatctagagggggacttggttttcgaaggacactggaaatgaatcagcccttcatggctaaatggggttgggctctcactaccgaggaccagtcactgtgttgtaaggtttcagtgctaagtaccttaaggtagacctttcttgaagtgttcgtccaaaaatttagacgcatggttctgcaagaatgctgtgaagtctaaagaaatccttatgaaaagagcatgtaaactcatatcagatggaaaggatacagacatttgggatgatccctagttaattcacggttaggactttaatccccatccaataagaaggcgactgagggattggagaaagttacagatttattaacagtcaatggcgattgggatatttccaatttgaccgagagacaggaagttgcattctcaaaggtggtaggcttgggggtcaaggtagtgataagtggatttggactaaagaacctaatggtcgcttttctactaacctatctttatcaggccttggcgcgtgctcctatttgcaatattgctcccgccctatggaataaactttggaatgctagtatattggagtgtcacaaagtcctttggtggagtattctttcaaatgcattacatattcgggctgcacttgctaaaaggatgattattgaagatgcgtcttgtcctatttgtggtcagggagagaaaacaatggaacacctgttcctctattgtaactttgctttccacctcttgagatcctccccctggggtgtgatgccagtgatagactctggggcccgtatgtgggattgggtcaatttcttgtggagcctaaaggaaaagggagagaacgttcaagaattgttcctgtatgcttcgattgtcgtggacaccatatggaaaacccgaaatgataaggttcataataatactttatgtaacattaaacaatggattgactctatttctatatgtttcacagactacagttcctgtttgtttccttcgtcggtgatggttgcgactcctacctggtccccacccctagacgattgggttaagatcaattgtgacgttagagttagtaatgactcaacgtgtgtggtggctctggctagagaccacaaggagtcgattttgtgggtggctagcaataacctccctttctctgatccactcattagagaagcggcgacctgcttgttagccctggaatcagcgatcaattagaaagcattcatttgtgatagtggagagtgattctgaaacagtaatcaacacgttgaaggggaatagttccgtttggggcattggtaactgttgctccaaaattcgcccaaaatac

SEQ ID NO: 308218 - DNA, 1729 bp, Cannabis indica
aaaaaattaaaataagaaattatatgacattttattagaaagaaaataaaaaaaattatacattatttgaaaataaaactaaaataaatattgaaattaacacaaaacaatgtgagaagaaaattttaaaaaaatattaaagaaaaaatttcaaaaattattttaagcttaatatttttaaatactgggttgtacttattattttgtaggtgcaattaaaactctcctttccccaaatatatataaatttggtgtcaacaaaaaaagaaatttttaatctcttcgtaaagaaaatgtttattataatttagggtgcttctataatactctctaaaaaaagagtttatcgatgaattctctactattttggcattaaaaattttttttagtcaaatttctttatcatgatcttgtacgatgtaattatttacaatatcttgtaaaattttgagaaattaagaataatttacaatgtagaaagcagtgttcaaaaagtttatttcacatacttataaaaaaaacagtttatttcacatgagtataaaataaaaagttacttgtataacagactgctaaatccctattttaatcgtgttattcttttattttttaaaattttatagaatgtcttaaataactacaatgcaaacgatcatgaaaataattagagtaaaaaataaggagagggtgcatcgtggcacccttttaccgaacatacaccataaaattgttctaatttaaaatattttgagtaggttacggtggaatgaaaatattgatagtgtgtaaaaaaataggagtaaaaataagaattaaataggataaaatttaatattaggaatggcaatggtgcggatcggggatggtttttaaattagtattctcatttttgtcggctaattatagggtaaatactattttggaccttgtattttataaaagttaccgattggacccttcgttttgttaaatgataaaattgaccttgtattttctaaaatgatacagataggaccctgaactgattttttgtcaaaatataacttaataataatccgatcaagagatgttatgaaaaaacttgtcacattttctgtatctgttcgtgttagaaattatcttcaagttggttatattaaaaaattatcaaaaattgagctcagagtcctatttttactattttggaaaatatagggtctattttgtcatttaacataatagagggtctaatcaataatttttacaaaacatagggtccaaaatggtattttttttaccaaaatacgtggcaagaaaataagatgccacatggtcacaatgcccacatatgcacgtggatgataactattagcactagaggttctttgtactccccccaagacaagaaatgcgtcaaagagaacatcgtcgaatgaagaaggataattgaagagaatgtgactctggcctccggatgatgcaaacctaccgaatcatatatcatttgggagctgcctaagtgatcaacatgagtcgcaacacaaaacacaataggtgactaattcagtgtattaacctcaaaaagtagccaaccaatagtagagtcgtatgaatatgatgtctgccacgttttgcacaataagaacaataaagtaaataagacaagaatttttatagaggttcgacgcccttagttagcgggtaatgacctactccccttttagttatattgatacctagagataatact

SEQ ID NO: 308219 - DNA, 1341 bp, Cannabis indica
tatcaactttagcataaggagtagtaaaaaatttgtaaagtttgctaacctaaaatctttccccttttccagcatccagaattgtgttgagtgaaaacactcctaagattaagaagtttgtgccagtaccaactcacatcacctttcttatcaactacccaaaaattttagttttttaaatagatagcattgatccatttaacctgcagaatatcttgttttaatgaaatagcccaaatgtatttagaaattgaacctttgttccacttggttccattctggaaacccaaacctccattatttttaagtttgcagacaagatcccaagaagcttaatgcatcttactagaattacctttcacaccctacaaaaagtctctacagagtttatcaacatccttgactactttcttcggatgcataaagatactcattttataataacaaatgcccaataataccgattgaaccaattacactctaccttcaaacgagagatgcttgtgttgcccagtggtgaagtttcaattgaatcttcttaagaatatgattataatccactactttccattttattggcctcattgtcaaaccaagatacttgagagggaattaacccttatcataaggaaccaaataccggatagctagtttacttgcttcatcaagccttccaaagtaaatatgatacttgtttgggttcgcatggatgcccgaacagctattaaaaatagtaaaagcttcttagattacctaaatttacttaaccgtccctttacaaaacaggataaaatcatgaacaaagcaaagaatgactatctttaaggattttcacataggatgataccaaaaattcgaaccacgagtagcaaagagtgataaccgattaagatattccattactagcataaaaagtaaaagagagatgtgatctccttgccttaaccccttttttccctcaaatctccctttcacaaggccattaagaactaaggagtaggtagaaccccttaagcttgtcatgattcaattgataaatctagtggggaaaaggtaactcttcaaaagttcttctaaaaaatcacggtctatagtataataaggcttcctcaaattaatcttcaagaaaaatctaggagaaattccattcctcttatacccacaaagcaggtcttgaagaatgagcatgttgatctcaaatttggccaaccaacagcagagtcgaatttactgttgatgcttgccacgtgttacacaattagaatagaaaagtaaatagacataggattttatagaggttcatccccttagttagcgggtaacgtgttggaaattatttta

SEQ ID NO: 308220 - DNA, 1170 bp, Cannabis indica
tttactcaaattgcaagcagatcctaaaaaaacaaaagaaaaaggtccccaaaacaaaacaaacaagaaaacgttaagggaaatcaaaactaaaacaaggcagaaattaaagaaaatttcgaccccttcttctcttatgcacctctgaccaggctgaggacctcagtctcagtgggaagagctgggattgctcccttcttggtggtggtaatggctccacatgcattagcaaatgtaagaacctccttcaaccttgcctcatcctgtaattaattcagcaataatattaagtatatatatgtgtatatgctcaattaaaatgagaaatagatagtatgattaagtatatacctcaatgatggattggtcatcaacaatcttggtgagtaaagcaccaacaaatgaatcaccagcaccagttgtgtccactgctttaacatggaaagcatccacagatccatggaaattctgtaacaagaaaagttaaaacattttttttttgggtaataatattcacgtgagtgcttgattaatcatgtgacttgttcattaagtaaatattccacaaaccaaataactacaccccctaaaaaattagcattaatcataatcagatctcataccaaaaaaagaaaagcattaattaatcatagatacatctaccatgttgtaaagataaaaccaaagccttacttctatgattaatttctgttgttacatcttttaggtaaaccattggcgactaatttggtagtaccaaaaagaccatttcttaagtaacactcgaatgtaaatagttcaactaaacccctcaagttgcgaaaacataatcaacccttgacagctatttcatattaattaaataaacgtttgcacttgtaatttcagctagcctaaaaccatgcaatttaatcccaccaaaaaaaagtaaaaataaaaaatagaaaacgggccctactacttcctcaccagcccaacttcatttgtcggcaagtgctactggacagcgcagaattgtcagcattattcactcattcttaaaaaaaaccccccaccaacccaatttcaatacagcagctaaacgtcaaaaacacatgcataaataaacttatattcctaaataaaaaagaataataacaataaataaataaaaagagattgttcatagat

SEQ ID NO: 308221 - DNA, 2642 bp, Cannabis indica
gaagttccaggcccaatattacaacgcacccccgataagacaacaaattgtaatttttgtgactaatacttttatccacggaccttttagtcacaacataagaatcataatttataattagtcacaattttttcacttttagtcacaagttttgttgtgactaaaagtaaaattttttgttgtgaacataattggacagaaatctttgaatctatccaacaatttaaatagttcaaagaaattttttaacgacctacaaaattcaagagacgtaaaatttaatacaagttaaagttctttaggaaaaattttaattatccaaatatattaccatgtccttatgtctctattcctatatatgttaattttctcctgagtgtcagctaatttttcttccaatttggaaacatgtgaattgacttgattataaggctctttgtatttttcagcgtgctctttctccatttcgacagaagtcttgtaattggaaacttcatcgttaaaataatcttcaattccttgtttgactatagccttagtttgagatttagtatcattcaaagctttgatagcctcttccttttgttgctcagaactatcacgttcactcttcaaggtctcaatttcgtaagccaatttgttaaccagggaagaacacctgtaatacgctaacattaagaaaatagattagcaaatcctaactagttaatgtgtattagtatggaattatattaatatataatctattatatgtgaattagtctgatttataatatgttaagactccgttggtgagctaggggtatttttgtaattttgacccgagaagggtaaaactgtggatttaatttaattgtgtgcttatgggactatattattatatagtatacttgtcttgtcctttttcaagtgttttctgacaggtcggcgcgatatagtcacaattgggaattttgggctgaaccgagttcggggccaaaattcattttcgggattatttattggcattttattaatatgtgattaatttgaaaattatttgaatatgtgatatgtgatatgtgatggaaatgacctatttggccttaaatgaatatgtgtgttatatggttctaggggtatattagtcatttttggcatttgaattatttgcaacaaaagagattttcggctgaatattgaggtgttatttattgctttatttcttaccccaaaaccgacccctctctctctctttctctctaaactcatctttccaagttttgaatttgttgagaaattgcttgggttcaagcttgatttgtgggaatctttggagcttgagtgatttgagatcttgaggtagttctatctctttttgtctttaaattgttgctacaaatggaagttgagaattatgtctttgagctttgaatattcttgaatgcatgagaagttaaatggtgttagatgatggtgatattgtttcttaaacttgcccatatggggattttgcatctttccttgttggtgattatttagggttgtttttagagtttaaaaatctgatccttggctctagtttttagttgttggatgttagtgtaacatgttgtaatatccaagttcttgagtttgtgatttgggtgagtctcaagtgtgaagcttatttttgagtagtgatttaatctgaagttttatgcattaagctgtgatttttgagctttaaatatatttttttgccctctgttatgttgggtatttgtgtggagataaatgtggtgtttgagcatattttggcttagtttgggtgtgtttgagcaggaattttcgaggctgaaaattgggatttttgggtttaaaacccaggggtcgcggcccgcctctattaaaatcatgggttttgaacccaggtgttgcggccccatgtggggagtgtcgcggcccgccctacgtttttgggcagattcgaacgcgttattcgaatccttgtaactttgtgatccagactctgttttaggagttctatatatcgttggaaagctcgttctgagctctatgtgattatctagtattttgaatgctagttttatattatgtgaaagtggatttagggattaaccctatacttgtgaatctcgaaaattgtgattaggattaccggtacttggtcaggagcacccaaagatttgaaatctccacgtttgcaggacatcaagtaagacagtagttagcacgtagagttatgcgcggtgacacttatattgaaaatgatacatgtgagtaattaggaaccggaattagggttattaccctaacatgagcggtttaatggcatagggttattaccctaatgattattaatgtgtaaatgctatgtcatgttatatatgtattgagaataaggattatacgttaaaggtataattgggttggactcggtaactagaaccgagatgaaccgttctaaggccttattgtatttagacgtgcgagcgtaacacgtaggtttatgccacatagacataaataggcgtgtgagcgtaacacgcgggtctgtgtcatacagacaaatgtgaaatggcattaatgtttatgtgatgtgttgattatgactattgatattttatattgtcttgctgggcttggctcacgggtgctct

SEQ ID NO: 308222 - DNA, 5746 bp, Cannabis indica
aagttaatagttattttaattatatttaaaaatgttttgagtaaaattaaattttgaggtctttattaaatacttatacaaaataaagacatctaaaaattgatttatcaaactacactgcatgtctaaataaatagttcacaaaacacataattatatgaactaatatatttatgattaataattttttttttaattttatgaaagttgtaactaatgataaatgtataattaattttcagcaatatcagctgatggcaaaattatcggagacagggtacgtaatatattatacaattgaagtaaataaattatatttatgcatcccattaaaaaattatataaatgtatattttttttatatgtgagaattgttggattaggctaaaaatcaaattgtcttgaagttgtaaatatatggttcaactttcaagagattttgagacttgttatttgccacatttgtcaatgatgttatgcaataactattgacttatactctctcatttattacatatggtttgaactaacctctcattgattatatatggttagaagatgaactacctctcattatcacatatggttgggagttgagatttttctttgataaatatgaagctattagaagagcattgataatttagtacataacaattcagtgtgtacgaattcggggtgaaaaattttgtgtacaaatcgatactatcaggttttgtgggtaatctgagagagatagagcatctatatatccaaactttaggaaataatatggtgagtttgagaaatactttgggaaacacttgagagatattattaataggaaatctgtatttgtattctgtacatttcctttttagattaataatattagctccctcccgtagagtaggcaaatttctaaaccatgtaattctatgtgttttattgtttaccgctttgatatatatgtatcataatctttttctatttattgcttctgcacacaataaattagtgtcagagccaaatatagcgatattatatatcaaatcgagctcttaatgagaggaatccaacactgcaagaatcgcctcaatcggaggtccgacgcatcgctagtagccgttagagtgttggtgctagcaactgagttaactcagtcaaaaattattttttggacggaaccaacctatttttgtacctattttcaactgagtaggacctcttcctaactaataggaccattttgaattcaactacgacattcatttttcaaaataaggtattgaaatttcaaaaaatattatttttaagtcataagttcaaaagttttgttatctgtttgcacttatggctgatgatagagaaactgaaaaaagaaacaaaagttgacgtaaaaagttctaaagagtcaacaggttctatgaggagaaccatgttatcaaattcaaagtttgaggtggagaaattggacagttttaataactttggcctgtggcaatatgaagtattagatctattgtttcgagaagaatataataattccttggagtgcagccaaaagattattctgattaagattggaattttttcaatcctcaagattatggcacaatccgattgtgtctgggaaaggtcaaaagtacttttcatgaaagaaagcgtatatgcagttctttaaaaaaagctagaggacaagtacatgacaaaaatatagagaatcgactcaatctgaagaagaaacatttccatttttagttcaagaaaggtacccctttgattgaacatttagataattttaacaaaatttttggagatttgcaaaatttagatgttgaaattagtgatgaagataaagctttgttgttgctaaattcattacctgaaagctatgaacatttaaccacaactttgttatatgataaaaatgaggttaagtttatagatgtttctaatgctttggtaaacaatgagtaccagaaaaaggaacaacatgatcacagagactcaacgccagaagcattggttgtaaccagaggcaaatcgaacaacaagaaatcaagttgattgaataataggggcaatccagatcaaagtctagagaagagtcatcaagaagaagtattgcaaaggatgagtgtgcctattgtcattagaaagggcactagaagaaagattatccaaacaaggacaagtcaaatgaaaatgttgcacagaaggctgacatcgaagaagatttagcctttttagtttcttcaagtgtgtatacacacagatgaattattgattccgaatgttcttatcatatgtgtccaaacatacatttgttcttgatttttgaagaacttgatggaggagttgtcctaatgaaaaattacaatgtctgtcaaacaaaagggattggaacaatacgatagaagatgcacaatggtacaattagaagacttataaatgagaggtacattcctaatttaaagaaaaatcttatttctataagtgttctgattctaatggttacatgataagattagaagatggaaacttgaaagttataagaggtacatttgtagagatgaaaggtacttggaaggcaaatttacatttcctagataggggtactgttataggtagagcatctttctctaacagttctaaagaaaagacatatgattcttcccgcctttgtcacatgcgcttatggcatgctagggagaaggctttgcaaggcttagtgaagaaaggtttactgaaaggtgccaagaccgaaaagtttgatttctgcgagtattgtgtgctgggaaagcaaacaagggtcaagttcggcattgttattcattgcaccaagagaactctggattatatctacacagacgtttaaggaccttccaagaacgcttcacttggaggtaaaaaatggtttgtgacatttactgataatttctctagatatgtttgggtatacaccatgcgacacaaagatgaagttctgaatgtctttcataaatggaagaaaattattgagacttaaacaagcaggaagatcaagaggcttagttctaacaatggtgctgaataaaaagcagatactttcttacaagtgtgtcaagaagaatggataatcatacattttttagtacgctctacgccaaaggaaaagcatttttgcagaggctttgtcatatgcaacccatatcgtcaatagactccctacgactgcattagatggaaaaatacttaaagaggtatggtctagaaaacctatttttgattatgattccttatgaatatttggatgtcctgcatatttccatgtcaaagaatccaaactggatcctagagcaaagaaagctattctcttgggttttaatgaaggattcaaaggttttcaacttttatgtggtgaatcaaagaagattatcttaagccaagatgtcacatttgacgagtctgttatactaagatagactaccttacagaaagagaattaagtgccaaatactatttctaaggtggagcttgtgatactgaaagattcaaaaaagactattccaattgaagatcatggtgaagatgaaattgatgaccaagaagagatcttagttgaggtggaggttccattagcatcaccattagtcaatcaacaatcaaaatctattgccactactcaacgaagaagggagattaaaaggcctgctagatacacaaacatggtagcatttgtacttcaagtaattgatgatgacatcccatgcacttagagagaagttgtgtagagtgttgatggcaagaaatgaaagttggcaatggatgaagagaagaaatctctacaccagaatcagatatgggtgttggttcgacctcctaaaggaaagaaggttattggctacaaatgggtttgtgccaagaaggaaaaagttctggtataagacaacatctgatacaaagcgagacttgtagcaaaaggttatgcccaaaagtaaggaactcagattacaatgaggtattctcaccagtcatcaagcatttgtctattcaaattttgttggctttggtagctcaatttgatcttgagttagctcaacttgatgtcaaaatagcttttctccatggtactttaaatgaagatatttacatggctcaagtacatgatgacaaagttccaggatgtgagaattaggtttgcaacctaaacaagtcactgtatggtttgagcagtcaccgtgatagtggtacaagcattttgacaacttcatcaaagagtagaagaagtaaactcacatccaatttaatcattgtgtatacttccagaaactccatgatggtactttcatttattttctttaatatgtttatgatatgttaattgcatctaaaagcaaggtggagattgtcaggctaaagactcagcgaagtaatttgaaatgaaagatcttggagaagccaagaagattcttgagatggagatcagaagaaacatagttgcaagcacattctgtctaacagaggctcagtatttgaagaaagtactgtaaaggtttgacatagatgaaaagactaaaactgttagtacaccaattgcaccttattttaagtttagtgcaaagatgtcacctagcaccacagatgagaaaaagaaaatggagcatattctatatgcaaatactattggtgttcttatgtatgcaatggtatgctccaaacctgatatttcacatgctattagtatggtaagtcactacatgcacaatcctcgtaaaggtcactgggaagcagtaaagtggattttacagtatatttatggtactatggatattggtttgatttttgagagagaaaatattgatgataaacatctagtcaaatatgttgattatgaatacgttggagatctagataagcatcgatcaactactggttatgtgttcataatggaaggaggaccagtctattaatgattgacattatagttcattgtagcattgtctactacagaggtagaatatatggttgtacagaagcattcaaagaagctatctagcttctcaggttgaccaaacctttgggtattatttagaagaatatggaggttttttgcgtcagtcagagtgccattttttggcaaagaaccaagttaatcatggtcgcactaagcacatcgatgctcatttttcactttgttcgtgaaatcatcgatgatgggaatgttatacttaaataagtcaggactacaaataaccctgcagatatacttacaaaagtggttacagggatcaagtttcaaaactgcttgaacttgatcaacatctctcggacttagagcacctaaggcgtaagtggaggcaatgtttttggattttggttttcttgccaagctggagattgttggatttggctcaaaagtaaaattttcttgaggttgcaaatatatagttcaactttcaagagatttgggacttgttatttgccacatttatcagtgatactatgcaatatctattgatttatgctttcatttattacatatagttggaactacctcattgattacatatgattgggagatgagctacctctcattattacatatagttgggagttaaggttttccttctataaatatggagctcttagaagagcattggtaattcattacatatcattcattgtgtacaaatctggggtgaacaattcgctctacaaattagtacaattacgttcaggggtaatctgagagagagagagagagagagaggagagagagaga

SEQ ID NO: 308223 - DNA, 2157 bp, Cannabis indica
ttatttattcccttaatatacatattaattttataaaataaccattaaatatataattataattgaatttttggaatattacacaactataatgcaatggtaataccctgatgatcatatgggtattttgggtaggatattagccacacattaatgggtttgtgggtgaaattgccatttacttattaatttgttgtttttgactaatgcagctttatgatcaccctcaatggcttacaatcaaaggacatgtacagtgttacgtcaataaagtaagtgacttttattttaagaaaataaatatgaaatttgattgtaattgattttttatctttttaaaaaataaataaataaataggtaagagagaagctagagagtaaaggttatcacattaaaacctactccgaggtacaaatgatttcaactatcgatgagggttagtactcaattactttttactatattatttgttataatataatatagattaaaaacattaataagtgtttaataattaaatatataatgtaatttaataatacacgtggtttataatataagagtagttataaaattgaaaaatgatattgtaacaaatgattacatttaattatatgtaagtaagtaaattattatagagaggttatcatgaaattaatgaaataaatttttaactgttaggaacgactataatactcatttatataatttaaataggtgttaagacgttagagaaaaatttagctcgaggaggagttacaaaactcaatattagattttttagagacagttactttatggttgatgacatgttattttacggttgttttcctttgtctggagcaaattttgaaataacgtcaataaacgtacatgaattcattcatgagcatgttttcaactttcttgtccaatatttttatcccaataaactccaattaaaatgatggtaacaacaatgtggtaaactgattttgattttctaatgtggtcttaaaacattataaatagaggtctacaatgctcatatgagatgatgaagtttccatcaagaaagtactttgctagaaaccctaaatgcatgattattaccaaagttatttcctagggagttcccttaatacttagagataggaaaattaacaagtttttggacaaagatgataatatcttgttcaagtcatggtgacccccattaatatacactcaaaattgtaagcaagtgtttctatgcatattcttcttcttctttatatatatgtatatgtgtgtgttataatacaagtgatgtaatctctcttcttctacttttcttttatatatatatacataatatagtgtatatgttgttataatatctcactacaaaaaataattacttttagtgacaattttctagtcacaacataaattttttatgactaaatgtaacttttagtcacaacaaaaagttacatgtgtctaaaatatattatttagatacaagtaattgtcactaatttagctttagtcacaacaagtattatgactaaaaacatatttagtcacaacaaaatgtaatttttgtgaataatatacatttaggcacagattttttagtcacaatatatataagaataatgatttgtaattagtcacaatttttaacttttagtcaaaatttttgacgtgactaaaagtaagattttttgtagagtctatttaatttatcttttagtcattgtattatattgcaatagaattgtaatattatgatttgtaataaaattgtaataggttgtgtagttcagactgaagatggttctaaagaattgtataatgggtgcatattggctgtccatgcttctgaagctctgagattacttggagaccaagctactcctgttgaacaaagagttcttggtgcaatccaatatgtttatataggttttctcctcctatattaatctaaatcatctcaaaccatgcatatatatatatattattttaatttaatcaaacatgtaactttaattcttttggcagtgacatttaccttcatcgtgacaaaactttaatgcccaaaaacccagctgcatggagtgcattgaacttcctagcaagtagtgacaataaagtatgtttgacatactggctcaatgtgattcaggtgatca

SEQ ID NO: 308224 - DNA, 1259 bp, Cannabis indica
ttcttttgatgttagtcaactcccataggtttgaccttgcacttacatgaacattatattcctaaatgattcgtgcacttgcgagtataaatattaaaatacccacttttcgatacaacatccgtgtagtaaccacaaatgctcaataagatcattgcgaagtgaataatgttgcttggaagatcgagtttcgtagtgatgagcaataaactcatgcaaattaagtgtcttttcatgtgacactgcaattgtaggtaacatgtctaatgaatcatacccattatctagcgattcactaatctcattttcaataatcatattgtgtaatataatgcatgttttcataattgactcaagatctctatgctccaaaatctttctggtccttgaacaatagcaaactgtgcttggagtactccaaatgctctttctacatcttttctacaagattcttgcatggttgcaaataatttattgtttaaaccttgaggttgagaaattgtttggactagtgctgcccattttgggtagatgtcgtctgccaaataatatctcatattatgactgtgaccatttattgtatagttggcaagctcttccttccactagttcagaaaatagatgtgatcgatcaagaacattaatatcattgtgtgacccgggaattccaaagaagacatgccatatccataaatcatatgaagctactgccttcagaataattgttggcttttgaacatgaccagtgtatttgtccatgccaaccacttggacaatttttccattgccaatacatacaatccaaacttcctaataacattcctagaaatctacgtttcccccattttcaataatcttgaaacatcttcctttgttggtgatcttaaatattcttctccaaaagtaaagataattgctttgcaaatttttttcaaagattcaatggcagtgatttctccaattcgtacatactcatcaaaacaatcagtagaaattgttgaaaatattttaacgaggatctagatttactaccatgtatgtttcgttaacatcctaatatgaattctaaaacaatgaaataaacacatataaagtttagaaaatcttacattgggtgcaccggaatataatgactccttccattcagatttctagcccttgattcctttctatagcagagcatcacaaatatctgaacctggatctctttctctcctttcttgatgctgattctccttcttgttgattggattctacac

SEQ ID NO: 308225 - DNA, 1181 bp, Cannabis indica
aagtgtgggccctaggcacgggcctagcccgcctatgcctagggccggccctggctgcacccaatgtaaggtttctcatactttatatgtgtttaatttataatcgttttagaagttcatatttagggtgttagatctaagatcctggtaaaataatatctaacaatgatttggtacatgttaaagttcgaggggtaaactaattagccttttttttttaatgaaaataaaaggatagaaccatcatagtatagttgaaacaaagtatttgtgtgtcataagtagaaacataaagagaaaccatttttttttctcttaatctaattaatttctaacatgctactttttgtaccaaccacaaggttgttgaaccttcttttctttgaaaaaaaaaaccacaagggaagcactgtctatgataatttagccaatcccatcctattaatctaattctactctagtagtagagaaattgatgtatcctagagtagtttctcttaaacttttctcacaaaattctctttcttaacctctcatgaagatcaactaaacattctaaactatcatcaatcttcataaaggtgttagctactgactcactgacatggttttaagtgctgggattaatcttcttagagagatattatattttaggcttttatatcacagcaaatataatgaaaccgtttactttccctctttgtttttttccctcataaggaagttacacctccgaaaccttccaaaaagattgcttgacttcatggagcaaaatccacaacacgtagagaaatgaaaatttattattatttttatatctttattttaattagtttaataagcatatataggaagcaaacttcaagtaccccaccagtcagtctcagaaataataaaataatgaagccaaaattagttggcaattcatttatgtgctcccacagggcttgtatttacaatttgaacttcattaaccacacacatggaaccttattacatcttaatcttttcccaatgtttgaacaagtagttgcttgtacttagattctaaccattgtgtctaaaactttttcttacccctgtgatggtttaaacatattagtacagagtctatcctttgaccaagatattcacagcattatccaggtgggaaaaaggatatttagagagagagagagaga

SEQ ID NO: 308226 - DNA, 2534 bp, Cannabis indica
ttttttttttgttttgttttggaataacaggtatttctgcagggaaactcacaagtaaaatttactcccagatctattgcaaggataatgcatggcattgcaagtccagcttatccatctacaatgtggtcaaaaactcacttctggtaccttaaacaaagctatattactcattttgaatactaacccctgaagttgatctgatatgaaaggcagcataccactcattactgttggtttagaaagtaggattagattggataaaatcaaattatgaaatataaggaacaaagaaaataaaagaatgattgaattgatcaaagttgggttcaaagttatgatttttgttctttccgaaatacttgaatgtgggagtgtggataggataaaattatctcaagttttccaaggggattaattcttatcctctccaattttataacaaactcacatgattcccattcccttaaaattatccaattctattcaattcaatcatactttccaaacatcgagttttcggtactaataatttctgcattgcaggggaaggtatacacaaacagattttcatgttgtaatggaagcagcaaaagcagaactaattaacttgtcagcaaagactcaacctacatcttaacaatcaatcccacagtttcataaaggtgatgataatgttaaaaaatcccatctgctgatttatttcaacaagttagcaaaatatttatatgatgccacagttcatttgaagcttagaaacatgagatttgacatattttggtcagcagcatataaaaacagtacaaattacaagttatggggggtaagctcagctatctgtgactttgattgtgaactactttctttgttttcttatctcttctgaatatttgtattattaggcaaactccattattgcaaaactattcttacaaaaccagtcaaatatctgtattggaatgtcttgttatttatggattatagtattgaaaatgacactttcttattttctcaagctttttctttgcagtttcctgatgtagtagcacccaaatgaagactaaccaaacctgttacaacacagagaaaatggcttcaaatgtacaagaaataattcataataataacaaaaggaattattacattattatctttttttccttctgttaagtgtgtaaattttgttatcattttgcatatcatatattcagtccataccaatttattgtcgttttatggatagatttttatttagatagtgccaaagccaatgacttgagcaagtttattcatatttttatacagacacattgggaattattatttaaagaaacaattataccgtttatagtttatatatgaaaatataatttaaaataaaaataggtttataaaataatttatataaagacaaaattatatttgttgtatttattgaaaaacacattaatgcacaaaaaatgacaaggtatagtttttatttttattattttggtcttaacttttaagttttgtaaatcaatattataacttagtaataatattggtgcattttgagcatatttatggcctttttttttttttaatatgtatacattgattaaaatattgaagaatagactatcattaacatttaaaataacaaaggttattaaaaaaaatccaaagttaaagttggcaacttggtagtacacttttatgttaagtagtggcaaaaactcacatgatgaatgcaagtgttgtgacttgtttctttatctacttgaccaattgtctcttctttgagccttaagtttgatgatctatttaaccactattcccatatttctctcacatttttacccttatcctaataataaaatattagaaaaaatgtatatttcaaaataaatatatggcattgctttaggcattagaacacttacatcaattctcacaattataatttataaattagttaaagttttgatttttttttttttgttaaagcatggcagtaacactagatgcttaaaaaagaacaatgatgatgatatgtactttttaagtaatgatgtaatgtagcaagtaatccacacgcaaaagtgcttcactctttccttaaataaaaaaaataataaataaaaaaataatctaaaaatggtaaaaaaaaaaaaaatcaaaatgtaaatagtcaagtcaaacatattattcaataaaagttaattaaaatttttatccctttaattttgacatagctaaatcataaaattttttaaccgttaaaaattcttttttaaactattgagattattaattttttgtccaatttcattcaattttattaattttatgattgtctatatattaaattatgctctccaaataacaaatcacctattcaaattttatatgtactaaattatgcattctgaactttcctctatattaaaccttttttattaaaattggaaaaaaaaaatccttaaattcaataatctcaataattaaggtggcgtttggtaatacctgtttaatcagttttctgtttttaa

SEQ ID NO: 308227 - DNA, 3135 bp, Cannabis indica
agacataaaataactataatttattttattttgttgctagttatgtgaaaaaaaatatttttcttataaatattaaaaagtaaccaatccaatccgcacttttgcagattggattggatttgagttatagtacggattggagtgaatgaaatccgcacttagtgcggatcgaatgcactatgaacaaaatagtacggattggattgaacgaacaccaatagttgaatttgtgttttattaccatgagaattaagttttaaattatgtcttttttttatatatatattttgatgaaatttaacctaatgattgctaaaagatattgaatattttcaattcaattcaatagaaatcaattaatgcattcaatggtatcagttaatgcattcaatgattggaaccaatccaatctaatgcatctattaaataaaatcgacttccaataaataattggatcaaatgagaaatacgacttccaataaataatttgattatataaattgggtacaaaaatattagatatagtccaataaacaccacaatgttcattagaccacatctaaaatttttaagtatatacatatcaaatccaatcagagttatctaataatttctatccattgaattcatttcatatacatctattagtttaattttaatttactcaatattttaaacctaatattttttagatcagatctatccaaatattttaaattcaattagatccacccaatctaaaaaaaaagtaaaattttgatattaatttttatttatacataatttctttttttttttacttataacataaaattaaattactcatccaatctaaatattaaatttttagacacctcatccaacattctatccaattgaatatttgaaaataacatcaaatccaatctaaccacaattgaacatctaaattttaaatttcaattgtcattaaattggatcaatttatgcacactctaagatgcagtaggtaattaataatgatttgaaaaaagctagtaaccaaaaagcattacacaaaatggttaaaataaacaaaaaatctattcaaataaatgattaatgcaaccgcatatcaaatcctcaaaagaaaaataaaaaaaaatgaaaacaagcagtcaattagaagatatgagaagtgaagggcaatctagacaagcaggattatgcataagtcactaaaacacaagttccttagtatgatacgataagctaaacaagtaaaatttgttgagtaaaaattcgcagcaaaaacattgaatatctgaagaagaaacaaactcaacgcttctttgagacaccgacagtctttccccttcggccagtagtcttggtgtgctgtccacgaacacgaagaccccagtagtgtcgcagaccgcggtgatttctgaacatcaaccaaaacaagtcagccataataaaatctgcacatcaatgttttctatgatttgttttttccttctatcttgtacttatcgggtaaaaccagtagccagtttttgtatacagtagaaatttacaccaaacttgtgataagttcttaaatgaaaactgattagcacctcaaattttagaaagtatataatgcagcacaagattgcacccattgcccttatgcaataagcttttctatgaaaacagactaagatctgataaatttcagtgatagttaagaagctcaaatctcacatatggaagcagctaagcagtaaacaggatataaagcgactaaaaagcttatcaattctccaccaagccaagaattcagtcttatacgattcaaagctcaaatatgcataatttgggaagaaaattagtgtggttacatacctgatcttcttcaaccgctcaaggtcatccctaagcttcatatccaaagcattggagacgacttgggaatattttccatccttgtaatccttctttctgttgaggaaccagtcagggatcttgaactggcgaggattggcaacaattaccatcaagttatcgagctcttgggcagaaagttcaccagctctgcagtaagacaattcatatctaaattttccaaaccaaatctcctccccaactcataacaaccaataattccacaaattaataacaaagataattcaatctacatcaatcaatttgtttattcaaacacccaattaagtaacaatgcactctcacaataccgaattgaattttctaatactaatgatcgaaaactaagcattccctccattttgcaaactatactattcaagtcactacacagaatcaacatcaatgaaacaatagacaactgggttcgtagaaattttggcaaaaacgaaaaacccaacactagttaagcattccctgcatttagcaaattattcaaatccctcccagaatcaaaatcaatgaaatgcactgaaataatacacagttagattcgtagaattgtaagaaaaacgaaaaacccaaacatttgaattaagaaagtaaacctcttgttcatgtcgacatcggccttcttgcatacgaggttagcgaaacggcgaccgatacctttgattgaggtaagggcaaacatgatcttttgcttcccatcaacgttggtgttcagcacacgcaaaatgtgctgaaactcctcgttagctaccagagactgcaaaaccaagaaaacccagttatcactgcccgataccaaaccaaagatacagtaaacgaaaacaagtggatcatagcgagttgactcaccatgatgaatactttgttctgctctctctctctctctctgtaaaatctctcactgagagcagcggaaaggaacgcagcggaggaggagtgagagaaatttgtgagataggttttaaagtgttaagggctgcaaaccaaaaaccctagacagacgattataccctacacccagttctatatcatatttcaatattagccgtacgattacactctaagccactttactcgtatattattggtcaaacaacacgcccccggtaaataaacgagtattagtgtcaagtaaaaaaaatcagtattttgtaaattaattttaaaaatatcactctcaatttttttgaggaaattttttatttttatacttcgaaatagttttttttttttttt

SEQ ID NO: 308228 - DNA, 2612 bp, Cannabis indica
aaagatgttcttgaaaggcttcgggttagccttgggtttgatggtcttatggctgttgatgctgctggtaggagcggggggattgcttttctttggaaagttgaaggagaggttcaggtacttgggtatgctaattcttacattgatgttagtgttcataccaatgataatatggtatggagattaacagggtgttatggagagccaaatagaaattttcgttcaagaacatgggatttattgaggtatttatcgtctaggcacactttgccttggtgcattataggcgatttgaacaatatttgttgcaatgaggataagagaggtggcaatgcttaccctactgcgttaattaacggctttaaccaagctctaacagactgtaagctgagggatatggagcttattggctatcccttcacttgggaaaagggtagaggtacgactagttggattgaagttcaattagatagagctttagttactcaagattggttggatcatttcaattcagcaaaactaatcaatattgaagtttcaagttcagatcatattcccattcttcttgtcccatctttgtttgatgcaactgctccaaaaagaagattccgttttgaaaactgttggctccgtgaaccaatgtgtgcacaagttatacaagagagttgggctagctgtccttcgaatgctattactgataaaatagcatattgtggcttggggagagagttattcaggtgatttcaaggacaggataaaaggactcaagaaagaaattcagcattggaaaaaaggagagatgatcggtctatcaagaagcacaaggaagctgaacagaatttatttgaagcttacactcaaagggagattttttggaggcaaagatcaaaacaactttggttgagagaaggcaatcaaaatagcaagttctttcatgcttacgcttccactcgtagacgaaccaattctcttccaaagctccaaaatcaagacggttattgggtggattggcaaagtggactagatgatgttatcaaagattattttactgagttattcacttcctttcctcatacagctgaaacaataacaagtaacattcctacaacaattacggtgaccaaaacctgctcctaaccgcaccaatcactgaagaagaagttagtaaagccgtaaaacagatgcatcttgacaagtcccctggccccgacggaatgacacctagtttttaccagcgtaattggaacattgttgggacggacgtgataaagctggtgagaaatttcttctgtactgggttgctgccttcaggtttaaatcacattaacatggtcttaattcctaagaaaaagaatgctatgactatgggtgatcttagaccaatttctttatgcaatgttctatataaaataatttccaaagtgatggctaaccgtctcaaagaggtcttaccacagattatttctgagtaccaaagtgcctttatatcgggtcgattaatttcagacaatatcatgatatcgtacgaggttatgcattacttaaagaggaaaagacatggcaaggaaggttatatggcattaaagcttgatttcagcaaagcctacgatcgtgttgagtggccttttattgaagctatgatgaagaagatggtctttcatgaatactttgtccagttagtgttacagtgtgtatctaccgtgcaatacaccatccaaagcagtggtaaagaaattagttctctcattcctcatagaggcatccgtcaaggcaatccgttgtcctcttatttattcttgatatgtgtagagggtttttcttccattaccagaaggttcgagtcatctaaacttctaagaggctgtagagtggctaatggagctcccactatttcccacatgcttttttgcagatgatagctacgtctattgtagagccaacgatagagaagcttctaatgtccttaacatgctacatacctttcaacttgcctcgggccaaatggttaatttcacaaaatcctctgtcttttttagttctaacacaactagaaccattagagatagagtttgccaacaattgcatatcaacgaagctgatgctaatagtttctatttggggcttccttgcttggttagccgaaataaataggccatttcgggttttttgaaggacaagatgcaaaagcgtgttcagcaatgggaaggccgatttctttcaaaagttggaaaagaaatcctcctaaagatagttgcacaagcccttccaagctttgctatgtcggttttcttgttacccgtggagacttgcaaatctatggagagtattatgagcaaattctggtggaaatcttcaaatcagagccaaggagtgagttgggcaatgtaatacccggaattaagaaatggattagcaaaaccctaactagataattatgtataattgaggaaattatattattatataatttaatatatgtgattttatatgaattttaatatattaaagaccccgttggtgagccaggggcattttggtaattatgacccgagaagggtaaattgttgagattaaattaattacgtgcttaatagaactatattattatatag

SEQ ID NO: 308229 - DNA, 1471 bp, Cannabis indica
ttcaatgactagaggatcattatgcgagaagtgcactggtctggcatcctctttagtgaaggtaatgggttaatccatgagcctaggccttccgcaaggtaattgagtcactttccatacttttcatgattatccaactcttctacatatcactttccatgcagtcctctagatatcatcgctactctcctgttaggtcaagggggatttagaggcattcctggttgtactgagttttatgctggcaagggaatttcgcactaggagcttaaggtatacctccttgaggtatttgacccccagcgtgtctttcttgcatgtgtggtaactagtctcgtactcagtcgtggaggtgtgccaattgtatcaaatttttgatttcatctttcaagcatttgcactcgttaatattgttcttgatttcattgtgatattcacacttcttatttgggtccctcttagaatggtcctggaatataggtggaggctttcggtaagacacattctgatgtgcgactaaacacactcgctcttgggtgtccctgaggtcgttgtattatgcatactacgggtcgtacctggatgatttattgcctttattatttttagtctaggtatttcccttagcaagtcttttactctgtgcagtgtggtgagttggtacagtgctcatggctagagacgctatgggagttgggtgtagaacaaaggctcttggtgctacactttctgccgaaggagctctgtatttggaataggctggcatgcgactgtgttttgcgagtaagccaagtggacttggaattgcacacttgaagtaggcaccactctgggtggtgttgaagatccagtaggtactcctcacgtgtactgtactccgtaagtgttattcgaccttccggtcaggtaatatccaccaaatactgtgatctgtgcttcttccatattgatgtatttttgggctcacttttggaaatcttgcaggttggctgcaccttcttgttgaagctcgttccaaaaaagggttcccactccaatgcctgcttgtagcaatcctagctgttgctcgtcattaactttcttggttttagatgcttcttctttgaatctctttataaaggttttcatagtttctgtaggcaacttcttgatttaagtcagaacagtgacttcgtggtttatttttttgaaagccacaaattgcctccggaagttagtttgtagcttactccagcagctcacggaacctaattccaactttttgaaccattcttctgcggatcctcccaaggtcaatgggaagcacaaacactttgcatcatcatcactcactcttaacacggtcataagtctattgaattgtgacaaatggtcactggggtccgtgtcccccatgtattgttgttggtattatgtttatccaggatcttagatctatttgcaagtatgttgatttaacaacctaatattg

SEQ ID NO: 308230 - DNA, 861 bp, Cannabis indica
aaataaaaattaaaagtcacccaaatatcagttcaaatattaatggaatttgttttattattattttattatatataaataatattttattattttattaaataaaaattaaaagtcacccataaatttctcaaaaaccaagaattttagttatataggcacactttatatagaatagatatatatttcattaaaagtgtttaagaattgtcaactaaacattgaatatatactacacatttattctgattaaaaagaaaataaagaattaaaagtataagaattctcatgcatattacaaatttattagggtttggagatagggttcgggttcagacccgatcgaattgaagatgagattcgagtcttgggccaggataggagttgaggtcgagtttatggtaaatatagtataattttatgcaacctattgatataagttaataccaattataatattgtattaaataatatcaatataatataatataacacaatacaatataacataactcagtgtgagccttatataactaatattttacattgttcaatatcagttataaagaaatagagtagaaaagaagaaaaagtgtatggtatattaaatgaatgatctaattgattacaagtgaatacatttactaattatagtaactcaaagttagttacacgtgcaagacacaataactaactctatgatagatcactactaactaattaactaaattataatctaactaacttgatactctcctttaagactatatctattctatataaaatgtgcctatataactaaaattcttagtttttgagaaatttatgggtgacttttaattttatttaataaaataataa

SEQ ID NO: 308231 - DNA, 1038 bp, Cannabis indica
aaaaaaaaaacaagtacgtaacctgtgcaaaatgccatagtaaagttcactactctgtaagaaaataaagacggtacttcctaaacctaaatactcggccataacatagtgaatcaatataaagtcaactacaaatcacaggcggaaatggatgatcatgatatattcgacaaataaaaatggaaattatctgttggcagatctcatagttgaaaggcatgtctcactagttcaccgatcaggaaatctagctacaacttggttggtaaccgagaaaacgaaaaaaaaaaaatcaaaatttccgagtctcaaaatctcaaaattccaaacccttaaaacactcctgtaaaactttacttaaatttcacatggccaagtaaattttcaaccaaattagttaacttttatacttagttgattttccgttgttttctcggttagcaaggaggaaaaaaaatgaagatcagagagaaagagaactcaccagagaaaacggagaccaggaaagcaaggtcagtagatcgatttgaaacagaaagaataaatttcaactgaataggaaaattgaatatggattttaatatggcgattgtaccctttgaaggaaggaaatggaatggtattgttttgtttttgttttaacctaaagagaatgtgtccacgttggtcaggttacaggcaactggggcgatttcaacgttgtgatgaccgagtcagactcagcctcagagtgtttgttgaccatttaaatctatttttatgctgagctggctttcggctcgaaacttactcttgaggttaagatggtctttttcacatgctgtgttctttgacttttgcacacgattcgcttacccaaactttcttttctctaacgagttacgacttacgagcaagcagcctagcctatctcttctctcacgcggtttccgaatattttctttttcttttttaaatttaataaaacgattttagaaaacaaaattattactaaaattgtatgattattttatatatatctatataactgaattcttg

SEQ ID NO: 308232 - DNA, 2048 bp, Cannabis indica
aaaatagagataaatcctttccgaattttaacaaaatcccagctataactgcagcctataactctgaaacccgttagctgactggataaagtgacctttgaaatcccattcccaggtcaggggttgagcaccaccctgaagtatcaatctattgcaacctaaaattctaacttagtcatagaacacgcatcagaaatgcatatcaacaattactttaaatcaatttttggcaaccctaacataaaattacacacaaaacatcttgtgtaattacattataactacatatatgcatatcgaattgcccttttgacttctatggttatttgcaataaattaaagccatatcaaattattattcaacatattgaatcaaaagcatgccctcgttaattaaaccaacaaacaccattatacaaacagatcagtaaaaaataaaattagtatccaatactgactatatccaaatccataaaccgaaatcgccaaataaacttgtaattcagatcaacataagtgcaaaggttacgaagacattaaatctgtaaatcacagagaaagaaacaccaaaaattacgattctgacattgaatgatctaattttgattgatcgcatgcaataataataataaaaacagaaaatacaatgtagaaaaaggaaaacggaaagatctcaattggtactcgcctgcccaaaccgaagagactcatggcttgaagggcgaggaagagagagatggattgatgatggtgagtgattactccttttctcaggttatatattctgggtcagaagaaaaagatgccttttcttctctttattatctgctaaattaattaattaagaaacttacatcgtacctctaaaatataattacattatcgcccctatttaaaataataacaacaataataatattattagtttttttttcacccatgaatttatcatacgaccaaataatgttctctcatatgcgcttgttaaaaacactctaatataatacaactgtacaaaaatgctcatttctttatgttttgttagatttacttagctgtttaattggtgatatgatatttcaaaaaagagtataaaagtaatcgaatttaggagaaaaagaaagaggctaacattaaaatacaaatctttagagcataaaagttataattgtggtgtatatatatttttagctcatattataaaagtaaacgtatataattgatttaaattagattaatttgtttgtaccttatacattttttttcttttttgaaatgttttgtaccttatatattaaaatgcaattgcaaaatttaagttaaatataatagtgagtccttttttgaactaaattgttataaaattcataccatgtattagaccatctctatacaagatgtaaaatgtttgctaaatttagcacaaaaataatattttttattttttattgtttaaataatggtaatatggttattgacctcacttctagccaacgacagtgagtcaagataaagcgattagataaaataaataataaaaaacaaaaacaacaagtaaagagaacaccagaaactcccaactctagagagagaaagtctacagagagaagctctgaccttgtgggtagttttctgaacatgaaaaatgaactaagggagctctgcttttatagatgaaggaggcccacaaaaataggagataaaatacaaataaagtgtttccaccgttgatgatgatctaacggtgaaaattagattctagtggtgttgtctgattttttatgtttggcaagtctcgctacgagttactcggagcttatttttgtaactcccatgagagtgaattttgacgacaatagctttaaaattttgactggtttgtgagacatgacttgatagggagcttaaatagcttcaaaatgaaagttgaatcgcgtcaatcgaatgaaaattgagtgggttgtggtcgttttattaaggcagtacaagtttcagcgcccatgttgacatccagcgcccaagttgacattgttggaaatttattttac

SEQ ID NO: 308233 - DNA, 2231 bp, Cannabis indica
tcgaagttcaccattctgaagaagttgttttccagtattttctgtgtccacgacaacattaaacaactttccagcagccgctacctgtatatttaatcaacattagagtcaaagatccagaatatgtgaccattttttaacattacataagatcaaataaatgactgacctctaaggcagtcatcgcagagctatccttcactttaataagtttagcaacaacacctttcacctttgatctatcaaaattccttacaggatcacgatatgtgaattgaacattagctaattgggctgaaagatttcgtatctcatccttcaacttctgcacccactctagctcagatgcacggtcctgtagcaaaataaatgtttaaaaaacaaatcaaactggatacatgcaaacatgtataaaaataccaaatataaaaatatacttgatacgacaaactagttaaatattcaagtgtcttgaattacataggcaaaatgctatggtttgataaaaatgcttacttttgtaaaacttccatctgaccctccttatatggaagagactctaatgtttttttgacattctccacatctttctttctattactaagtccttttccacttgaaacagcttcatcgcgctttgacattagctgatgtgttttttctttcaactccttttcacaatggcttatttggttttgagctgcttcatttctgtttcagcactcccaacagctaccttagcatcagacagctgatctcccagacttttctcctcatctccactactcttgccagcaacgacaccctagccattatcattgaaacaataatcattagcacaaaaagatgatgcccttgttatttagtgcaaaaaacaccactgaagcactatctacctggtattccttttcatactcttctaaaccctgagaaagttctgccaccttcttcttcaaatcagctgctccttcatcagctcttcttacagctgaagccctttcttctactgattgcttcaaatcctcaatattgctaacaatctgaaaacatcaagatgaaacatcaaacaatagattgacccaataggagaaaatctaagaaagcaaaaacaatatctacaaaatacattattagaatcagcaggtctataagtactgaagatgtatttagaactcaagtcaattgttgataaaggctaataaccttttgagcatttttattttcagtcttgaaattatcctctttactgttcagcacggaagtttctctcacaagatcttgagaaagtgcatctactttgtcagaaaatgtttttacttcaccacccatactggcttccttttgggctgttaactctgccactttagtttccatctcttgtatttctgcctgcatcatgcctgtattgtcatcaatctcagcaatatgggccttcacttgctcaacctcatgaaccgcactgtctcttatcttctcagcttgaacatagtcataagcaatacaaaaccttttaagccgatctaactcggcattaccattagcccattgcatgtattgtgtcctctctctcctcagcttttcaagagcaggcagtatttcctgatcaagaaggttattaatctcatcaaccttactttgcttcttctcaagagttttcaaagctgcatctttctttgtttcatacattcttgtcccagcagcctcttcaagcatagacaaaatctcagggggtttcatgtttaaaacctttgtaattcggccttgcataatgagaaaatgtgggttgttcacattaagctgcactgaatgaaaaagattctgaacctgactaggctgggcaagttttccatttattaaatacttgtttcttcccccgaccacaatctgtataaatattcaaatatattgttaactgaatttaattaaagtagtgctcatttccagcctcatcaaagaagtacaccaaaaactcaattattgataaaagcacatccttaactccatatgatacgttgaaaaacaagaataaacacaaacagacaacatcacttttgacatttaagaaaactacggtacttctattaagttagaaagggtagaaataaagaaaatcaaatcaaattcaaaatgctctccccaacttccaatgctctccccattaaagcttttggaaaagaaaaaaaaaaaaaaaaaaacgaacaccactgtatacaaaccctaaaacgttaagt

SEQ ID NO: 308234 - DNA, 5699 bp, Cannabis indica
gcataaaacccaacaccaactctgtagcagaccagggcatatagcttcaaaatgctatcaccgttttgacatctcattccaagctcctagatctagccagtcacctgcctctcaaaacaccaacaacactcactcaaacaatgatcaacaggcttactttactagcacagatgctcatgtcgacaactcttggtacattgacagtggagccaccaaccacaccacttccaaagtatccaacatacagcacaagactgacatgaaaggtacaacccacctacttattggtaatggattcccttaaccgtgaccaaatctggctcaagtaaaatccataacactgctggctatttagtgcttaatgatatactttgtgtacctaaaatttctgaaaatctcttgtctatatctcaactaaccaaagataacaaagaatgtgtggaattttatgctaatttttatgttgtgaaggacctaatcacgaaggaagaggtgcttcggtgagtgcttaacaatgggttatatcaatagaaactcactgcatcatcatcatcaaatgttcctgccaactctagctcaagttttattgtttcctccaagagtagaaaaattgccaaacatccacagtcattagttaaattgaatcaatcaaagatgttcaatagttgtatatccttatttgttgagtctagtttcaattcagatgccaatgtgtggctaatgcgccttggtcatcccaatatcaatgtattaaaacacatgttggttaatgaaaaagtctctttcaaaaactctacacctttctacaatgcctgtcacatatagaaaagtcaaaatataaacactacaacacctcacacactaaatctcactcaccaattgagcttatacacacagatgtatggggcccttctcccatattatgcaaggaaggatatcgatactatgtgcacttcatagatgactatagtaatttcatttggatatttcctctcaagttaaaatttgatgttaaaaacacctttcttaactttcaaaagtttgtagaaaggaaatttgatgctaaaatcaagacccttcaatcggattggggaggtgaatattgaaacttagcaccattcttggaatcaattagtgtgcactttagacacccttgcccgcatacacatgcacaaaatagaaagtccgaaagaaaacaccaacacatcattgaaatgggactaaccttactatctcaagcctcaatgcgcttgagatattggtgggatgactttagcacaaccacttttctcataaatcacgtatccacaccaaccttagcacataaatctcccatagaaaaattattcaaagtcactccaaacttaaaatttcttaaggtttttgggagtgcttactttcctcatctacgtgccggcctacaacaatcattaattagactttagatccaccaagtgtgtctttcttggatatagtccaaaccataaggggtaaaaatgcctccatccaaatggtcgtttatacataggacatagtgtcgcattcaatgaattagagtttccatttgctactggtttcgggcagaccacagattcctccactccctccccaccaatcatccaatacagtcattggcttcccttcatttcatctcctacttttcaggacaatgatgttgatgatgcacctgactctataaatgatgtatctctttgtttcgtaggtcccacgacacctcccacttccccattgtccgattgtgcatcttccaaaactcagcatgaaagtccctccatgacaaagtcctactccaccattccactagccatacatctaccaatacaacctctgccaccatcatcatcatccaaccattcctcctattcaacacccacaccagaacccacaccattgcccttcccaatacccgaacctccagttccctcacatcccatggtcacatgctcaaaattcagacttttcaaacctagaaccttccttacctcagttctccataatcctcacctcccagctctttccctctccacccttgcctcacccgaaatcgctctaaccacccctgcttggaaaaatgtcatgactgacgaatattttgctctcaagaagattaagacttggtatcttgttcctagactacctcatatgcataattcgataacaagtggatctttcgccacaaattcaacttcgatggctctcatcaatgctataaagcgcgtcttgtagctaaaggctttctacaacaacccgatgtggacttttttgatactttcagtctcgttgttaagccatccaccattcgagctatcatctctcttgctgtcacaaatgattgggatgtccaacaaatcgatataaaaaatacctttctaaacagcatattggaggaagaagtctatatgtcacaaccggctggctatgttgatcctaagttccctactgctgtgtgcgaacttaatcgtacaatttacgaccttaaacaagccccacgggcgtggttcgacacactttgccatgctcttttacgtcttgacttgaaaaactctgtctcagacacttctcttttttttcttactgaaggtgatgctcgactttatgtcctcgtttacgttgatgatattttacttacaagtatcagcgccacccgtattctgaatatcatttctcagctgaacactcaattttctctcaagactctcggctctgtcacttacttccttggttttgagacaagtagggggcaagatggtcttcacttatctcaaaccgagtactctcttgatctcctcaaacgaacacacatgctggaagctaaacccagtcctacaccattgattcaaagtaaaaaattacacctacaggacaacccaccttttgaagatatcactcaatataggagtgtcattggtgcgttacaatacctcaccttaagcagacccaatatttccttttcgatcaacaaattgagccaatttcttcaagctccaacacaaaatcattggcttgcctgcaaacgcatactgagatatattgcaggagtatggtgaaggcattcaatttactaaagcaactaatcccatcattgaaagtttatgtgattcagactgggctagctcttttgatgaccaaaaatccacatcaggcatatgtgtttactttggtggaaacctgatcagatggagctcaagaaaacaaaaatctgttgctcgatcgagcaccgaagctgaatacagatcactgctcaagcatgtacagaagtaacttggctgcagtctctctttactaaaattgggatagaacataaccgcacggctgtaatttggtgtgacaattcaagagcctgtcaacttgcttccaatcctgtagttcactcgagaactaaacacattgagattgatgtttacttcatacgagacaaagtgatgagcaaatcaattcaagttagatacatactatcagaggaacaaaatgcaaatatattaaccaaatccctgcctattacaacctttcattatctcaaagacaaggttattgtttgccactcaccacagcacagcttgaagggacacgttgaaatgaaaggcccagagtcggcccatttagaggataaagtcaatgatattgactaggcataattcatttactgttatcaatcataggaaaaataattaattccctcaattatcatatcattgtgtgggccatagagaatatatttctgttattgtatcaactaatagtgtgataccttctagtatattctctgtgtatataaaaggaaacattctttattgtattgagagcagtgaagtgtaattactcagtaatatacaaaagtttatataataatatgatagcactaaagaatatacccctcttttcagaatctactcaacttatttcttattatattaataataaaatgatagtatatattttgaaaagtatattatttaaataagagatagaaaataaaaaactgatctatagtataatgtaaaagttttaggcaaaatagagaaaattaattttaatattgtattttaaaaaatagagtagagaagcaattgaaaatgctcttagtagattttgaaaagtcttctttttcttttagtttacccaaattattatgtttttcttggaagaaagagaattgcatttaatatctgaaaaaaaaaatatttttggcaaaattttaatatttttattactattaaatatatatatattttcaattttaaaatttttctaattacaattttacggtgtcatgtgaaaacaacttaaaaacaagaaaaaaaaaataacatcaaaataataagaaaataacatcaaaattaagattttttattttataattactatttattatttaattaatcaattaattaaatgcgaaataataaaattaatactaaaacagatattctgtagctactagctacagaccagcaaacaattaaagaactaaagtgcaacaaaataaaaatacacaaagtttttatgcgtgtgtcgtgctggaatttgtgtcatgctttaatcagactagcttgtttttcctaaatagactaattcgtttttttatatgagctcgaatttgtactctatatttttatatttttattataattaatgagataattatgtttttttatagtttgattatttttatataatttttttaacaataattatacacaatcatataaaaaaaataattaaaattattagaatttaaatattaattattatattttaattgataaagaattatttattaatatttgagttcataccaatttagtattgtatcacaaaattcatctcatattatcttaaaattaagctggtatttacagcaagcgatgggcctctatatgcttgataattcaatgaaatttcaaagaaaaatagtgatgttcaaagacatgtaccgtacttaggtttgactaattcagaaatcataacaaaacaaatgaatggtgatgccttttgtgaatcatttgtcagtggttagggtggaagtctccaaaagtagctaccacaaacaaacaaagacaatgcaacgtggttactcacttgccacttttatatgttaataaattccacaataattaatcttataaaattaatttctatttaatatttacgataatataaataaatcctactataattatccgtaacgttctacgaagtcacatatgacgtaatggaaaaaaatatttgaggttacatttgaggagtttttttatttttatattttaaaatatttttttttatatatttttacgaaattttatatagaattctctattataactaacagaataatttaaattgtaactaaaaattatataacaacgcatatgaaaaccaccgaagaaactactttataaacttaaagcgtaaattttttttaatgtaatttctctaaattttattggaagccaaaaaaatattttcataataaaaaatagggtaaataccattttggaccctttattttacaaaagttaccaattggaccctgtattttgttaaatgacaaaatggaccctgtattttctaaaatagtacaaataggaccctgaattgattttttgtcaaaataaagtttaattataatccgatctaaaagtgttatgacaaaactgtttacatttttttgtatctat

SEQ ID NO: 308235 - DNA, 2930 bp, Cannabis indica
gatctgaatattgataccactaatgctattgtgttggatagccaagagaatcaaattcgtccccaacaggccactacagatcaagatcaagatgacactgagaaaaatcaacaacttggccatcacatgatcacaaggtcgaaagcaggtgtttttaaacccatgacttacctgagtaacacacagtgggaaaacaatggaggagaaccaatctctgtttttgaagctctaaaacacaaggggtggataagagtaatgtcagatgaaaatgttgctttcattaagaacaagacatgggttcttatcccaccatcaccagtgtacaatgtagtgggaaacaagtggatcttcaaggaaaaatacaatgcagacggttccttacataggtttaaagctctgttggttgcaaaggggtttcaccagagacctagattggattttggtgagactttcagtctagtgaccaaagcctccaccataatcgttctcaccatagttgtcacaaatggttgggatgtaagacaacttaacatcaacaatgcttttttaaatgagaagcttaaagtggttgtgtacatgacacaaccagaaggttttgtcgatccaaaaagacccaactatttgtgcaagcttctaaaatctctctatggactgaagtaagcaccaagagtctggtttgataagctaaaacaaacactggttgagtggaatttttagcactctaaggcagacacattcttcttcgcactcagaaccaagaagttcatcattatggttcttatatatgtggatgatatcatcattacaggtaatgatacagctgaactttagaaatttatcactaaactaaattagattttctctctgaaggatctatgtgttctgaattattttctgggtattgaagtttatagggacaatataggcatgtatctcacacaaggaaaatatgttgctgaactactcaaaaaatttaacatgatgaacaaaaagccttgtccaactccaatggttgctggaaaactattgtctataacagatggaactgaacttgaaaatcccactcactatagaagcttaattggaggtttacagtatctagtacacaccagaccagacatagcttatgctgttaacaagctaagccagttcctaaaaggtcctacaaccactcatcgatctcagtgctgctaagagaatcctaaggtacttgaaagggacacaacactgtggtttacacattcaacacaacaacaatctgagtctaacagggtactcagatgctaattggtcttgttgtccagattacaggaaatcagttgtggaaaactgtgtctattttggagatacattagtgtcatggtcatccaaggaacaatcggttgtctccagatcaagtacagagtcagaatataaagctttagctcatgttgcagctaagattatttggcttgaatctttactcagtgagatcagattcccattgtccaccacttctgtggtttggtgtgataatatgagtgcaaatatacttgcaacaaatcctgtttaccatgctcaaacaaaacatgttgaactggaccttcactttgtctgagacagagttttagcaaaaaaaaaaactcaacatacagtgtgtaccttcaccggataaaattgcagactgtttcacgaaagttttatctcattcaaggtttcagtttcttgttgacaagcttggtgtgattttatcaccctcacgcttgaggggtggtgttaagaaacatgttagtgagtaattttcattagtgtcctaattactctgccttttactctgtagtcctgaatctttttatttgtaactgtgtattgtggtcccatatcagtgtgtgtgcaagtatgagccataggacaattctgttattcccttgttgtggtcctagtgtgtaatagagtgacatgtatcctctctccctcaattgtactctgcatattttctataaaaggatgaacagtaccttagcaattcttgagctgagttttacacaaaagagtaaaaggttacttttctatctaacctatgtcatgtctctaagatcatttatcctatttaactatgtgggataaatgattccatacagatataatttcataaatatattttaaatttaaaattaatttaaatgcaataatttaaaattttatttttatcaaaagtttatttattaaaattggtaagaattagtgttaaatttaacccgtttcaaaattaaaataattttaattaaacaatagatatccaattaattctagaaaaacaatatgatactagagaattatttactattaaaaatatgacactagaattaaattttctttaaatatttattaaaaatatttatacccaaattttacaaaaataatatttgtattaaattaaattattatttaatagagataatatgttattattaaaatatttttattatatgaaaccatgtcaattatttttgaaaaagcgtgtttttcattaagccaataaatttctttaataacagtaaaaaaaagaatagttcaaactaaaaaaaggacaaaacaaatcttctccaaaaaagactttagcaattattagtttttcagaactaatctgtacgccaagatgcctcatggaagtgttgttagatggtgttatgatgacatttggggatagattttgcatttcaaaatacatgttcataagttggctagccttaaagattcgtttgtctaccttggacagactttgtcagtttaatcatccaactcttccttgtgctttgtgtggtagtggagtggagagccattctcacctctttttttgatttgtatttatagcagttttggtggtttcatcaaattttggctttagactggtattttctaattgaaaaaaaagagctccatgatgtcct

SEQ ID NO: 308236 - DNA, 2063 bp, Cannabis indica
aactcccataatatatccatgtaattccattaaaataactttgcatatagaaagtacactgtcataattaaaatgatcatgaagaaacggctttgagaaactcctcatcagcttcaagcttagtcatctgttccttggtcaatgcaatatacacttcaattccatccccagatttactatccataaaagctaccacattaggatgacacagtgtggctgagctaacccacactggattaccccacccaaaatcagcttcataaataggatacctacacaaactagtgaagcttaaagatatgtactgtcctcctctcatcattattcctccaccataaccaagcaataaatccatgtacacatcttctccctttttaactttatccaaatactccatatccaacttttctataccttctctaattcgcttcaccaactcaaaacctttctcttttcctgaacttaagattgcaatgctacaccgactaatatttccaaaggaatattcagatagttgtggctcaagccttgttcgaatattcgctgcgtgaatcattgcgaatcctttctcagttccctccaataattcgtcgttgatcgcagccacataacgattccatatgaaagccgatagggactcgattctcgaggctcgttttgatggagaggattggtcattgcaattgtgttttgatctaatatcctcaatcacatcggccttgagtagaaacctctttgaggagatatctttcgtgaccccaacagttaagtcaaacacgggttcaacttttggaggaaagagagttgaggcaatgaactccggatgaggcacttgattgccttcgccacgagcgaaggcaacccaagttttggcaaataagatgcaagacaatgcatctgcgagcttatgcgaaatgcataagcttacagcaattccaccgcattggaagatgttgagttggacaccaaggagaaattccgtgatgggaaagagttgaaaaggaaggaagttgcatatttcattgaggtttggattattgagtgtgtcggaaagacgactcggggtggtgactcgggcaaccgagtaggaaactccctggtcattacagtcgacgaatcgatcatccatgattcggccagctaaagggtaataaagggttaagacctctgataaagaagtcttaatcttgttagatattttggtaaaatcatgatcgtagtcttctaaagggtagtagaaaactaaaggactgtaggttttgggacttgctttggtcgagaaatgatagttggtaatggcgaagatggtgtggtgttggagaagatggtttcacaatttccttggaaattacttcaacttcgaacttcatttttctttcacttttttttattatttcttttgatgagtaattcaacattggttaactttaatttatatatacagctccaaccaagttgtacatatgttaattggttattttttttttaaccggaatattatataaagacatagcttttatcttcaatatacattgttattgagtaatgtgacatacattttgtataaggacgtattttatttgctggtggcatctttctacggcattatcaataagctaatatgagctttttatttattattttaaaacataacaagaaatgtaagatttaaagtttcccgcataccgaatcaaatgtccgttaaatcaattaaaatttaacacgtgaattaaatttttatttataaaaaaattaaacctctattaaagtcaagaaaataagttaacatatttaatataaattagattacttgatgtctcaaattttaataggtttaacacattataggatactaatttttaacagaaaatcttgattctcgcataccgatatatatttatatatatagaattaagttgtttctcttataatactttgcgaaaattccaacactcaaatatcattataaaaaaattacttttagtgataatattttaatcataacataattttttttttactaaatataatttttattgtaactaaaattatatttagtcaca

SEQ ID NO: 308237 - DNA, 2764 bp, Cannabis indica
tatcaatacaaccaaaagaggagtaagtcattacccactaactaagggggccgaacctctataaatctcatgtcttatttatttttatgttcttattgtgtaaccgtgaaaacattagtaataaatacgactacgtcgtcagttggccaaattcgaagtcaacagtttagtgttttcattgagagcgagttgttaatttatctgataaaacaccatggttaacataaagagaactctgactacaacttttgcctcatcgggtcttcctcaagaccttgtggtggctgatcctgatgtccgtgttccagccacaactgggatctccacgaactcaacggatgtggccaaccctaccatcttggtaggcatcacaaacctggccaccacgattggtcaggtggacactaccaatccgattggccttaatgaccaacctttgccactgagggaagaccctccactggcgttgaacccaccaaatgtagccaatcctaccatcttgacaggcaccacaaatctaaccaccacgactagtcaggtggacactatcaactcagttgatcttaatgaccaacctctactgccgagggaggaccctccattggtgcctcgtactgaaggaatgaccaacgtggagcaacccccgagcactatgactggatctagtccccggtattatgctagtgagacagagcgaggaattggcaagccagcaattggcgagccccacgtagacttgggagaagatctcgagctagctatacttaaagaggccgtctgtcaagtcggctaaattgaagaaccacacgttgttggctgcgatgtattcgcaccacagagacgtaaatttttgagatggatgatgaccaagagtacatcctcctatctcaccaggcagagttggaccaccgtaataaagaagctggcaactttataagataatttaattagagaactgctggaagaggtcaggatctcattagagatcctctctaagggagattaatcgacagatcaaggatggtctacaaacaaacagtccaaccaggttctttagaaccaagaaaagccttcctcagcccgaaggaggaaaagtcttgccacgaagatttggtggcgagaacagccagactctggtaaccagcagcctggggggccggctagggattactggcacaataatacccatgtttggccaacctatggccgaccaacagggtgaaaacctgtctggacgatccgagagtgagtaatgcaaagcctattctttaactggctaagcctcagaatgggtagaaacacctaagacaacaacaacttgagaagttagaccaatcacttcagatacttggatccacctaactctaacaatttgtgtgatctaccccctgtcaacgcacaagctgcaccagccagtcaaggaagaatgggcggccaggccctaccgagcatagggctggccggccaaagccagctgccaggcatagggtggctggccttaagcataccttctcccagggtatggtcggcataccttctcccgccccttaaaatcctgggtttttcaatgcaggtgccgcatcttgctttgggtgtgctgcggcccgccttgaggtttctggacagtttgagttttgaatcttatttcatgcataactttttgatccagactccaatttgggtattccatatatcgttggaaagctcgttccaagctctatatatttattgtattttgaatgcaaattatataattatgttgaagtggatttagggattaaccctatttgtgaatcctagaaattgtgactaggattaccggcacttgattagaagcacccggggatttagaatccccacatactcgggacatcatgtaagacagtggttagcacatagagttaatcacagtggcgctaatgtttaatatcatagttatgattaaatgagaaccgggattagggttcttaccctaaagtgagaggttatatggcctaggattattaccgtagtgattaatgattttagatattatcccatgatatatatattgagtaaagaattatgaatttaaggtataattaggttaaactcggtaattagaaccgagataaactgttctaaggccttaatgtaattagacgtgtgagcgtaacacgtgggtctatgccacatagacataaataggcgtgtgagcgtaacacgcaggtctatgtcaaatagacaataagtgtaatggcattaatatatgtgtaaagaccgcttagtttaatttagaaattagtagatatttaaggtttgattatgaaaattatttatagatatttaaataattatttatgttgttatatttaatttctgaatgcatttttctatgtcatatagtgagatttcataattttacattttcggtgcccgacaacatggaacgcagtgtatggctcagtagaatcacaatctaatattttagcatagtgggacagtttatttagactttgggaatgtcgggattggtcgggaatttagagtttcccaaaaataccctcaagtgctttttaacccttttagtgtgggaggggcaaaataatctttttgcccatttatgttttgtcctttagtggactttattttaagtcaataatcagatttttgtgttattatggggctgagtataccaagtaatcaaggcaattacttcatttattcaaaaattagaaaattagaaaattaagaagttctttctctcaagagctctctctctctc

SEQ ID NO: 308238 - DNA, 1844 bp, Cannabis indica
ggggatggggcggggatgggggcgggaattgcattccccgtacattaaccgaccaatttctatctctaataacaacatataaagagaaaaaaatttctcaaccttcacatggagacgctgagaatgtacccaatcaccgttggtgatccaaatgagaacccaaggatggcgtcgtccaccagaaacactggcaattagttggacctccttcatgagaaaagacaaaaccatgacaaaggaaggagaccgtcaaaggacttccagatgcggctcacagactcataccgaaaaatagcttggaggaaaatctagaagaatcaaaatcacctctcatacggagaagaaaagaatatttcaatcacttgaggtgtcacactctacttaatgtatattatttagcagcttacgccttgtgattggttatagagatattttataaaaattattatattaaattatatgatactcaatatttaattgcatcagtggtagaaaatactaaacactactaatgttttttaatttaatatccattttcacacattccccaaatcacaaaatggttccatcatccttcatcaatcgattgagagtgttatatgttagcttaaattcttattttttgtattatgagttggtaagatcaaatgcttttattgttatgtatttgaaaaattgaagggtggtctctaattaaatcgaaccatcccatatgtttttaattaattaataaaaagtgatattatatatctaataatcacacatgtaaatcttcaatcataccctaacaatctttgattgacacatgtgttttattttttatatacatatatatattaattaaagaaataataataataataataataataataataataataataaatttattgtgtgctggaaattgagattgagaagagaaggaaggagtgttggggaccaggttattccctttgagaacatgttgtgtttgggacagacatctctattgtgtgccccattccgttttttgagctgacatgatcatgttatatattgcatctctgaatacatatatcataatcatatataagacatacaacacaacaccacatctattcaattctaattaaaccaagacaacacattttttttatcaaaatttcttctcttctttccatgtggatcgaaaagggatctcatctcacactatgctgagattattatgataaagtgaagtcattttcaattgtactacaactttaataatccttgcttggttcatgaggactttcactatgttatctccaatcatatacttgataatattgttggtttgagctagctagcttaatgtcccaaatatcttttcctttcaccattttgtgagatttgggtcggtccaccttttaagtaaattgcaaaagatatgtatatatgatgagatgagtgttgaaaaattaatataaatatactgtaggcctaatagtagatattgaaaattttcactgctctatctcaatcctcaggtttggaaatttgtaaatacatttacaaaataactcatgctatgataataatcgatgtccaaaccattttcttttcattggtcccaataaccagctgttttcaccacaaagcccaaccaagtcggctgttagcccaccatagtacatgttactattaagcttattatgtttgtcagtcaaatagtttacttaaactagaaagaaagcctgatttctgtctttttctttattttttcttttcctctaaagaattttgttagagcattcacataatcattagatactttaaaatatattttaaatatattttttaaaaaaatatttaaaaaatta

SEQ ID NO: 308239 - DNA, 1963 bp, Cannabis indica
cggtgcgatttgaactgcatagttttttttttttttataaatcagagaattgtattgcacaaaccaatctttacatcctactagcaccctatagacagggcctgaggaaatctatacaaagtcaattgcctctttctatactttttttttacatttataaagcataaaaccattttatctacaatcttgattttctttggcaaaaacatagcaatccgaaactttaaactccacttaatatcctcgatcagcctggtggaatttaaatgattctcttgccaaataactccaaatgttataaaccagtgcagtagttgctacagcataaacttgcttcctgaatttggtcatttttcccttgccaatccatctcacctattgaggaagactgctggttcttgcattccaatccaaccatctcttaatctccatcaggcagtaatcagcaacactacattcaaagaataaaggctgcccattttcattttgaacattacaaaggctgcacctttcatcttgtataccatatttaaccaatctatcattgatttttaatgtattgagcattgccaaccatagtattacactatgctttggagtattcaacctggcccacacttcatgactccagactaacctgattcgaggaggagtaagcagcttgtatccagctggaatggtgtattaacaattcaaaatcgcaaaccgtaccgcaccgcgcggtttaggaaaaaaatcgcaaccgtactgtaaaaaatttcaaaccgcattttaacagcggtgcgggcggtttgagcaatttggtgaacacccctaacagacacattaaataaattttaaatctcagcacaaaaagcacagattatagaaaacttagagcgatttttcatcaaatataaccaagttacacgagaataatcatatacaaaaataacaaaacacctgaatctaggctgagaacaaaataggaggaccttaaacatcaaaatgaactagctcacaaggaacactagcagcacgtttattgactctaggactcaaactaacatgatgatgtttggcaaactgacatgactcacaatccaataaagacaacttactatactggggacaaactttcttgagcaaaggaagggattgatgacccaaacggcaatgagcctcaaaagcaaaagcaatactcggacaagcaatagaaattagtttgtgtttggtagctaagtaagattttggtttaaaaatacctctttgagaccttgtggtcatcgggtgggtgcgaatgatgggctggggttcaggagcagtattcaaggaaggctgtatggatgtgggatcagtgtttgtgtctgcaatatgggaagaatttgattcggttatggacagagaggagtcacgagtgtttggtgaggaagtatcaggttgtggtgaagtgacaaggtctggaatatgtgtatgagtagcagtaggtaaaggagagtcattgttagagacaacctgttgtggataaaactgagttgagggcatagttgttgatgatggttgttctgtagagtgggagtagggaaaataaattgttgctcattgaatgtgacatccctggcaatgtatcttttaccatgcacactttcacagatatatcctttgtgattgggagaatagccaatgaacctgcatggttcagatctaaaacttagtttgtgagggtgatatggccgaagatgtggatagcagatgctgccaaatatttttaaagacttgtaatcagacagtttattttattgaataaactgttgttgtcaagaattttggtaggcaatctgttaattgtgtacactccacactgaaaggcatgccccagtatgacatatcaagattggcttctgctaatagggtaagacctgtttctgtgatatgtcgatgtttcctctctgcacgaccattttgctcatgtgaatgtgggcaa

SEQ ID NO: 308240 - DNA, 1293 bp, Cannabis indica
tttttggcccctaagctaggtgggccctaggcacagggcccacctacgctggccctagttacaactaaatagcatccccattaagggacctataacaaattgaagctatacatatatgtttgaactaagaaaatcattcacaaaatcactccagttggtatccttgaggttgactttttttggcgagatctatgctactcgatttttcactgttgtttgtgtctgccttactatcactactgcattttccatcttgacattccatattttgtcatttctagcctgccaaagatgatacaccagacttgctacggctgttgccaacaattatttgatctctcaattcacctgattaattgagttaaggtgactgcttgtgccttctaattcatccattttttaacttcttttaagcactccagtgataattcgcattcgaagaagagatgtccattagtttcatgttattgcttacagaagacacattcatcttcttccaccatgttgaatttttttaatctgtctcttgtccttagcctgttcagaatagccagccacagtatgaaactatgtttaggtgtatttaaccttccctaacttcttgatcccaacttactctgagttgaattggacatagtagcttgtatccagctgctatctcgtatggtgcttgagtgaaaacttcaagttgctaagttgttctttggcagcaacaacttatttttcttgcatgtaaaatctcttatctctttaatgtttcttagttagcaaaattaaaagattcaacaaagaaacaaaatatctgcactaaaaattaattaattaatattcaagaaactaaaagtaaagtatgttagattaaaatgaaacccaaaacatatataaacaatgttatgaatatatggaataaagaatatagagcgaacatatatgtaaatgagagggtcgaaatatatctccagctattaatcttgattcacaactctagatcttaaaaaaaaatacgaatgagtactcggacttccagactcttactaactctttatagagtaactaaaatacaaaaattgggcaaacttgggtactgaccctatacactactacaaaaagggtcttatcttcaattttgcatcaatcaatgcgtcttgttaaactcattgaccgacgcaaaagtcaactcataattttttgcttcgcttggtcaccgtagcacataattatcaattagcttcggttataactctaacactaaaataaaaactgaagcaaaagatgaaatttaaaaaaaaaatt

SEQ ID NO: 308241 - DNA, 1576 bp, Cannabis indica
taaatctgatctatattaataagtaaatctgattatattgaagtgagttttatttagggcataaaacccaacagtgacttctttcgttccaggagattatttggcacgactagtcattcctgttgttttattcctaataactcatgcctgaaaatcgatatcagaaacaaaatatagcgacgtgcttgatgttaaaatatttaaaacgaaaatgagttgttcctgaaaagtgaaagtcgttttagaatattaaatcggtagcttaattttcacacattataaggaatgaatattttgttatcagaaacgaaactgtcatttttaaagtcattttgtaagaataattaaatttatttaagttaaataaaatattaaattctttttaaatatcacattttttgtctattaagcaatttttttaaaaattaaaatttttctatttaaactgaaagagttcatacatcgttttcatatttaatacaaaacattattttttatatttaaaataatttatactaaaagagttcataaatgctcatactaacaaaaataataaattaaacatctaagatatggactcattatcatcacaactattttcatttcctcgagtctgttgtgaagttgtaggttgtactcctaggatctacagtggttgttgtaatctatggcatctctaacatcgacataatttgtcacatctatgatgtctaaggtacttacgacatcatctacatcatctattgcaatttctgatgtgggaaggattttgtatacaaagaaatgattttattatattagttgtttttctcataaaagactttaagataatttatagtattcaccccattattatattgttgtgttctgcaaataagttacctgtttaagaatcttcttcgtcgtctactctcccatgaacaaaataattgtctcataaacaactcacatcattacatattatatctattatctatctaatatattcacaactaaactaaaggggagaagattcaatttctacgaaagaagactcttgttatatagaaatgaataagtgctaagccacaagaaagtgttatgatccctaatccaagtaataccaaacataaattttcttttttcttgaacttatagctaagaaatcgctagttgaataatagctatacaacattgaaaagtctctcaatatggctctctcgctctcgctctctgaggctttcctttctccttttacgacactactaagattaatcagccttgtcattctacacgtctaagttgctgtgtctcattttcaaagtttcaaagctttcatctgattaaaaatttggtctctatttctccgggtgtatagggtttttgttttcttctctgaaaggagctgctcaaaaccctttcgacttctatgttgggtctagtctctatttgtagactttctggatttcttttttcctgttgttttctggagttctgtattggtttttttttgtttccttcttgtcccgaattaccatggtgactgtcaaggaagtttgtagtgaggaagttgttggaatttattttaccaggatct

SEQ ID NO: 308242 - DNA, 1887 bp, Cannabis indica
atatttaaattttaatttcacgtttttattttaaaaataattaaaaatatgtatatacatacttataataatttgtaaattttattataaccaaatcaaaattaatatatacatatatacccatgtataaaaagacttaaatataaaatcattaataaaatatatatttagaacaataaataatattttataaatatatagcacgagtaataaattttaaaagaactttaaaataaaaacataattaatttaaagcataattatctatgtacgtagtatgtttttagtaatttgtttcattaaatattttaaaactttttcattttagaaacatgtgagtgcccaaatatataattatttcaagtgtttttccatcattttctaacattattataaatgtttgacttaataattaatggttaatatagctccaactcaatcaacgtatacgtaacattcctaaaacaaaagaaaacaaataatataagacaggtagagctgaacaggaccggccctcgttcagccctatttatgtcgtccatttgcatgtgttgtcaacaatacaattaatgtgttacgtacaaatcacgaactcatttatatctatcaatataaataatattttaattaacaaatgtctaggacaaggatatgatcacgaccttagataacaagactttttaaaaaaaaaaaaacttaatctcaaacaagtggatattgtaggtgtattgtatctacaactatatcagttcagtactaattaatatatttaaaatataatataatgaattaagcctaaaaagttaaaaataaaattaatgtgcacttagttaatagtttgttattatttcctgattgtataaggatataatattgtatcggattaccaacattaatacatttgagattaatatttttatatcatttctttacaattcttttttctctcattctctttcaattattcaacagttctaacataatatcagagtcttttcttctattgatggcaaatgtggctagcatcactactgtaattatggattttagagacggtttttaaggcatttcagcgtcgattttgacaaaatttgctaccgatgctgatttgagcgatgctataagattgaaaacaaccgacgctaaaagttaccctatgacgtcggttattacaatagaattggcgccatatataccctattatatcccaataactgacgccaaatgtccttataaccgacactaaatggcattttaaccgacgctaaaaactaaatataaatcataaaattaattttttaaaattatatatttattagtttatttattatattattcaatttaaatttaaattaaatatttattttttaaaaggtaaatttaatattatttaaattaattttatgattagccaatatacttaatttcatttcataaaagaaattaattaaattataattatatattacacaaatattgaaattagtccaagtattaacaagttaataaaatgaattacaagtgttgaccgagattttcggcaactaattaaataagataatgatgagagcttagagataattaatgcatgtgatttttacgtggtttcagggcattaatgagtcgtagtccacgagtctctattattaatcgagagtatcttttgtgtttacttttgttttttccctccccctcctcatttttaatgaggggtatttatatagattggtgggaagaagaaaaggagtaacttgtctttaagtgccaactgtgggcatgcacaagtttctagaaggtacaaaatagggcatgcataacctacgtagtaggttgcgtaggtgcaagatgagattagccctcatttcttcttgattaatgtgattcttc

SEQ ID NO: 308243 - DNA, 2760 bp, Cannabis indica
ttttttttaacactataactataaaaaatcttatttttaaaaaaattatgattaattataaattattatttttatgttgtgactaataaatctgtgattattaaagatactagtcacaaaaattataatttgttgtgactaaatgtattttagtcacaatacttattgtgattaaaaataaattagtaataatttgtatctaaaatttagtcacaaataattttttattttaactaaaaatcacacttaatcacagaaaatatatattatgactaaaattttataggacattagtttcacacccaacttcctcaaattttgtttgttatgagtaaaataagtttttattggtagtgtagtacaagtttgaaaattgcctttagaaacttatattatttagagattttttttaaaaccaaatgagactatacaataaaaactatctattttaagatcgtaacttattgacgtgtataaaattgtacactaccaacggttcacaccgcataaattatgagtgtttgcagtgcgaatggtacgatttttgaatatttttcaaattaactcgcacatgtgaaattaaaaaaccgcaaaaaatagtgtggagcggtttatgcggtttttgtggtttggactatcactaaataattaaactatcacaaatacaacaaagtttgagcaacacttgttaaaaataccataaggcttgaaaataaatatgaaaaaaaagtttcaagtttcaacaatacaataattagtgggtttaggttgggtcttcacatattggacctaaataaatataaaattagtatttttatagtatgtgatacggtgcggtttgaaccgcatattaacaattcaaatcgcaaaccgcactacaccacacagcttagaaaaaattcaaaccgcgatcgcatcgcaaagaatttcaaaccatatttttttgaggtgtggtgcggtttgagcggtttgataaacaccctagcacaaactgcttgcatcacaccacaacacaaaaaatataatttgaaattctttacagtacggttgcgatttgcagttttgaattttataatcgcagttcaaactgtactgtattatatattacaaaaatactaatttttacagtatgatttcttttattattttttgttaattttttattgttaacatattattataacttgattaatatatatgttatgatgttaaaagtttgataaaatattttttcttttgtaatcattgaaactttattagactaactttttaatttttattttaaagtttgataattattatagtgtaaactgttaaaccgtattgtaccgcaacacaccacatttttacagtgtgattttcgcgaaggtcttgtggtatagttgccgtttaagaaattataaaaatcgcatcgtaccgcaacacaccacatttttgcaatgtgaattttgccaagttcttatggtacggttaaaaccacatatgcagtttggtttgaaaaataacttgaacttacatagcgaacatcctaattataagatatcggtagtacttaacactatctagatgacgatttctaaataattaatgatataattattaaattaaattatagttagcgatataataattattaaattaaattaacaatatttaattacaccaatcactattttctaaattaatttcactcttagaataacatggaaacatcaactaacatcccaatttatatgttcatataatagtgattagtgactgaatttctccataaggaaaagaatagaatcactaagaaaaagtacaatatgttagaatcttaaaatattgataattttggcaataagcattttttttaatgattatgttctttttatcttttagtaagtttgactccaccacctatcttgtgatatgtactaaaaagaaggtaaataatatatgaagagatttgtatagatgtaaactttattctaaaacaaaatatcatgtattacaatgtaaatgtatagattaataatgcttattgtgtctaacaaaatatttccatatatgtaccacacatatatgtatacataaaaacaaagtaaaattgcccaaaatcatacttttgaagaaaaagcattatctacaacttccccactcacctcactaattaaagcctttaaatttttatgagaagagccacctaccataatagcttccttagccaaatccttccattttttggaattccttctaatttcctccccattttccaccccattttccttccctcccaatcccataaccaactccaaacacctcttaatctctcctccctcaacaattccttcctcgttaggtttcactctcgctccaactttccatacattctcgatcaacttagcattcgtcgtctgatctacccactgaggaaacgccaccatcggaaccccactaaccaagccctccaaagtcgagttccaaccacaatgagtcacgaaacacccgatcgactcgttactcaaaacctcgatttgagaacaccaaggaactatcattccaagcttttccaactcttctctacaactcaattcctcatcattgtcgttttccactatttcattgtcgtttttcactttcttttctctaataacccaaataaaaggaaaaccaaagcccaacaaccctttaccaattggggtaagttgagaaatgcctcttttattaatcaattaactaaatttgcctctaattttatatttatttgaaacatac

SEQ ID NO: 308244 - DNA, 2113 bp, Cannabis indica
ttatttatttattattatatattttaattttaatttattattatatattttttatttaatttaagttttttttctaaaaggaaataaataaaatagtccagtccattcttaaaccaatcacaggattactttcagcataatccaatcttgtccagtccagtccaatccagtccaatcctgcgtaccaaacgggcccataattcttatgtgtgttctgtttaacacactaataaaattgaacgaaaattaaagttacaaataatagatatttatgctattaaaacaattatagaatctatgtcgcttataatctcgaaagtttaagtatttatgctgttatgaaccattaaataaataagaaaaatattgcaacatggtcgatatgtccgagtggttaaggagacagacttgaaatctgttgggcttcgcccgcgcaggttcgaaccctgctgtcgacgtttataaagaatttttgaagcgatttttcccttttcatttttttataagtgaagtttttttcctttcttaatccactaacgataatgataatacaaacgacagtaagatgatttgaaaagctagaaacgacaataaaatggctacaatcttcttggtcaatccttcctggcatggaaacaaactgactgaagaacatcgaaatggtaaattaacaggccaatggttgaatataataacagatataatttactaataaattgggcacatatatagggacttagaaaaaatccctgactttgttgtcgttttatataatagcacctagtttacagctagtatcgaccatatcctctttgcgcagctcaaattttctaattctgagccaaatacagtcaatcatttaaaatacgtacgcattaatgtatttgtatacacataccattcaatgttctcaagataaacattctcatcagccgcaaagaaaataaattaacagtataaaataataataataataataatcagctttgggggaatcaaatatcaagtatgtacatatgcccaaatttagtatgtatttatagcatagtgaggaggagtactataaatggacataaactacagtactactcgtcaataatcgtcatcatcaataatatcacttcacttggatgcatgtcctccaagattttgagtttattattaggcagtactctatatctagctacctcttatcctttgctgctgtctgctataaatctatatatttatatatatatagggacatgattttgtcctgtcattgtactttcacggaatgtgttccgtgatgtacgacaaccgtgagatgagatgagacatttatttgatctgaggattgagattgatctagggttaaaaaataataacgtaccctgacacccatctaatgtaccacctatctaatgtaccacgaaatacattccgtgaaagtacatcacgtgacaaaattatccctatatataaaaatattaagtgtgggtacttaatccgttaaaatttatgggttataattatctttcttatttttaacaattatgtttaaaaaagtattaatatcaaactccattactaaaagggagctaatacaataggtattgtaatttttacctatcaatagggatagtaatttatagcctttgatttaatccaatggctcaaatcaactcttgaaaactacaccaaaattaatatattttttatttatatttaatcttgaatattattaattacaagttcgactaacaaactccaaacctaactccaaacttttttttttacttatttatcttatgactagttataattttcaattaattatttttttttaatttgaaatttatatatttatttttaattaattttattttctacttaacacaataattgtagctagaaaagtacaaaatattcaagttatttaatcctaccataatcctacctctctcaacatttgtcttaatgggggccctgttggcaagattaccccctcatgcggcctcaggcaaggtgaccccttatctccctatctctttatctgggcggccgaaattctatctaggattctggaaaacgcccaaaatttggggattattaaggggatcaggctgagtag

SEQ ID NO: 308245 - DNA, 1377 bp, Cannabis indica
atatatttctctcttcattatatgattagcaatgagagaggagaaccgcacttcatattttacaagtggacacgagaaaagaattatgttgtagtttggacaaataaaaggactgtcaaaatttaatttttttgcttgttggaaaaacaagtaaatgtcaacttgactctgtcttgctaggtttgctcaaaaagattttacacttcgctttatatatatatatatatatatatatatattatataatatatatttttggagggctgaagctgatctacatatacatttgtcagatggagatttgaatttaaagcatggaaggaatgtaatatcttttttccagctgtttgattaaagatggaaaaccctgattcgataatgcatcaaacatcttttgtttgatcctcttctctgtttcctttttgtaaaaaggctgtttggagatcaaacaaatgttcagtgttctaataaatgagttaatggacaatttttacatagcaaacaaaaaggttcattattacactcacacaggatactcctacacataaataacagcccttaattatcatacttgcaagttgcaacttgcaacaatatgaacatcaattgcaattctttaaagtaaataggtgaaactggaatctacagtcaaggcggcagcaatgattggaaggtgatattgctcatcttacaaacgttacatacctaaattctctacttgctaactatacacacaaaatttaaaattgtacacgtggtggtttagttcgatcgttctaactaagcaaaaggaaataggtaagagaaatggctcatataatctgtagattatattctataaggacatgttaaatgtcaaggagaggaaaataaatggagggcaaaagagacaacggggttagaattgtcttgaagttgtactggctgtcccggaagcctccacatctcaactgattgaatatatacatggatgagggaagtaggaacgaagatggtccaaaaacttgcaccaaccttttctgatctcaagttggtgagctgtgggtagatagatagagagcacaaaagagaaatgacaatgcaaaaagccaaaattatatatttgtgtggtcccaaaaaatcgactcctacataaaacagaagggtttaactccgtaactcaactatgaagcatcctgcggaactaatacatacatcaatgcaatattgtacaaaaataaagagttctgtcttgaagagtgttgtgacaatttttttttttctttataaaaaaaagtacgcatttatatatatggttaactatttgatggttatattttgattgtaaccattatggttacatttttttttgacttgtaatagcagtttactaatagg

SEQ ID NO: 308246 - DNA, 2494 bp, Cannabis indica
tttttaatatattagatcccagcaccgacttcgggtcggggtcgggatcggattcaagtccgggtgttgattcctaaatccaggtcggcgattagggttgatttaggatcttttgttaatattataatacaagctaatactaactatttattatgtattaaataatacaacttacattatattaaaagtttttgtcataataattaatacaatatattactttatttattatttattatttaataaaatatcacatttatacatttttttttttttactttccttcattagttagttgattataagatgcaaaaattgtagtgaccaattaaaaatcaataagtgacatgcacatttgattcaacttttacaattttttttttttaacaaattcaacttttacattttgtttcaatgcacaaatataaattttgatgtaaaaaaaaaattattgtgttcatttaatatttatcgaaaatataataataaaaaaataagaatgtttatttaacactgaatgcatatacttaaaataataacaatataattaaaatgatataacagtaaatttaaaaaataagtaattaattaatgttactccatatatacatcgtgttatatattttgctaaaattctacaattttgagtatctattaaatttggtacaacttttattacgagcaaattttttgtaagatgaactattttagtaatacatcacaactttgcatcaacaataggatatgctctaaaaccatccctaataggtagtgtaaagtttgtaccaaatttagttgaaagataagtcaatactatatttgacctaactttcataatgatagtctaatagacattgttatttgtattttcgttagcatgacacgtggaagttaattaggaaaaagtcaagaaatcattaaggttgtctaagtgcctcgctctgcgctccgggagggtgagagccagggccggctttgagggtaggcaggctaggcgtgcacctcaggcccccgaacgctcagggccccaaaattgtaaaaaaaaaaatattaacatatagattaaattttaaataagaagaaaatatacgaaaagttttttggtgtagtggtaaaaggtttaatttctctctaagaggtcatgggatcaattcccgacctatacattttaatttttttaaaaaatatctaatatgtacttatgagggattgaaccttggagctcttaagagtttttaaaagttttaccattaaactaagcactagaactatagttcttataatagttaaattatatatatagaggctccaaaatttgatttctccttaggccccatatatcttaggaccggccctggtgagagccctaatcttgcggaacaggttccctcaaggtaagtcttcctagatgcgggccacaagaaagacgcctgtgagcgagcgactcactctactctagaagccaggaccctatgctccagaagggaacatgggtcttcaaccaagatataccggtccggggtacgcctttaacccgtggaagctcagcccatgcgtgacaggctacggacccaatggtagagctctttttggtatggtgtcagaggttgtctcccacgacacgctaccatgcagagcatgtgtgtctttatgtactgtgcaaaacaatccaacggctaagagtaagggtagcttaaatgagaacggccctggagcgacacgtccaaagcaccgccagtataaccagtacaacatgacatcggtaaagaccacatagaaattatgtcacctaccaatccaacggtgaaggtccatcccgatgatgatccatcaaaagtggtccatgcgaggggatcggcctataaatacctccaaagatgcacaaggcaatggattcggattctgaggcttgacttcactttccatccttcggctcttcaccttgaaaccaaaaactaattctttgtaaaaatattttattgtaactccattatcaactccagaatattcctactaagttttctcttcttcgagaggaacacggtggattagggtaaaagtctatcctttttgtatttgtataaacaaccaccagtcaatgaccctaataaaatagacttgtgaactaaagatagttaacgcctgaaccacgtaaaaatctcttgtttgttattttattatccgtatcttcattactttcttaagctctaaaaatctttggtttccaaaaaactcgataaacagatatgatgcaaattaatttaaaaagttaataaatatatttaatttagggatattggcggcaaaaccaccttaactttacggtttataacacttaaccacaaaaatcgaatttttggcggctaaactacctaaaccctggttctgttttgctctgcacacttccgtcaaaaattcacaattaagtgccacagtggactgtctacgtgcacacacttgtacacgtggcaagtttttagtggtccacgtaata

SEQ ID NO: 308247 - DNA, 1148 bp, Cannabis indica
tattttgtactctgttttgctgcttaggtcagctagagaaaacgaacttgtaataacattttataaaatactttcgggatcccgacacttgtatcttttattttataaaagtgaaaggtattacaagtttattttcattccgtttattaattaatgtttaattttcgtgctaatcttattagtaatcccaattaggggattagggtttcataagtatattgggtaacgtgcctaattatttacggtgttacaaatggtcatgcaaaaagaattgtgatggaaagactagacagaggcctttgcaacaaggattggagccattcttttcctaaggctactattaaggttcttgattggagtaattctgatcatagagccttagtagtggactgtggtgtcaatgttaatggtaataattgtggtgagaggaagaggaactcgaggttccatttcgaggaagcctggtgtgaggatgatgagtataaaaatatagtgacaactacttagagctctgaaacttccgatggtttggctgaagatctgagaattaagcttagtagatgtggttacagcctccatagttcgaataaaaagaagaaaaaagaattgaagaaagagatgaataacgccagagagaagttgaagaagcttacaaagctaaatgatctgaatatgtggcaggatattaaaaaagaagagaagagactgaatggtctgcttgagaaggatgaaagatactgaaagcaaagaagtagagcagattggcttaagtggggggataagaatacaaaatattttcaacataaggcctcgaatagaagaaaaaaaatgagattttggggctgcaagacagtgtgggagtttggaaaaatgatgagacggtggtggagcgaattgtggaaaactattttaaaaacctcttctcctccaagaagccaagcatggacattatcgaggtagtgatagaggcgatatgtaaagaccgcatatgataaataccatgtattattaaataactaaggtttatgtatgagattaattaataattatgaaatgcatattttgaaaatatatttaatgtgtcatatatgttgttatgttattttatctctaattacccaatttctgtgtttgtgttcggaagcggt

SEQ ID NO: 308248 - DNA, 1302 bp, Cannabis indica
tttttctatttttgttccatcttactggaattaattattgttttctggtgttctcgtattgctgagtagttctgtctgtgggtatggaagatagagactgggtatgtgattttcagcatctacagtataaaagaaaaagaatgcaaagacagtataaatgtaatttttgccgtgtgacagtataaatgtaaacatttactaaaaatacaatattttttacatcattaacaataaaaagaacagatttactcaatctcctatttttaactatttgtaatatgtaataaactgtattctttacatcattaacaataaaaagaacagatttagaatagttagtaagaacccaattattcttattgaccgaaagacaatacactactgctgtcaacacagctatgttaatcaacttcacaaataatcaacttctccaaccaatgatatctagaggccatgctttcaaagtacaatcgaaataaaagtgcttgtgagattcagaagcattaccacacactggataagctaaagactctagctcaacatgaaattgtaccattttgtctcgggtaagaagttgagaattcgccacttgccagaggatgaaacggtgcttatacaaattcagggagctctaaatagctttgtagcaactgaactgctgttgagctaaagagctattgtataacaagttagttttgaaaatgctgataattccacagtcttctactttctatttggtaggtcttaaaggcactcccaaatacttgagaggaaaaatgccttcaataattgaaagtcactcagaatagcttacttctcatttaatttaacacctccaaaataaatctgagacttgcgagtattgatgaagagacctgtagtagagctgaattcatcaagaatgcccttaagaaccagaactaactcctttgaacctttgctaaacaaaattaaatcatctaagtaaaagttaaggagttttaaccctttacacataaggtgaaacttgtagggagattgatagtagggctgtacataaacttttgtaaaccgcccaaattaaataatctgtccaaaccaaactaagataacctgacgaaatatataaaccaaaaaactcgacgagaatataacgcgcccaatctttatattggacgggttaaaaataataccaacccgctgaatcaactcgaactaacccgaacaacctgattaagtagggttttttttttttttttattatatatttgtaaattttttatatatatatatttacatatcatataatttatatgattattt

SEQ ID NO: 308249 - DNA, 1659 bp, Cannabis indica
agagtgtgagagttaggtgaatttgaatggagggtatttgggggttaagtaaaattgagatgtatttaaagaatgttttgtaaagtaaaatattaagagtacctaaacccactttaagaatgaattgtcaaatttcccttttattaataaaataataatgagaaaggtattctaaacaatatatttagcttactcgaatatataaatagcttcatcataaaatagaaaagtgaaaaccatgttaacaaaccagaattatacagacagagaaatgtgttcttcactaatctaaattaaaagctcaaaagtatatatctttttcacatggcacttggatattatatgtcatgtgtccactaaacacctccatctaaagtgaatttttaaacccaaactttcgaaaagaataactaaccccaccaaatgggatgaaattaatggaatgtattatttatcgtattcgtaaagtttaattttaatttgaccacaaaaggatatcaggttaaaaatcgtcatcacacccacaaacatttcaagaatcaaataatcagaatcgtataactgcacaaatatggtttagtcaaaagtattccattaaaatgactatttcacacataatacaaactaaaagaaaagtatattaatttcttgattaagtaccattctttttaactgaaggaggccaagacaatctcctgtggtcagtctgattcaagtcccctggaatgttgtttccatcttctactttttgttgctcaacttcatgcctcctagaacttcttatggctaagtcatcaaaacttggttcggttctccatggaggtggagtcacacagtcggtattcccagaaactctttgggaaggatccttggcaggtgtcacaggcacagatgaagctgaatgacccaccctcagattctgaagtgttgaaaacgattctctcattgcagacattgcttcaaagaaccgagtgcacgatgctaatgcaacaggaattggacgaagcatttcctacaatgattaaacaaaatgaggccaaatgacatcgcatacaaattcttattgcttactttgatagacttataacaatgaatttgactcagtacactgtgccatgaagtctacacaacatgagcattatatatagattacaatgtaacacaaattgcgtgtacttttcagagatcagatgtaatatttaacaaaggcaaactaacgtttatgtaccagagatgctagtctatgaactatagatttttagaaagaaagaaattcttctataagcataccccccatactgaaggtggctccttaaaagtttgactccattgaaaatctgctactgatgcagtcaaggccccataatcacttgcagccttcatcaataattcggaaaattgtttctgcacaacccaaacaaaatatgtcacaagattatagttttattgaacttgaatgccactctcatactactagagcaaatgaaaccaaaacaattagcatctctgagtaaattaaaaacaatctgcactccaacttttaaatttaaattatactttcatgagaatatgaatgaccaacctgatactcagcctctactgggatgcaatctagtggaatatggttgttgaagacgagcaatgatgcgatcctgccaa

SEQ ID NO: 308250 - DNA, 2573 bp, Cannabis indica
tgaactatttgaagactagaccacatatataggtgagaaacttattattagatttttttcctatgattttggctgtaaaactagatatgatgtgcataccagaatttacaatgtctttcctttagggaattagtcaagtaggtgaagattggttgggttgttaagcaagcctaatacttacatattattctttgttcagcaataaaatttcctcttacttaccaaatatatagagatatatatgtaaatatattttcttacttgaatttattggagagaaagtcctcaaacccacgaccaattctcatgacaggatcaaagcaattttgttcaggttgcagtagtttggcaaagctttcatcttcctcgctctcgctttcggtcttctcactataatatttattcaattttataatttatgaataattattataatgtaaattaataaataaaacataataccattaccttgcttcactaattaatataatatcaatcaattacgtaccttatattaatcactagtttcttcttgacgacgcattcataattggccaactgggagtttaattctttagccattatattattcgatatgtacgttttactaatttgttttctgtaaattcaagccagcgatattgttattattacataagatacattaaataaatatatacatatacacatatatacacatatattatacatggactatagttgaatcagagaaagagaaaaggtaataataattagtagtgcatagattaactaacccttctgaataataatcgatataataatttatttcttaagtatatgagtcgaatagcttgattatatatataaatatatagatagagtttgttttttcttttgaatacatatatatatatatagatatagtttgggattgcaacaatacaagaataattatgaataactgagaagagagatatatatttgaggtcacgtaatctcttataagccaaaccttttcctctctcgttattatcataattcagacatattaattaacggaatttaataatatgaaatggaggacgcgtgcacttggtttttgtttttatatatcttcatatagatatacgtactttctttattgacaaccattcttagggcaatagtggtgtttggtcacttcttgatatgttatattgtaattggttagtgatactctctaaaaattattacattaaattatatgaaacttgatatttaatcgaaccaatggcgatattaatacatagaaaagtgatatgcaccaatagtgtctattaagagcagacagttgtacagtttttattttattagttatctaatactaattacttttttgttagttagttagttagctttcagttacatctaatcttgttttagttgctgtaactcttgtatatattgtacaactgtattcataatgaaacttaagctctctcgtgatatctttcatctttttctttttctctcttttctcttttttctttgtttttagccttttctcattgttctttgttgtttttcatactcgagcttcaatgtcaaggagattcaactctcctaatatggtatcaaagttgtggcctccattggtggcaaacatggcgcactctggtcctgaaacagctgcacatggtggatcagctgctaacaatgtcaatggtggaaattagctcaacaatcgaaattgaaagaatagagaaccaaatgagaaatcaactgtgtactttaatcactcgatttcaataaagcttaatgatcacaactttcttctttggtaacatcaggttctagctgccatttgtggaaatcgattgctgaaattcatccaaaatgttactcctcctccacaatttctcaatgatgcagatcaaactaatggcgtgttcaatcctgcttttgtggaatgggatgtccaagatcagcttctcgtttcatgacttctctaatctatgatagaaagtatgctaacaagaatggtacaaggcgcaacacagccagacagatttggaatttcttggaaaaatacttcactctttgagtgtcatctaagattctggagtttcctactaaactccaaaatcctcaaaagggttctatttccttgaatgagtatctgttaaaggttaaacataatgtggatcttctagctagtgttagaaacactaaacgatcgtgatcatatctctgctatcttcaaaggcctctctagtgagcatgacatgttcataatcactactacaaatataacattttgcgtcggttatgacatcaaaaaaattacataactgacgcaaatgatcagtggtccaatttagcgtcggttatgggcagacacaggtttagcgtcgattataagagaattagcatgagttgtgcaccgaccaaacttcctaaattaaaaaaaatagacatagtaataacgggctttgggcccatttaagaaaaccctaaccctaaagatttaatactcacatcaccccagccccctcccccatttctaacattctttctttctctctcaaccctcgttctctctctttattttt

SEQ ID NO: 308251 - DNA, 701 bp, Cannabis indica
aacaggtcatactattaggacacagtgattcttacacaagagacaaacaaatgcaagtgaccattgcttacaatcattttggtgagggacttatccagagaatgccaaggtaaataaacttaatctaaatctaatttaaccaaagttttattttatgtgacttattttgatgaaattattaatggggaccaaatttattgttgtttgcagatgtagacacgggtatttccacgtggtaaacaatgactacacacattgggagatgtatgctattggtggtagtgctaaccccaccattaacagccaaggcaacagatatcttgcccctgttaacccttttgccaaggaggtatacatagttataattattactttacaagtgttgaattaatgtaagcagttttaatggatttgatttggttttgaacaggttacaaagagagttgatacagacactggttcatggaagcattggaattggagatcagaaggagatctattattgaatggagcttatttcactccatcaggagctggagctgcttccagctatgccagagcctcaagtttaggggctaagtcctcttccttgattccctcacttacttctggtgctggtgttcttaactgccgtactggagtacaatgttaattttaatttcgtaaaaaaaaaaaacagtaaaaaaaatcaaaaaaaaaaa

SEQ ID NO: 308252 - DNA, 2872 bp, Cannabis indica
ttttagtagttgccgaaaatctcggtcaacactacgttatattaattttcagtaatatgatatatcaaataccatgtaatactaaaaaaattatacaacttagttttattattatatatatatattttaataaaaaatatgtgataaatatatttttataatttttattagctaatttatcatatttggtcatttttttataatttttttttttaaaagagaacatttactaatttagtttctaaatttaagatcatttagcatctcaatcctaattcatatgtgtaattgcaatttcacacatctttgccaagtactaattagtagtagtcaaaaataaatagaatgttaagcaaaaataactagaataatattgagcaaagtaatttttttttttgggttaatactattttgaattttttattttgcaaaagttactgatttgactatttattttgttaaatgataaaaatgatattttatttttttaaaaataatataaataggactataaacacaatttttcgattatttttttgataactaactggaagataatttttggcacaaaaagatgtagaagatgtaattagctttgtcataacacatctacataggattattattaaattttattctaataaaaaatcagtttagactactatttagtactattttagaatgtaaagagtccattttgtcattttaccaaatagaggatctgattggtaaattttatgggatattggcggtaaaactacctaaactttatgatttgtaacacttaaccccataaactcatttttttgatggcaaaacctactgaacctcgattctgtttttgtatttacatttccatccaaaaagtttaagttaagtgacacgatgggctacctatgtgtacacaattctacacataaaaatttttagtggtccatgtaatattaattatcaaaatattataaataataatttaaacatttttttttctcttttcatttttccttttcttatatttctttttctttgttttttcatgaaaccctaatcctatttacccaaacctatcttccttcttcttcactattattaccgccaccacagtcactaccaccaaggccagtaccaactttaccaccacagtcaccaccgccacactagaactaacctaaaatcacaaacaaacaaaaaattaccaccacaaatcacaacaaccaccaccacgaccttcacctaaatccaaaattataatcaaaatataaaataacaagtaacatcaccattatctccatagaaaactagtaaaatgtcgtagacccttggggtttggggtttcatctctcgggagatctgtggtggctttcattttggccaatcaccaccaaaggtggctcatcggcgtgggcaatatagacacatcacaggaggcagagagagagagaggggatcgcggttgggattttctaagtcgcagggttcaatttcgtggctcgtggcctagagtggtcagagaagagtgtgcgtataaagagattagaatttttttttttcttttttttttgttgttcagatagtctttcaaaagaagaagaaaataaaaaacaaacgaacaaatattttttatttttatattttttaaaattattttttataatattttaataattaatattgtgtacatcattaaaattttcgtacttaatacttaggcacttcaccatagcatttaattaagagtttttttaaaaaatataaatagcaagacagaatggagagttaatagtttaaatagttttactgttaatatctaaattttacaaaatatagaatttaaaataaaatgatatttatcttttttttttaatttttactatagatattttttgagtttgaaggtgggggctactttacggtcgagatgcgtgataacaacgacgtttccttgttatttaggtaaaagctaatggagctttcacaactctacaactgtattctgaactttctctccttacattttgtttttttagtttttttcaggataataataataaaaaagatttactctcagagactcgtataaattcttttgtgacctcaactcaaaaataaataaataaataaattatttcgtgacctattaaataatattttcccattttcatttcacacgtgtggaccttcagtcattttatatgtgtaaataattgactacattttcattaaaatatatatagctactaatttaattaaatataaattttatataatttaatattataatttttaaaaaatattactaaccaattatacactcacatatctagcatctagtggtatccaatgctctatacacatatatactcaatgctctatacaacatatacactcgtacaactagaggtactaatactgttgaccttagatatgaattgtcataatagattttacctattaaagtttggtgcggtactttaacatagattgtaacaaaagtaagttctacttgtgtatgatcaaatagtctaaaaggtaaattatgagtaaaagcattgtgaaactaacaatcatgaaccttgaaaactacaaaacttaatttacttttatttatgaatttgattattgaaatagtgacatagccaccgtgtaaaagctggctaagaagaaaacacaaacattttcattttcacatcaaaagttatatgaaaccaaagaaaacgaatatattaggacgaagacatagatcatgcctcacctcagtatgtgtatatccatactagtacaaaaaagaaaaaaaagaatagaagaagaatcttatagaatgaaaagtaaattgaagcagtagtcatgaggttacattcaataacgaatgtcg

SEQ ID NO: 308253 - DNA, 2158 bp, Cannabis indica
aaatctcgacgataattttttttagtcttatgaatgcttgtaagctttattagaattagggtaagaataaagtagaattttcgatgatatctataaacctaattaaagttaagaatatgtagatatttcgagcctaatcaatattttcatttctcgagtttaatggatgcttataagtattacatgaaaagatatagagattaattagtaaattgttagtattacctagttagtataaatatgtaaaaccatttcagataatgaataaaaattagaaatattcctataagaatttagcactgactcgaagatttcgttcaaatatttattatattgtcggttttcttttgaaaatgcttcatgtagtgtttatatttttgtaaatttgatatttgaatgtgaaaaacttatctcttgaggatttatatagtctttttttttttattaataaaatgtgacatattttgttttattttgttaagtagtttgatatggatacaaaaatggagcaaagaacatcatcatcaccaaataacaaggaaatgagtataaataaatacaaattaaacttaccagaaatcaatttagaagatttcaaaaaacatactcacatacttgtggtgtcaccaagagcaagaactccttcagtcactaaatcctctagcacaaggtcaaattgcctctgctcccccaccacacatgtcggctcattccgttgtcgtcaccaccgctctttaggtatgctgcgcggtggctcggttggctctaacctcgccgatttgggtcgtaaatcgagctctatagatgactagaagaagaaaaagaagaagagagtttccatgcataatataatgcatgtggagaaaaatgactatgttttgattaaatttaaattaaatattttttttatatatattattattattgattattatgtatgtatgaatgttaagtattagggggtgaagaacaattatatggttcttcttatagtgattattattctcataaatttataattatttcttggtcttaattaatcaatgattgtgattatagagtattcatcacaagttaattaatcttgaaagaatattatttatcattttatggtttattctattaataattttctagatattaataatttcctcgtagtgtttaagtaataataagaaggaaaaaataagaaaaaagtataaagtaattccaattatatgaatctaatattaatcaaaatagtcaaaaccgccacacttttaagaattgaacatttatgtattgttctatggattttctaattagtctattgtaattatttggaaaaatcaaattttttgtttgttatatatatatatatttataattatatataccttatttaagtattttctaataaaaattttagaaaattaaaataatttataataaaaaattcaatattttaacccggctatttcacacaggtatataataaaaaaagtcacacatatacaattaaatttttaaattttattttcgacattttaaattttttaagattttaccgaatgtcttaaataattacaacatatacaatcataaaaaaattgagattaattttttttagataaaaaattatattatttgttatagaaataccaatattcaacctcaaattaattagaccgaagcacaatttttcattattttttacaaacccaaacacaaattttttaactaatatatataattattaaaaagtatcgttgattttttttcctaattaatattaaggtaaaaagtaacccaaacactaaatttatagctaagatatgaataaaattattaaaaattaattagaacaaaaaaaattattttaaaaggaaaaaacgccgttgccggggatcgaacccgggtcacccgcgtgacaggcgggaatacttaccactatactacaacgaccttgttgatactaaattatagattaattattaattacttactaataagccagtttattaaaacaactaaccaagctcattatagacatgggccgggctgggctacaagtattactccatttacggcccaatcaaataatcagaagaaaaggatggtgtaaaacggcatcgtattttgcgtctctgggttgtgaaaacgatcaccgtcttcttct

SEQ ID NO: 308254 - DNA, 1267 bp, Cannabis indica
cattactctttgtatagacaaagtctttgacactattttgctaattttaatctaaattaaattacaaaacatttaagtaataacaaaaattaaaaaaaaaaaaaaaaccaaatttataagaataatgaagtgaagttttttttttgggacatacatcaaattgatagtgtctttgtaatggcaaatgcagatttagaaataggccaaaatagtgatgatgaaaaagaaaagattgtaaagaacacccatttttgctataaatcttttgttgtagttgaaatttgtagtagtgtgtgaatgtttattaaaggcaatattgaatggtatatatatatatagacattggttgtagttgatatatattaggtacaatttgaatgtatatagtttttcatttgaataagatcagttgttagaaagaacaaactatagaagagtggtgtcaaagacaatcaaattcgtttgaccccataatttgattaaggataatataaaatttactagagataactatatcttaggtgtataaattaaattcttattaaggaagatttttaatgtgtcattttccacatgcaaaattctcaacagttaatctttgtgacaaagctaattaaaccttgaatcgctatctaccatgtccttttattgtcggatggaggttatataaatactattattatatatatatgtatatatatatttttattatataataaagaaatataatgaaaattgaatagaaggggaaacctcaagtaaagcaacttcatctcaagcaagtacagaagagaacagatcacactgatgtttacattttttttgatataacaatgacagacttcatggtatgaaattacttgaattaattcattttatattataatcttagttcttatgtataccaacaaaaataaatttattattattattattatatgctaattaataagtagctcaatattttatattgaattattttttgaagggaaaaaaatgaataaaggaattatatgtagaaaatataatatatggggagtttgtggggttcttttacggctaagttactatacgtatataagtattttgcttttgttccaagaagaagaccagagagatttcgacgcaccacctcaattcattatatacattttaatatacttaattctcctatactatttatatatacatgtatattattataaaataatataaaatagatgagaagaaagaaaaagaagatgaagagagaaagagaaagtgaatg

SEQ ID NO: 308255 - DNA, 1752 bp, Cannabis indica
ataattgatacatacctcattcttatcattgtaattcctggagtagtaattagtaggttgcatgcataatcgttggtctgaattagtagtagtactacaatcaatgtcctcaacaaccaaaatagatctattacttgtggagagcaagaggttcctaagattagaatctttacgaatggtagaaagttgcaaatcataaatatcaaactttaaataattagccatagcagcaatcaaacttgattttccagtaccaggaggcccataaagcaagtacccacgtttccaagccttaccaacactcttgtagaattcttttctatccaaaaacctctccaaatcaagaattaattcctccttaactccctcatccatagccaatgtttgaaaagtagatggatggtcaaaatcaataccaagccatggattcccgtctgtgtaatggtaatcatcatgtaatttataaaaaaagttgcacaacttttctttcttcatttatggctttggctttttctaatacgtacgaaaggtaccctccaactccaaccacattctctaaatacttctttttaaaactaagcttaaatgttctattcataattgctttactagaaccgtttttaagtggactagttgaagttgttgctataaattcccacaccaccacaattgatccattgaacacatctcttattttttcaccattttccaaagtgagtgacatcatgttcttttctgatccctttgtagtacgcttgaagttggtgttcatgaaaactttgaggttttgacacgatgagggtgtgattattgtgcttaaatatgtggctgaggccttgtatatttcattacccaaataatcatcaaattcatcgatgcttaaggttgtcaccccaaacccaatattcaccaaactattcactatccaaagtattctctccctcacttgtttgggtataaattgctcacttatgcgtttgatctcatacaaaactgtttgaactactattataatcgtagtaatgctggtcaataaagaccatacatccttcgttgaccgaaccatgatcgatatatgaaaccctagacagaaagaaactcaaaggtattgtgtgatgattttcaaagctaggttaactatttgtaggatgttgcgtattaaattaattattagattttattatgatgttttttgtgacttaaaaaaattgattttatcctcgctaatataaaaatatcctagacatttaattgtttaatttgattttatttaaaaataataaagtttgatattattatttagaagaaaaataactcaaaatagagcactatatatattctctttttaatttttcttatttttttaaaaaaatttattcagtatataaatagtaattaattaattaaaaaaaatctataattattttttaatgttagttatctatactgaactctacctttataaatatctaatataacaaaacccattcaacttctttctcaatttttccatttattttcttatttttctaattttattattatttaaaataacgtatcattattgatttataagaatctacaacaactttattttattttatataaaaaatagtggccaatggccatttaacatagtcttttttattaaccaaaggagaattctctctttttttattaaccaaagtagaatctattaaaggacaaaaatttaaaaaagaaaaacaaaaaagactcaatacaaaataagtc

SEQ ID NO: 308256 - DNA, 1508 bp, Cannabis indica
ttttggcacaccattggagcacattttttattaaatgagctatattttagcttttcaccacttatttactcctccattagagatgctcttatatatactagaatttttttttttttggaattatgtgagtaattaataaactcacatatatatatttttttattatcccatacatactcaaataaattttatattatatatagttccttttaaaaaaaaacatgaataatatatataattttgtaaaatcatatatgtattattttgttcccctaaggtagaccataatactaattatatgttatatgtacgtatttaattaattattattagcaataattttgatcaccaaactaattgatccctctacggcatgaatagctgtcgattatgaattattatcattaattttgttcgaatccctaactttgttgacaatacgcctaataaagagactaaattttaactaaaaaatagccacaagttttcacacttattctatcttattataagaggcttatgaacttttattttttaataaagaagagatagcatagaaactaactaaccaaaaccaagtttgttaacaacagaagttgttaactgtaaaatagtataatttggatctaaattctaattaatttatgagatttaaataataaaatcaaagattaacggaaacgtaccggagtccataaaattaattttggaatggtatgattttctaattttcgcatcaaaacttttctctgaaaccttagtctcttggtgatggaaatacaaagagagaatgacacgatatgaagctatgcgaaaatggagactaatacctgtttattaataattaaaaataataattaatcatttttgactatttcaaatttgtcccctgatcatcaaattaaaaattgtctttatggtatatctacatattaaaataataacaattatatccttaagtcataaatttaacttatttagttaattaccaaacatatattttgtatatacaattgtgatcctgaaaaaaattctaacattaactcccaaaaagaaagagaagtactaaagtttgtttgcctgcccacactgctaaggcatcaacaacaacatttaaggctctaaaaatccaacaaatattacaattaaaaaaaaatctaaatcttcacacaacgtaagccatgaaccagcaacatgccaagaaggccaccatgtatattgaggaggcatcacacaactccttgcaatttgaaacaaaaactaaattgagccactccatttcacaggccaaggaggtaaccagaaggccaggtctcaccttagattccaaagaggtagtagccataaacacctctgtcttgatcgcaaggataacccccgagctataataggccaccacacccacaacaccaacatagttaataagagaaccatcaaagaacaccctcacttggggattcaggttcaaaattatgttctctctgttgcgatatttagcacacgcaagt

SEQ ID NO: 308257 - DNA, 1824 bp, Cannabis indica
gcagcatgctgaaaaaggtaaaagttcattagaacaatgtctatgttcaaattacaacaatatttaaaaaacttgaccaacaaaatatctataagaaattatatttcatactcaaacatcttgatctagcaggaaactaatataagtcctatatgttgatggcaattacctgatcgacaataaatagatcttgatctaacttcccaatgatgaatccaaggttgaattgtccaattacctacaagaatgaccagtttgaataggcatgtaggtcttttaggaaaaatgtattctgaatgcagaaagttaagagccatcagatcagttagaaaacttctgccattttctatactttatagttgttttagatggcttcttctgccattttagctgaatttcaatgcacttcataatgggtatgacttgtgatgctttacaaaataaatattattatataccaggctatcactttccttctgtatataaaaacagttagggtacacggtggttcaattgacctatatattaacagagtagaagcctcgttaagacctgcatatttagctaaatccaagaatctacccagaatgcatcttaagcagagcaaaagacaaaacatgagatgactaataatatgaaaaatcctttgctcatataaaggttctgccatgcttcataaagcaacaagctttccacacaaatgaaaataaatacgtaaaaaagtaatcttgtcacctaatcaagcaactatgaacagcacaagtaggaagctatataatctgttaaacgatgcaaataacaaccttcatcctaccaaaatcctcctttctgaaaagtctttccagctctctagtagcttcaactaaatcttttgcctttctatcttcatttactggctgagaaagctctagtgtggcagcagcatagcacctatagttgatctgttagatgaattgccttacgagtaaagcaggctcaagtacttaacatttcaaaaataaataatattataaaccttttccccttcctttctttgattatctttactagagtgcaatagagacagcctccgctgcctcctgttctttaggtcttgcaaactaaattgcaaggtggaacatatctcaagaccagaagaacactttgaaacaaccaacagctgactagaagaatctaaaggagtttgaacagaaacaccttcatgcacattaatagagagatcctcactggatgcagcatttgatgagacattagcaacgggaactcctttctctttagcatcaatatcctgtaaatggatcaagctaacttaatcccccaaaataaaaataaaaactaattgattccaaaaaacaaatttaagcttaaataataagacaaaaacttattgttacctacaagcaatatttttatctcacacacacacacacaatacatcaaatttcaggatcatagaggtccttttcatatgtagtattaggattgaccaaattagagaaatataaacaggaaaaccaatacacttgggttgacaactcaagagtaaagcacccaaaaattacgtgtacaataattcaatgcatttgtctgaactctgaagacattattattctatatttccatacaagattgtgagcattttatccttcaaattgcctagtttctttctctgtactatacaaataaaatctttaatctcatgaactaaaattatagcaatgcaaaaccacttatatcacgtagatataaaaaaaagggtccatcagagaaaaaataattagatcaaaaaaaaaaaaaggatccccgcctaaccctacaatattt

SEQ ID NO: 308258 - DNA, 944 bp, Cannabis indica
aaaatacagggtctattttgtcatttaacaaaacacaaggtccaatctgtaacttttgcaaaacacagggtccaaaatggtattgtgatatagattatcgtaattgtgataaatttacatatgcatatcatattatatggcttcgttgctattatagtacagttgtgtaatgtttattttcacaaaattattctttcactctctttggattgggtttggaaagatatgcaatattaagggtctatttcacatattgggggccttaacatagcatccttttactatatgcaaaatatttggtctttttgttttagttctatttagatactggttaccaagcctttgacttttggtcttaagccttatttctgatgtgttcttcaaagatatggatgctgaaatttcttttttaatcatactaattgtaatttttttttatgaaaatggttttcagtagctcttcttttaattgtaaatagtttgatttctctacccaatttggttactttgattaaccatgcatttagccttgttgatcttctctttaccagaattagcatgattcaagatgtagaaaagaaaagtctaatcacactaagaaaggttagcataataatttttcatgtattgtattaaataatttctcttgattcatagatttctttttgacctgatgcaaaatgaacgtgtgtgtttgagtgatgttatttctcaagttgattgtcccaaacgttttgtaactgagagcttctttatcaattaaccaagaacatagttataaaggggaatatttattgttgtagtacggataacttataagcagattaatttatatatatatactaggtggaagttacgtgccgagccacgtattgttagtttcatttaaggttttgagtttttttttttttttagattttggtaactaaagtggtatgattatt

SEQ ID NO: 308259 - DNA, 1936 bp, Cannabis indica
gggcacaaaacccaacagtttcccattccaacttttgtttgtttttcttttaattttttaaatagtcgaaactctttcatcatacctctctatgatagacacttagtgcatttattgtggttttgttgtttccataagcatttaatgttgtatcagaagatatttagcttcagatggtatccctttcgtattctctctcagtccgccgtctttgaaggcatttgggggttatttgtgatcataacctcttctctcgagggatcatgccaggaaaacattaatgtggtgggagatttggcctctggttacttcttgcaaaagatcttacttctcaggtataatacttacgattctatatatattccctatttcttgcaagtaatctatgttttattcctctggttatgctttcttctgcttagttgtccatatcttccctattttcccctctatcttctccacaggttgttcttttgtttttgtttccatggctcatactgctaaagctcctctcatcaccttgctctcaacgatgaggaggccttacttcatgactttgatggggtctctttgaggtctaatcctatggaaaattcatgttgccttgtcgttaaaatccttacccaaaagtctctcaaacccgattggcttgacaaagctatgagggaggcttagacccttagatttcctgtcaatttcactgagtatcattcgggtcttttttttagcccattttgggtgtgatggagataggcgtagggttgtagaagggcagccttggcactttgaccattgccttatggtttttgctaatccagaaggcctgaatattcttcaacctgatcagctccggtttgttcctttctgggttcaaattcactctatccctttcgaatttaggtctccccaccttgctcaattcgtagctaaagatctaggagatcttattgagattcataaggcaactcttttggaaatctctggcccctttcttcgtattcgagttcttcttgacatcacaaaaccaattcgtaggggtatgcaagtcttttttagacagctaggtgctactaagtggcttaactttatgttcgaggggttacaaaactactgttatttttgtgggaattttgagcatggtttctctaagtgtgggaagttcctgaaatcttgatgaagggcgtatgcctccggctctcccttttaaggataacatcagagctttgcctaaatctttctttaaaagggacctgtttgatatgtcaaattccatccctttggaagaaatgaatctacgatcttctcaacacaatcaagacttgcaagaagttgttaatcagtttcttcctcctggaaacttctctgaaacccaaggtcaggtggatgttcaacctaggattgatattcctaacactacatcttccattttaacctcagtgggacaatctgttgtctcctccactccggtcagtaactttcaaagtcttctttgtgcagtttctcgagttatgatgtcagatgctcttgttattgttcatatggataaagaaaaaggggttcaactacctgcaacctcgattccaattacttctgtacctatttttcaaccaaggccccttactattggtggtaattcatgtactaagaggtcttatactcgtcaagatatgcccagtagcacttcggttaggagttttttgaagaaggcttgtgttggtgactctgatgttgttgttcctaatgttgaagaagatcatgttgtaccggcaggtgttgctgagcaaccccgtccagaaaaatgagttttatgtgtttgaatgctcgaggattggggagtcctcgggcattccgaaatctctccctactgattaagcatcataggccttgttttctttttgttatggaaactgttaattccatttttggcatatttaat

SEQ ID NO: 308260 - DNA, 2203 bp, Cannabis indica
tttcagttattcgattttgccgacaagtacaggggtaaatacgacagcagtataaccgtggcccaaaagtattaccggtccataagcggttactacgtaagtaacttttcagcccattaattgaatttgggttttccttaattgggcttttctaattgggccttttattgtataggatgagttgttgtgggccgctgcatggatgtaccaggccactaacaaccaatactacttgggataccttgctaagaatgctgaagccatgggaggaactggttggagcatgactgagtttggttgggatgttaagtatgctggggttcagacccttgtttccaaggtaatggttttttcaaaagtttataaaaataccattttttaccaaaacaaaaatggtacaggttactagttactctaaagaagcaattgttgtaactaaaatgttactgttttgtacagtttttaatgcaaggaaaggctggtaggtatgcaccagtgttcgagaagtaccaggaaaaagcagagtactttatgtgtggttgtatcggaaagggtagccggaatgttcagaagactcccgccggtctaatcttcaggcagagatggaataacttacagtttgtgacaagtgcttctttcctctccactgtctattctgactacctcacttcttccggtaaatatctcaagtgttcttccggcaatgtggctccctctcagcttctttccttcgcaaaatctcaggtaattaacttcaattgagctattgtaatttgtaatgtccttagtttgttacatcattgttttttcttcaatgtctacttatagatcaattaaataaattcattgaatcaaataatcttaattttggagaaatttttaacggttggattatcttttagtacatgttcttttgtttaaaaaatattttgttgtctatttaaaaaaaatgattgcctattaaatataactttgagaaatcttcaaaagctaagctagtattactgttaaactaacaagtaatgcaatcccacatagatatataagattaaatttgtattcaaatcttcttatataagtattgatattgttttaccataaacctatccgctattaaaatccctaataatgatgaatatgtttatgtaaataagttaatgtggataagttaatagataagttaatgtggataagttaatagataccttatttgttagctttggttgaagtatggtgaggattttgaattaataaaattagatttatagcgtgtttagttatgaactagagaataagaataaataatgaatttgaaataaacttgtttactccttctaatttttttacaagaaatgaaaatgaaatttgtgtgcctcacaataatgattggggtttgagaaatgggagtggcaatcccttcaaactcatgaaattatttcttcttaaattaagatttgtccaaagtaatgtaaacatattaagggaatactatttattctgattccaattttactagtcaagttaacaatgtgattgatggtcaatttgatttttaattattttgattacgtatatgtaaacacaccatagtgtttattatgtgtttgacaaatttccaccatgttaatttcttaggttgactacattttgggagataatcccagagctacaagctacatggttggttatggaaacaactaccctcgtcaagttcaccacaggggttcttccattgtttcttacaaggttaattctaagtttgttgcttgccgagagggttatgccacttggtttagccgaaaagctagtgacccaaatctacttaccggtgccattgttggtggccctgatgcttatgacaactttgctgatgaaagagataactatgagcagactgagcctgcaacttacaacaatgctcctcttcttggcattttagctagactcagcagtggtagcagaggttataaccagctccttccaggtaaatttagttaactcttctcttattaatctttcaataaatttgttttgttcattagaactatgattctcgtggagttgtcttataaggtggcgtttggttggaggtaatgaaatggaatggaatggaatggaaaggaaacaattttcattccattcctttatttggttgcatattaaagtattagaatggcattccaatggaatgctctttccacca

SEQ ID NO: 308261 - DNA, 745 bp, Cannabis indica
tcggttgtaattggatcggtcggttcttattggattggatcgatttatgcaccacccctacactcactatatactcattcattccccttgtatatctctcttaattttctttttaatttcccaataatatttaacaaaccctaattaataaccatgcatggtaatatatatctatatagtaatattgtttaagtaattaattaattggaatattaagtggaagatatatgtatatatatatatatgattgtctgtaaatttattataattaattgttatatatagaaatatttagttagattatagtgcttgtaaataattacataataatatagttttagctaataaccatggctctgtacgtagcagtatatatagtactcccaatatatatatcgattttattaactatgacttattaaaaaaattaaataattaattgattggagcaattttttcttttttttgatgaaaaaaaattagagcaaataaattaagaagacaattgcagtcaaatcgttagggctctcagtcaaagttagtactgatctaacgaagaaaattactaacagattttggcttataatgagagaaaaacaaaactctctagatcgatgaggataacaatattacaatataacatatttatattccaattatttctcaacatatctttatatattaaaagtgcctatctaacggcatttcttggtttaacagaatatacttaaaaataaaagaatat

SEQ ID NO: 308262 - DNA, 2210 bp, Cannabis indica
aatttttttgtttaattttttataagtaaaaaccgtaaaaataataaaaaataaaaaaaataaaaataaaaagtaagaatattaattttagtaacaaaaaaaaaaatatagtcttatgtaattatccctagtttgtttccttaaaacataagcacttcttctttggacctcaaattttaagagaaaaaatgatgaaatacaatcaattttaatgagaattctcatgtttgcaatttcataaatttataaccattataaatagagattttttcatctttacgctataaagtagtttttcttgtatttttacgaaaaataaatataacaattcaagtaacaaccaacaaaccaacctaaatcgcagttacccttatacaagaaaagaaaaactaaattttctttttatctatatttctctattatttaatctactttcacacatcttatatgatttgaccaatagtttcttgactaaaaaaaaagcattttgatatcaagaggaaacaaattttttgaaatcatagaattaatctaaaagagtcgaacaatgtttatgaaagacatctgagtctagcaaaggtcaaataacctgtgtggcctttagcctccatacatggcctagccattggtatggaagacctttgattttctgacaaattgcttgaatcatttgatctctgtctccttttacatggaggagccccaacagaaacaccatcatccccctcctcctccccatggtagctatccattttaacttctcgaacttcatatgtacgaaggagtacctcaaatgtccttatatctgcatccacacatataaacattgtgtcaattaagtaagcaaagcaatgaattgcaacacaaaccaccaatgtaacaattaaattaagagaaatgcaaaagggcaccagtggtgcctaataccctactatgtgtcactattgctattggttcaactaaatatcgagttccacctaatgcattactggtgcctaatagcaatgcactaaaattaattacccttacctgtgaagtttgatcttaaagtttcacaggatcgttgaacctgctcgatgcacggggagaaggagcatacaatcccatcatgtctcaacattttcgctactgatggtatggcgagccagggctgaggtaagtcaagaaagacagcatcagccatccctgaaaactcatttggaaatccttcaccttgaatgtctcttactccaacagtaaccaaactgcttaatcctgtcttctcaaaatcttccctgtacatatttcacaaagttcagggaacaaaatctatcaagcacaacattcattaccaacatatttcagttatttgacagcttagtcaaatcttaaaaccaaatgcaagtaggcatttagtcatatcacaagttcattgaacaaaattctacactaagaaatctggcaagcacataataacattgattacctagccgaggctgccctttgttcgtggaaatcaaaagtatagacatgtccagtgggagctactgcccttgcaagtgaagtagataaagacccacttccagttccggactcaagaaccacacagccaggaactagttccaaaaacataataacaaagctaatatctgcaatgtaaaggatctgggttctgtggcttagaaccaaagtccataactcaggagttggagccaacaaataaataaacccacccttgttgctgaacactttggtcccaaaaggcttaccaatccaatctgaatgtttaaaaacaccaaatcgattctgaagtgttgaaccttcacatactttcacagctttcatattgtcatgcctctcataagttattaccaaatctccttcgctaattaaacgattaaaagataacttctttgaagaatcaaggggaaacatccttttacaaaaatctataaagaaaattgtaaattacgaattaagcagagcaactacttcaacggaattcctactctctctagtctccgatgtgctatgatttagataaagccctaatatattactttagttctggatttgctatcgtaattgggcttctcatattgggctaagtcaaacatcctttttttcttgtagaatttacgtggggtatgggttttttaaaccttttatgataatatggcataattgattatgtacactttatatggcttttttatagtttaaccatagtt

SEQ ID NO: 308263 - DNA, 2017 bp, Cannabis indica
tacctcggtcttcaaatctattccatagatgcagaagacatttttaataggtggtctctcccatggtgtgagtggatttaaaactggatcaccatgatataacctgaaatacgaagaaatgaacaaaaataaatatgaaggacacacttaaaaggacagtagaaatcatttaagactatggaattagagagttacatttactaataaggctctaaatcttcacctatagattacttttaagtaaaaaaaaagacttgatgcaaatttcaacttattgtaatagaaagtgacttcatgtgtgtgtggtgtaagtttcgctacttagcagggagtgtgcaaaaagtttttgttttgcatcgtaagctaatacgcacttttgtaattgatacaacagcctcttactgtccggatcataatcttctattgctttgaaaaaggttccatccgacatttctcgagcagaaaaggataactgagttggaagtccacattccatgctagtcaagttagactctgctatttcggtaattgatggataggcctcaagtcctgtgaatagaaagagggtgacactcagtttgagcataataacatattgccacaaaaccaacatgagtatcaaggttttaccatgggttgaaggaatttcaatatttattatgtttgttggccacccagagaaatttaactgaaattcttgctcatcacaaaaatatgtttgatgactctttctgctccctccccaagagaaatgcttcgagtatacattctccgccctacaatactttgaaaatggcatcatccatagagaagaaccaaatgaattgaacaacaggcgagcagtcccctgattctcacaagattatataaagcatgtgttagaataggcacccaaaaccactcacaactaagagcaatagatatagaacttttgccactaaactaatatacttttgatcctaggttggtgtaccttaaaacagattaacttacattgtctaatcgtagttctaaaaacttagggaggaaaatcaagctacaagagaacaaatgattttcggttttgctaagaagatgctaaaaacccactcacattataatgctttcaaatggatactaagaaaataagtctctagagtacccaaaaactgaaggcgtcataaatggttgtgagaggaataacctcggaaacaggaagaccaaatgtcaatccagatagtgctgcttttactgtctcggttgcaccaagaagaggagctcctgcaatcattccaaaggtataaaaccaattaatcattaagtaggagtaataaccctaggtaagaatggaagaggaggggagaaggatggtaagggcctaccaacagcaaaataggcatgaatgtgtcgtcgagccatttattataatgttttggtgcaatttccagctttaaccactccaagaagtattggaatacattattacctaatgaatgagcaaatactaaagaggggcctccgcgaagtttcaatgcagtttcaaatgtcaatctacaaagaaacaaaagcatttcggtaaatctacaccatcattaatcaaacattaactactaaagatgagtttcaaacttaatcaaaacatcataaacttgaaacattgtgtcacatgtactcacttaagcttatgaaagtaaaggtctcgttcctcaagcattgctggtgacaatctccaatcatatggaacagcaattattgcattagcctcaataccaaactcaatgcaccacttaatccattctttccaaaccgaagaaagagggcctgcaagagacaaaaacaatgcatactcaatcttgtacagcaacacaaggataaaacatagtttccattccgtgaaacaaatgtatgaagccatgtgttgagcacaaagccaactattctttcgccttttactaaagaataccgtgtgtttgtcactttcaatggcatacgatcatttttgaacgattttcttaaattgaaggccttaatcaaaaaa

SEQ ID NO: 308264 - DNA, 1879 bp, Cannabis indica
aaaaattctttgttgaacgtaaaaatataattattttacaaaaaatggtgtcttatgtaattattccttataaatataagtaatttaaccctatgttgctaattgaagtggtaattttgttttggatccagtcttttaaaattaatttttaagtcttatttttacctttttcgaaagaaaaaagctatacttttagaaaaaaacaaacatttatgaattagacgaaaatattttgttagatttttagcttttattttgtaaaagttaccgattggactttatgttttattaaatgacaaaatgaattctgtattttttaaaatggtaaaaataagatcttgtgtttaatttttgacgatttttttttaatataattaacttgaagacaattcctaacatgaacaaatacagacaatgaaaacagctttgtcataacacccttagatgattattattaaattttattttaataaaaaatcaattcaagttttatttgtaccattttggtaaatacaaggtctatttcgttatttaacaaaacaaaaaatctaattaataatttttgcaaaacacatgatgcaaaatggtatttaccctttaataaatttaacataagttgttgttaatttagagaataaaagcgaaaagaatcaaggcaaggaggaacccaccaaattatggcccccaatcccacttttcataatctgcagtagtgttatttgtttactatttataaactcattgatcatcattcctaccttttgtcataagaatatcacaactatttgactttgttttgctggatttgggagacttatataacatggtggtttagctgactacttttatatagtaaaagaaaaaacttctttgcactttctatggctgtctttaatttctttatttaaaactatactactttttcttaatacttttacatactcaaaatcctttgtgtgacacatcacaaaagcctcataaccaccatttgatctgccatacaatcatatgattaattaaataaatccttgatcaatatatttatgaagttgagcagttgtatataattaggttgacttaatccatttatttatttcatgttttaaatcaaaagtcattcctactaaaagtttcataattattagtagataacaacaactctcgttttctcccatttacttaatataatattactatgcaaaaaaggccatctctatatataagatcaatatccataccattaatttcatcccaccaaagcataatacaatctcatctcttcatccattactactcaaatcaagtgtaacatattcttatttattctcaaagtagaagaaaatgaagagtggagatcattcaaccaccattgatgttgcagggccaagcaactcatcaacaaaaggaaaatcaactacagttttagtagcagcccccaaagccacaggaatgaagaaaggaatggccatagccgacttcgtcttaaggcttggcgccataattgctgcgctttcagctgcagccaccatgggaaccagtgatgaaagtcttcctttcttcactcagttcttccaatttgaagctagctacgatgacatgccaacatttcagtacgtacatacatgcatgcatctttattatgcctttactttttatgaaataagatttttctccctgaactatgactctctagagttttagtctctaaatttttctgttgcaaaattttcttccgaattataaaaatcgttgcaaatatctcatttcagttccattcttctcatttatttaaataattatcacaataaaaatgacactttcagtgataatttttagtcacaataaaatgttacttctgattaaaatatagtatttatat

SEQ ID NO: 308265 - DNA, 1189 bp, Cannabis indica
ttttaaaaaaaatatatttattattgacaacggttatccaccgttggcaatagttgtccccacaatttttttaattcagagctacccataaaaaaaacttccacgtaccttttccaatgattttcatagttgaccctcttctaaatccttgagaataacccatgttgtggtagtgcacttaggaaagaaaaatagaaatagctttatgaatttatatatcaagcctaatgtgtttctagcgagatgctctcttgatagaaaatattgtctaccaaaatgaaccctaaagacatctatttatagtgttttgagaactttatttgaaactcacattccaatggatgttaccagctagtttaagagaatagtgagttactattttcattaatagcatttaactaacctgacaaccatatactttgacccgtgttgaacgctggaccattcgttgaagataaaagtacatcaaacccatatgaagttttaccatgagcagattgcatccattgggcaaatataagttcgatcaagattagttttttcggagtaccaaaagcaaacatgacatcattaggaacataaagttccaaagtatggaaccctagaaagaggcttgcccaacttaaatgggttatgatagcttcttttgccataaatggagataagaacattgctcattgatgctaaaacatcctcatcaaattcaaaacgttttgcaatgttttgtcccattaggctccaggtgctaggtcatccggagaaaaatatttgaactttcgagatacattaaaaatatgtcgaaaaaccccacatgtaggtttaggtgacatgtcacctaaactatttcttcagctccaatttggagttttgaatctcctcaacgagataactcgacttccaacgttctcatgtgaattaaatgtttatttcattagtttctaacaactagaaacttcctccacatgctttcataactcccaaatgtaactattcttttaattacatatcatcaaattggattcataagttataaatttattttaatggttcataagttataaatctatttttgatttataaaagaatttacaaaaatatgtatttaaatatctcatataacctcgacgaaataatcccatatttatacgcaacatgtcatattttattttcatctaatattatattatat

SEQ ID NO: 308266 - DNA, 2204 bp, Cannabis indica
atgtggtcatctgcatttcatgaaataacttcaaagcttcacggggttgcctgttctgacaatatccactaatcattgtattccaggaaataaggttcttttcctgcatggcatcaaataaaaatctagcacactgtagataaccaccacggcaatagccatagatcatactcgtccaagacaccacattcctatctgtcatcttgttaaacaaatttcgagcagacccaatctcccctaattttgcataaccatcaatcattacattatcagtagctgagtctttctcaggcatctgattgaagagctctcttgcgttaatcatgtctcctaacctcgcataaccacaaataagagctgtccatgacacttggtttctttcattcattccatcaaacaacattctggcatagctcatattcccgaacttggcatacatatcaaccaacgccgttagcacatacatatttgagcagaaccctgtttttgcaacaagactgtgtatctcttggccttcccgaatggcacatttcgaagcacaagacttcactaatatcacaaacgtataaccattaggaacaaacccggtgttcctcctaagatcgccatagagagaaaatgattcagcgaactgctgcatattggtgtggcctttgatcatgcagttacagagaaagatatcgtctctgtggggccttttatcaaacacctgtcgagcgtgggagagcaagacgattgaattttgatggcccccaaggggaggagaagtgaaggcggtaatgaacttggtgaggagattgaggttggtttcgagagcgtttcggagcatgaaagcgtggatttggaggagtgaggcaatggtgtttcttcgttggagtaagtaaaagcatcttctttctagtgagctccatatatgatccttcgtcatcggtgcatatcaattttttcttttaactaatcgacgatgcatatcaaattgatccctcacattaataataactcaatcaatataatcatgtgcggtgcgtattataaatttataactagaaaattctaaaattgtgtatcaatcctagttatattcataaaattataacatatttattttggagaattactctccatattgtttttttaaatttactttttgggttttaaaaatacttccagtgctagttgcagtaaacatttttatacaattttttgttacaatttaaattgcagcattagttgatttaggagttttatgtaaaatttcgtaaaaatacaaaaaataaataaataaataaataaataaaaaataaaactagtttgaaatgtaaaaatgaaaaaacctctttaagttataacaattttataataattactcttaaattaaaataattaaaatatcatgagttcaatacgttagaaaagtatttttcctttccttttttttacttatatttaatttaagatttcaattaatttaataattttaaattctatcatattatattaataaattttatttttcatatttttggattcaatccaatttttataataactcaaaaaaatctaatctacaaaagtgcatattaaatcgattattttaaattagttactttttaatattgaattacttaaaaaatttaattctttttcacaaaactaacaacaaaataaaattaattattatagttatatgtctttgttatacccatatttcgagcaataatatagtgttgacacgtgtaaagaaaccagcttgtgttgtaaaacaattaatgcatttaataaacgcgtctcaaaaaatatatgtggtaaaaatattcaaactcactcttttaaagataaggagaagctatgaattatagctaccgattgttaatattggcaagatgaacgatcaacttagaaggttcattttggaaaatatataatacacaacagaatgacaatgcttgaaatggtaaataataaattatttacagagcttgcagctcatcgactcacatactcacgagtatgttaagagactaagggtcacattcccagcatgattcatctcagaattatcatactgtgatgttgtcttgcgtttgcttcgcccaacaatacttatagaaggacgcgagaagcattaattaaattatacttagtcgctcacaacccttttcagaataaagtgtcttgagaagattatttgtattacgaaatta

SEQ ID NO: 308267 - DNA, 1623 bp, Cannabis indica
gattgtctattaattagaaaattagacctcgtgatcattacaaaataagtctttcgggatagagaaataggtaagcaaccaaaccgattgcaggtgaaggtccacttaactacattatgggcaacaaaattacacgggattacatgaaaacaaacaaccatcaaaatgatatattaaattttgaatcaagatttacaattatacactgaagtacaataataaaagttgatgtaaaaatatcacaaaaatactttttgcgccaaatatagctcaagctttacatctccaattggagatggtcttactctctacaaaatttatatgagcattgatattggacacttttggtgtttagcacattctagacgtgtttttgtgcaattagttaggccatctctaatgaaagatttgaaatttgtgtaaaatttgacacaaaaataggtttgtttgtgctatgtttggcctactatttataattgtgctccaatgcacaagatgtaaaataagaataaaataattaattatattgatgatcaattgaaaatatacaaaaattattattttttatttttttattatctaaataatagtaatatggtaaataaaaaatgtaagtttagtaaaagtcaataaatcataataattagtggtattatagtaaataaaaaaaagtaatatttattgtggtctaaatttgacacaatgttatattttgtaccaaatatgacacaatttttagcatgtgtcaacttttagtacgctttttagaatactattagagtaatagtttttgttaagtgctaaaatatggcaatacatcatatttttggcaatccattaaagatgcgcttagtgataatctctaaaaattattatattaaattatatgagattcgatacttaattctaccaataataatgtgttttagcgtttctcaatttatgtatatggttttttctttccttttttaatttatttaaaaagaaaatgtcttaaataattattttttttcctttttaccattaggaacctcaacttatattccgcattttttattattattcttaaaacgtctatatatgcattaaattttgcacaatatggccactgaaaagttagtttcaaatagtattaatttatacatttggattttctttttaagattttttcacatagtaaatgttactctaaaaataatatatttatgaaaaaataatttttttttatgattttataattgcgctttttttaattttaaccaaaaaaataatattcaaaaatactttcagctggccaaataaacaaatatacaacctaaataaaaaaattacataaatatcacttacacacacctatccatgcttcttgggcaaccatcgcgcaaccacgcagcaacctaacgcaactgaaacgaaaattcaaccagaaagaaaaccactattaatttcggcgatttcacatgagaagacaacgagaatcaatcgaaataggggctatttcgaatgggaaatttcaatttttgaccctaataatacaacctatatcaaaatttatacccctttataatttgtacaaatttattcctataattttaaaagtttcctaaaataccccctaaatta

SEQ ID NO: 308268 - DNA, 1279 bp, Cannabis indica
aacactttacctatagagcctccacatcaaccctccccactaaataatccctattctttaggaaaatcacatactcccctgtttgtgacctctgcttaagagaagaggaatctgtccttcatgctttgttccattgcaaacgaattcgaagagtctaaaaaggtagtattttctatccctatcttatcatggatactaacacttatttttatgaaattgcttataactaacttaaacaagaaagaagtggaaatgtttatttgtatctcttggtttatttgggataacaagaacaagaagatcaagcatcaacggatgaattatcttcatgccattcccacccttgcgggactctacttggctgaatacacagcagggtcgaggaaactcaacacagaaggtcccccacatttagaagttactccacccacgtggactcccccccccccccatcaagacttttcaagctcaacattgatgcagcctctatgtagtcaactgatttagcaggttttggtggtgtaattggtaatagtatggtaaagtggttgttgctatcgcctccccttataaaggtggaggggatgccacaactctcgaagcacattccatccttaaggcgctcctctggtgtattgaagaatccttcctcattcatctgattgagacaaattgcaaaagaatcatagatgccttagctcccaacaaagaggaaatctccctattcagagacattatcaaacaaattcagacaactttatcttatctccccaatgccactatccatcatgttaatcgcttagcaaacacgtttgctcacaaactggaaaagttagcactggggttagaaaaagctgctaattggattgtgatgacccatgcaatcttgaatctttccttttcgcttaagggcatcccttccataaaaaaaataaatttatagaaaagtactcatcatgcgatctcaaaattgttgtcatcgtcgtcttgtagtcgccattaaattaattcaaaaattattatcattaacataactcacttgtagtcgttaacatatttaaagttatccaaaaattcttatctaataaaaaagcaatccacatgctgttgactttttcatccattgatccttcaagcgaagtctaagcttgaatttttatacaactacagccttcattcccggaagctaaagcttgttacataaattcaacataactcttgcatgtacgttatttttcatgcaagaaagattactgggggtacggtacgtcttcaaccc

SEQ ID NO: 308269 - DNA, 1048 bp, Cannabis indica
aaaaataattttggattgaaatcttttaagtactgaatgtggtggcttcttagtcctcatgttgtaaaccaatatgttttccaaaagtgaaatgtttgtcctcactttagtcatctttatctttatcttttgatcattatcttatcaatcctagtggtacatatattatgccatttatatagattcttattccttttattttttcctttacttttcatttgaatacctacaaaagtagcctttcaaatggaatttgcacatttttagatgcttgctatatacatgattattcagcaattataaataattttcttctttttcttttgtactctattattatatttttttaattcttaattattattattctattttgatcatgaaagaaaataattgagttagaaaagctttgtctttgaagatgattgctaaccacacgcaatctgtggtgtagttgttgctttcacttgatagaatcactgtatcaattttcaatgaacctagctattttttcctttgatcagaaatagacaaattttaataattaattaaattaaatcccttccacgtgccctaaatgttaactaattacacacatattaaaagcaccacaaattggtgatcgttttatgtatgcataatatatagtttaccttttgagttttgtctatactactaattatttggggtcaacacgttaggtaagagatatgtaggcgtttctatggtgtctcaggccattcacattgcattaatgatgtttcttaaattagttgctaatacataatgtgattctattaataattgcaacttttttttttttctatttcattttataatttacttcaaatatttaattattttaaactacattatagcgtaaactaatatgaatccattatgcactcataattaagaatattaaagtagagctttatttgcatccacaaaatgataaatacactttattattaaaaaaatataagcataaataattttttaaaattactcttaatattttttttaattttttcctcacattatttta

SEQ ID NO: 308270 - DNA, 1123 bp, Cannabis indica
aagtacgaactgtatctgtttatccgtgtaaaaatatttttgtatgaatataggttaactgtcttagaaaataaaataaaaatatatattatgagggtgaggttactagaaacttgaaacataaaaaaaaaaaaaaaaaaaaaaagagggagaaaccagcatttgacatggacgagaaaataaataaataaataataaactcaacttatgggccgttcgattcaactgaagtgaaaagatcataaccgttcactttctcactagggggattatttccaaccttgcttcttatccaaagagtaatttgcagtatagctaagttttaataggtaagttataattcttaaatttttgtagggtactgattgttaatgaattaaattatcacgtaataatttttgattagtataagtaattaaatttttttaaaaaaaaataatttacatatattaataattattttttaatttttacacttctaaataattttttttagtattttttatagaattttatatagaaatttctattgcaattaatggagtaacctaaatcgtaatcaaaaattctatagcaattcacattgaaactactgacaaaacaactttagaaacataaaccgtaaattttttaaaaaaaatataaataaaaaatagtatatgaataatttttctaaaaaaatgtattaacttaagtatcaaattattttggtcgaaatgtgaaatgatcaggtgtgttgctgcccagggaacttaatttggtctgaggtggatttaattgacacgtgcaataattaggaccatggtatctaatcgcacagatgattttgcggaaagcaatttgagaacactcattttggtacattgactcactttaatgaggaccacacacgcgctttgctttcttctctagcgtatgaaattaaggcccgccgtcgcttaacgggctaagacccacactttagccctgccagattatgaactagagccctgcctattcttgggctttaatgactaatgagcctaatcctttgaatacactactataaatatggaataagtacatgcactatttttttttgtaaaaaaaaatacattttgatgtttaaagaatttttttaaca

SEQ ID NO: 308271 - DNA, 2440 bp, Cannabis indica
tatatggctcaattctctaccatttattccatgtggacattgtccacaatattccccctcaagatagtggacatggtcactatctgtataggtgcggatcggatatgatcacttgcccgcaagggatatggctctgataccatgttgagaatcatggggttccatccaaaaccaattggcaatgagtggagtagcccatgtttttatatatggctcaattctctaccatttattccatgtggacacaaagctatatcgtactagtttgatattttctttattcacgtattttctagatgatcacaaaagaaagtccaaatctctatagtctatttcttccttatatatacgtaatggttacatctcggccgtaagtggttaacaactttgactaattaattataccattttttatataatacaatatctccaagcttattaattgctaaaaagtatctaataattccaattaatatattttaatcttccttcctagtactaattaattttgctttcattatatatttataaatattatattgttaaattacggaattcaagcatatgaatccaaatcatttcactatcaggtactaataattattctatgatcaacaactaattattaagtaaaaactgtttattattagttaatataattataataattaatcaagagtatatatataggaatatgtatacgtaccaacagtggctgaattgaaagtggtagaaccacctccgacgcttttacttccggtaataatagtcttcccaataccatctccaaccaacataatattatttttctttatttcaatattttccttataggtccctgatttcacgtaaattacaaacctgccactcccttttccactcccagccgcactcaccgcctcttttatcgtcttatagttgccggagccgtcttgcgccaccacaacattggcctgagaagccggtgatgacgtggactgcaagagctttcggtcaccaggcctcacccaactagggaacccatctttattagtgttggacccagtagcagcagaagctggtttgtttatagccaaagtgttactaatcaatttagaaacattatttgacttaatcaacggcaggagattgtctgagtctcccatctcaacaagcccagaaagacacgtgtcgaggttagttagagccgtacttagccaagtctggaaatcatctttggtgcatgacttgtcatcagttttggaagtggtctcgttgagtctttgaattgtgtactcgtagagctcgagacaatcggcccaagctaccttctcacttgggttacggcatttgggcccgagtgaaacgacgccgttgtgggctgagacggcccggtccagggcggccttggttgatattttaaaaaagtcggaattttgtttaatgctcccatgagtgtgatagctattaaagtcggaagtgcttagataatactcgcatggttggggattgggtgtttggctacaccatgatttgacttcttcaagagaataagcaaaaacagtgtttggagaagcagaaaggagtgctaaaactataattagtgaaaaatttatgtagtctctaagagtcattttcaagagaatggctaaagatgagtgtgataagagtaaagagggagagagggaaaagaatggggggttttgagattgcttaactcgagctgggtttgtttatgaattatatttttggcttgtgagtttggtttttatttatagaagagtgatgagttgaatatatacgtacatgaggaaaaaatggggtgggcgcgtacacaacttttgtgttttgtcctcctttatttgaattctattaacagtctcatcaatcatcaagtaatataacactttttccatataattcttttgcttatcaaaataaatgaataacacttattccatagattaggtttctttttaccacttgagactagctcgtaggaggttacttgtgtattggatgttttgaattcgagtcttaaattatatattgttgtaatatataaatgtttaaataaaaaaaatatatattcatttttacttctttatactttttatgtacatttaaaaataacattacatatagaaaaataaatagggaaaatatattcataataatatgatgaattaataatattatgcatatcttttttaaaaatatatatgctttgatttgagtttattagtttagttgagaattatttttatagtttccaacacctaaaaataatttaatatcaaatcttatattactctaatttaaattaaaatgtgtgacaaaaaatatataataatgtcataattaaattgtggggacactacataaacatatcacatgctccaagtttaatcacgaaattagagactggccaaaagagaaatgtaattaatgatgtatacta

SEQ ID NO: 308272 - DNA, 1954 bp, Cannabis indica
ataataataataataatataatcataattggtaagagtgacacgtgttcaacaattcttctgttaggtattaacatgaataatcgttatgatttcaaacgttttggtgccaaattttcattcgttacggaattaacagatagtgacaatgttatactgtcttaattattattcatcatgtaatgttaaattcattttagaaggaattaattgcttctcggtttggaaagttaggaataaagttttgtggctccaacaactaacacatttgaatatatgtgtgaaaaaattgttgaatttgtaaaaaatagaatttttaccatttggcctaaaaaaatgagtttggaagatgctatttggtttgagaatcttttggataattaagtaagattctatagaaatttcaagtcttttatcgagagtaaattacactgtatatttattttttattttagtttttatttttattattttaaattattatttaacccaattttataagttatatttttattatgtgcattagaaattttaattttaataagttatgtaatgttgtatttgatactttaattataaaaaaatagtatttataaattaaaattattagagttatatatctaattaatgtgtaataaaaagaggtagttttcaacttaaccttttttttttatcaaagaaaatacttcaaaatatttgtttatgtaatgcactttctaatttttttaaaaaaaatgttaaaattcatttaatttttattttttaaatgagtttgtgtatgtgagtaaatgtacctaatattttatgatcttgtatacacatatattatatattattaaaaataatttattttcttataataaatagtacatattttggtgttgcactatgcttggaataaaaaaaaatgtcattgttgtggtttgttggagataacaaatgatgaatttaggtgttacttttccctgttttagggtttagagtctctttaaaaaataaaaaataaaaagtgtccaaagggaaaaggctagaataattaataattttaagttgttaataattttaataattagcttaatacattaataattaatcacactctacttatatattacgaaattgatatttttttaaattaaattgaattataattaatacctttatattttttatatattaattatttgttgttataataatgcattattattattattattttgtgaacatgtacagcactacatgcattattatttcaagtgcaaagtagcatggtatggagctggtagcatatgcatacgcctacaccatacttcaatttgaagtcaaattatgttacgattttttaatatactatatttattttattttattattttttttatggaaaggctttttaatgagaattctaacatcttaagatgctaagtattttaataggagtgatatactgctattgatgtattttaatattaattgttgtatattttgatttaataataaataatataaaaaattgctaattagttatagagtgtcacataaatatattgttaagacaattaaataacaattttatttttaattaatatactttatcattgacataacatgttccttgttgttgtcccttacgctatgtttggtaatgagggagagtaagatggatggaaaattagaaggaatgggttgtaggagggatgcagatctcctttgtatagaaaaaatattaggtgtgaagttaaagcgatggatagaaaaaatattaataaaactacaaaaactatccttgtgaatatatattgagtattactattagttatcagtggtgtttagcatcttctcgacgtgtcacgttgtgattggctagcgatacgccctaaaagctattatgttaaattatatgggacctgatacttagttgaaccaatagcgatattgacacataggagagt

SEQ ID NO: 308273 - DNA, 2257 bp, Cannabis indica
ttcatttttactaggattttctttctcttctaattcttcttacacatgaatttggctcaattagaaacagaaaagcaagagtgagagagagagttctaattcttcttatgggaaaatcacataaacatcacagaaaaatgacacataaaccatgtaaattcataaggcacggtcatagataatattgaagggattattttccattcctaaaaaaatactatggagtaatgtgctacaagcttacaacatcctctttcacgcgagaaaatggagataaaaaaataggtcacttaaatcctatatccatgttccagtcaatgttacttatagaaagatggaagtttcttcaataaagcttataaacctaccgttgcaagttgctcagccatgtgatggtttacttcttcaaagctataattccttgtctcataatcctttcctgccaataaatacaagtactaccgttaatgtcctttgtgcaaaccaagcaataaacctcaaaagcagaaaagatgcataccaataaggttaacaaccacattagcttttgccattacagctttaactgaactttcatctcttggattgtatttcattggcactatctgtgatagaaaatcatcggaacatgatcagtgactacaaattcaaataaaacattcaaaagcaattcactaatccaatgtatagttaacttatccatatattactcaaacctgtcccaaatctcccatcagctttagatgacgatgagaatcttcagaaccccgaaaaggaactagaacttgagatcccatcttagctggttaggaaatgaagaatcagcacaaaaaagcatggaattgtttataaaaaaaaattgactaatcaaataaggtctgttccaaacttatgcctcctttctattaataaaagaaataatattaattaacactcagtttaccaagttgctgcaccacataacgaccaagaaatccagttgctccaaaaactgtagctactatgccactgaaatacaaaataaacacaaaaattatataccagccttatgtattaacacaatggtggtgggaaaagtacactttccaaaaattgcgaagacttcaacaaatagtaatgaaaacataggaatagaaatgggaatgagaataggtatcggaatcaaatcaaatttaaaatacattgtaatgttgtttccttccatttcaaaatggaatagtcattcaccaagatgatagaataacattccaatacttttaaaatgcaatcaaacaaagaaatagaatgaaaaatgattcaattccatttcactaccttcaattaaacacaaccatagttttttctttctttctatgaaggtacattccaaaaggggcattcaaaaagcaatgaaatttgatcaatttgccatccatattgatcgttctataaacaaagcccaaataaataaataaaaagatggaacttttccaattccaacattttctcaaaacccaaacaagctaaaactcagattttcaactctcacattcttcattcaaaataataataataataataataataaacagttttacctaacagatgatcttccaccagtccctttcctaacaaggtgaccgattcctttagtggcaacggtggatccgtacctcgggtgttcagctccataatctacacaaaatcaatctcaaacgctcaattaataataattaggaacgtaaaccctagagagataaaagaaagaaagagtgtgcgtacagtgatcgtagttgagagggtagatagacttgagcgatgaaattgaaggcgaagggctcagtgatttttgccctagacgcctggctacggcctgcatcgtggtggagctggattaatacagtcgagaggagagagagagagggggggatagagagagaaagctctgaaaggaagaagatgaaagccagagagggctctctctgtatgtgtgattgagctgagcccagtttggttactttgtgggcttctcctctggaaatattgggcctgggcatgggccactacaatgggtttgagtactttctttttaggaatttacttctttttgtccttttttagaaagttatagaaaatttatacaccttaatttaaacaaaaaaaattgaaatatctaactttagctcttagttgaaataaatacataactttaattttaacggttaataatacctaagttatattctggaacttctataggtacctgaccgttaaatgt

SEQ ID NO: 308274 - DNA, 928 bp, Cannabis indica
atatatatatatagatttctgtaaaaaaaataaataaataaaaactttattaaagtataaaattaaaaataaaaaacctaattaattttcaccaagattaataatatattatttgcttttaaaaataatatactattaacatataggtaccatcctccaccagaaagataaactacccaagaaaaaaaaaatgtattcttccaagtttggtacttatttctcctacttcacctaagatattatctattggggattccctgcattcaatccacaagtagtgttgttccacatatttcttcctttttattctgtactggaccctttttattatttcaacttataaaagaacaaccattattaattatcactatataaattgactgtttcttcagtaagtccaatcttgaggaagaccgatctcgttctggtgcatggcctgcgctgtcctagaatactgtcccttcttttgtgaattttttcccatttttctttgagttattaataataatgtctgaaaaaaaaaaaatacaaccaagaccaacttgttaattaaaaaaataaacgtagaagaattaaattaagaatagaatttgcacagaataagattctttttattttaaaatattgtagtttttttttatttgtgtgtgtgattacgtaccgtgttgttggactgagaaaaaatcagtagtattttgtccagacatgttatccattcggtcaaagtgaactttcagtgcctgcattacttttgctggtattaaaactggtgaacatcctgatgagtttagtcaaaaaagaataaaacaaatggttagagtttcttcgaatcatgccactataaaaatttagaacacacgccaaataaataaaataaaataaaatgtcaacccttttcttctctatatattggaacgggctttttttt

SEQ ID NO: 308275 - DNA, 2359 bp, Cannabis indica
  modified_base (1478)..(1478): a, c, t, g, unknown or other
taacgtacacaattataaaaaaacttgaactaatttttttctaaatatcgaaacagataataaatacatcagtatacgtgttttaggggatgcaagcacccatatttaatttagtatatggtcttatatttttcattcttttctaagttataccaaagctagtttgatatttgcagtctaaattcaatgtttaaaatatattattatagtattatcaagcacatgcatactttttacaccaagaatattgattatatatgtagcccatgaggacatggttatatgtgagatgcagatttggtataatcattgagccgcaacacatatgatacatatcaatgtatacaacaaatatcacttttatcagtatatttttgtgctggtaaaagttggtattgcgctagtaaaatagaatttacttgatgtgttgacaaaaaaagttggcaaatcaacgttggtattagaacttttgccagcatagaatgaaaagagttgacaaaaatgattttctcagcacgtaaatgcgttggtgaaagttagattttaaccactgcaaatgtacactggtaaaactttgacctttttgccagcgcagtttgcgatatatactggtaaaaatgacatttcttgtagtgatatattatttaagaatatataaatatatataacaattatatgagcctaggaattaagaaactcatatatatttaaaggaatgatatcgtcaattatttattataattttttaattaatttctaggttagaaaatacatatcagatattttttcaaatttttttcatgcaatagttgtttattatagttaaaacatttctataaatttttgaaaaatacaaataatttacggtgttgaaaatatgtttgaaattttttgaacactcgtgacaaactaaaatatcatgaactctattttcatatctataaactatttgaaatttttgaaaattttacaaaaatgatatatatatctataacgaatatcgcgctatgaaaaaaattaaaaaaaaatattccgaaaatataatttcgagtgtagaaattaaataagaaatcgtaattaccactcttcgtatatttctcatcatgataggctaggttataattagggtagctatactatgcacttaggtagctttaattctcttatgactatattaaactattgttagcttatatatatagcatcaaattataacttgtactatcacaccaaatgctttaagttcttggtgtagctatagcttgtaataactacatttttgctcacataaaatgctaatgtttaattagctatggaaaaaccatgaagaggtagctaggctagggttttcatttttttgcttaccataatgttgaatatgcatgtgatagatatgatgaaactagtacctttccctatatttgatactgcgacttcatcaatatgcgaggtgtgcctttcttaatatagcgagatcncttttagtaatattgcgagatccttctttccggtactgcgagtactataatattgcgagtcaccttcaatacagcgagttctctatagacaagtctttctcgcggggagggtaaatttatgcctataacacatgcccctagttcttcagtatagcttgctctgtgctggagaacttaaaatagtccaagcccgcgtttgtcgatgatcatgatgccttattcatgttgtgcgtcacattttcgattggttatctaaactcgcaggtttcttataagaccatcgcacaataaaaatgtgaatctcgcgggattcttttggatgtgtgaaccgctcgtggttcatattgatgcatggacctcgcggggttttcatcggtgtatgaacctatcggggttcttatgaaccttgtgaggttctaattgatgcatgaacttctcggagtttgcactgatgtatgaaccttacggggttcaaataaatgcacaaacctctcggggtttgttttgttgtgtgaacctctcagggttcttaactcatggaatgcttgcgactaaacaggtcgcgtatcgggcattcgtgtatgaacctctcggggttcttatttcatggaatgcctgcgactaaatgggtcgcgtatcgggcattcgtgtacgaacctctcggggttcttatttcatggaatgcctgcgactaaacgggtcgcatatcgggcattcgtgtatgaacctctcggggttcttaattcatggaatgcctgcgactaaacgggtcgcatatcgggcattcgtgtatgaacctctcggggttcttatttcatggaatgcctgcgactaaacgggtcgcgtatcgggcattcatgtgtacgaacctctcggggttc

SEQ ID NO: 308276 - DNA, 1243 bp, Cannabis indica
atggtttcccaaaaacaacagccatgttgagttgaagattattacaaaagaagtcgtcaaacgtcaattgcagctaggtacaagtccatcgttttttttttttttttgtattgttttaatttttatggcaactgattcatcactctaaactaattcataacactaactaataaatcaaacttcttatggataatagggtctcattttcaacaaacctcatcaatcttggggaaacatagctgtggcctttacaaggaacacaaatattttgagccgaggacaactatgcattgcagagtacatttaaactgtgaagagcctagcctgccatgtcctaagtctagaattagaatcaagcgaaagctcttccatctgaggcatttatttgaaagatgtatagaaagtgaattttcatcacagtgctaaatacaagtgtaaaatataaagagtattatgtagacaacttgtggaacctgaagagggttgatacttgatatcacaattcattccccatctgtcactgaaaaatttgttcggtttttaggtatcatttgcttttatggccattttgtatgtgttagccaaatcatttggaagtagtttggggttggacttgactctttcaagtttcaaggtagcatgattgttgatagtatacccattcattaacattatcttgggtgcggaagagcaaatttagaagagaaaatgaatagaatagaaagcaaaatttattgtatgcacaataattttcatttaaaacaaaataataagaactattggtacaaatataaattactttatatgcaagtataggaaaattaatatgtaggaggaactttttgtccctattggtgtagacgtttttgtttttggttatatgaaaaagttatagtccataaattataatctttgaaaaaaaaaatagaataatttgtagtgctgaaaataaagttaaaaatagttaattgcaacttgtttatgtgtgtaactaattgttttgatattgtttatcgattttataaaaggtttatttatattaaaggttcttaaattaaataaggtttgacaaattcgtcttcaaattttattttttggtaaattgatccccaaattatataaagttttagcaagctagttcttcaagctttattttttggcaaattggttcccaaacttttattttcttaaattctataaagtcttaaatattgtatattttatttatttatttaattaattt

SEQ ID NO: 308277 - DNA, 1228 bp, Cannabis indica
aaaaaaaaaaaaaaagtaaggaagtaaaattaaaaatccatctatggtggataaagtgaaacattaatcaagcatgcaatgcaattgaaaagttcaaggaagaaaaaataaactaaagaaataaaaatacttaaacacatctatcaaggtaatttttataggacaaagttataaaacacatctttagaattgcacaaacaagtatatttgaaattgaaattccttcccaccccaaaatgaatagcgttttatcttgggaatcctcttatttataaagaaaagaaaaagaaaaaaaatccatcactattatcgagttaaggaatttatacgttgttgtgtaacttggtgaaactttcacattgtcttttttctttattttctattttttattttattttgatagctagagtttcacattgcttggtagctactatcttagcttagctccaattcaattctctcaagatgttgattgaaatatcgaaagaagaagggcccaagcccaagctcaatcctatagttaaaaggcccagaaatggcttgtaccattgatggactgcggaaatgacataattattatattaatttatttttgacaattttattctaatttcattattttaatttttaatatctctatttttcttccttcgaaaagatacaataattattcattaataagtaaggatacagttttcttgcctgaagataacacaagcaaaattaactaatataacttataagcttagtgggttaattacaattaggaaaagaaaaagaaaaaactaacagcaacttcaaacaaagttttataattcaccagttattaagcatctaaggaatgtaaagtgagctaaattttcaaaccaaacaagtatatgacaaatttaactcatcaaccaataacattccaataaaaattagaaaataataaacttattattgaaaaaaaaaggaaacgaaacaagagacataaacttgacaaggaatcacgaaaccacaaaacaaagggtcaataaacacaaggagaaaaaatatagaaccgtaattgattagtgcacatttatacacttattcttgattaattattagataaactatcgtttatttttatattttttataaatttgatgttttttgtaatcgtatagttttaagttttaaacacgacaatactgaaaaaccgtgtttttgcaaatgtcagttgtatataagaaaatataaaaac

SEQ ID NO: 308278 - DNA, 2349 bp, Cannabis indica
ttttttagggttttaattattggtttaaaaatcaaattttttgattttctaagcatagaaaatcaaatttccccattattattgaacgtacgaagttttgggtttcaataaaattgtctttttaaagatttttatgtatgatttgttgtttatttataattgtgtttgtctctaattttgaatacacaatttagtaggtatacttattgtagacacaagccatgcatcaaacatggttgagggaacataagaaaaaatattagaattaagtaatacatttgtaaataagaatatgtgtggggataaggttggaactaaccaataatatatatagtgattagtttgtaatatgaagggcttattatgattattataaaaaaaagttatataacttaactaacatataactgaagttatttttgtggtttaggcttggttccacatattttctgctttaggagaaggtcaatgttcaatcctctttcattccttgtaataacataacaaaatcaaaattatttattaattaacttatttataattaaaagggtgtttttttttttttttataattaaactatataaactaaaattggctagttaccacaaaaagggaccacttcccttagacaatcttgagtctgaatcttcttaacactggccttgtgggcaaagaaatccgcgacaaactttaccgaacagctaatggaagtaaaaacaacacacacaaattctttagtcttaggggatatggactagattagtgggaatgtgtagtgtgaacagtgcaccctatatttgattaatatatatatatttatatatatatttatatatatatatatatatatatcttttgtaagtgggaatgtgtagccttttcatgagtccctcaatgttttcagagtataacattgagtttcatatcactttacccaatctcttttaacaaattctcacactacttcaaactcaaacattttggttgaatgtaataaaatgaaatagaatgaaaaataaataatttttatttttttttgtttgattgtattttaaagtgtttgaatgtcattccaataaaatgacttttttattatttttgtagaataactaatctattttaaaatagaaggaaaaattatttccatgtaaaatgataaaaaaaattaatagttttattatcatttttttttatacattttaaatataattctatttcattgctatttctacttccatttttattcttatttctaaccaaatgccaagaattttgaaaattctttgaagagcacaagaaagctacctaaaagctttttatgatcattttgtataatagtggttttttttttccataaatctttacaaaaatacttcatacctattactttgtaaaaaattataaaaagaaaaatactattctgtaaaataattttaaagaaaaattatcaataaaattaatattttgtaaaataatattttagaaaaactatctagtttcacatactattattatatattaaaatatacattactttgaggcttcatatactactactatgtattatgaaaacattcatgaatgtgctatatacctactttgaggcctcatctcttttagatcaagaagaagaaaacttcattaatcaatacaccaaatacaaacagttacacttctaaaagagaagctacaaaacacaagctccaactaattacatatcaatctttgaagtaactttttctcctccctagaactttctctatcttttatcaacataagtctatatttcacatcacttttaattttgctcactatgcaataaacagagtttgagtaataagaaaacaaacaagtgtttcggttgctccaaaaatgatagatcgcggctgcccaaattagcactcttatcctgtcaatcaagaccgaccttgtgttgcccagccaaaccatccagctttcaaagagcttggaccaaccttcaaagcctagccaaagaaagatagaggacaacacctgttgagacaaaatgcacttgaaaaataagtggcagtggttctcgggttcaatgtcacagactacacaattcttgtttggaatagggatgttcattcggcaaagcagatcccttgttaacagcttagcttgagctgcttgccaaagctgaaaagcatgctttggaatattgactccacaccagcagccggaaacacaacttggtgcaacatgctacaatatatcttgctgactttgaatttctcaccacctgctgcaatgatatcagctttgttataggttgtacgcagcctacaaagcttctccataccaacttgtatccatgctcatcttata

SEQ ID NO: 308279 - DNA, 1822 bp, Cannabis indica
ttataatgtagccattaagaattaaataaaatggtcaatgaggagagaaacaaagtagaagaaacatattcataccttagcaagtaaagtcttgccagttcctggttctccatacaatataacacccttaggaggcttgataccgatgtcttcgtataattcaggatgagtaagaggaagctcaacagcttctttaatctcctgtatctgggcatctaaaccaccaatatctgcatatgattccaatggagccttctcgactttcatcacagacaccatgggatcaacttcatcttgaagaagcccaacaaccgaaagaacctacaagccatcacaatgatacattcaaaaagatcagctgacaacatcatttccagcatacaacattaaccatttatattaaactacaaaaaaagaattcacaacacaaactatgcaatccacaacacgcataaagaactcccaagaaaccaagccaggaaatgtgaaaagggagtaatcccaagctagagataaagcatacaattataagaaacatacataataagacaaactaacttcaacacttgaacttgatactaattcttaatcaacaacatagccactccactcctagtgatactacattactattttcttacccacttagctagaatataatctcaattatgcttctttcctcgagtgttttgtataaatataacctttcttagcaaaataaccgactatgaattacactgtatgcaaaacgaacattgatttgcactgtgcgaccatagcatagagtaaattaagtaaggttgtgttgcaaattttagtatttcacactaataagttggtaaatttcattctttcctcattaaatacttccccaaatactaaagtccaataaaatcaatacactttattcaaacccaattcatttctttcaacattaaaatcaaaaaaccctagatacgaattaaatatgctttaaaaaaattaaaaattaaaaatcaaaccaaaaccctaaaattcaaatctcgttaccttattgtgcatcaaaattgcgcagccaggttccaattggtccttatcaacaaaagacaaaatccccacataatactcaggcccaacagaggaagaaacgatggcatggctctcatcgataagctcctcaagattaccaacgctcataggcgaacctctaagatcgtcaaccttggatctatcctcttcagctttctcctcctgaggcttgagtcgctcctgattagtaacaaactcttcctccataagcagataatccttgattcgctcaagctttaaaagcctcaacttgcacttagttaaaggggttacagtcggaagcctagccgcagcttcgggacccttttgcttccgttgcttgcgaccaactctagccggcggcgccgcgggctcaaacttcttctccttcttgtcgccgccgtcaggtttccgatcgccgggtaaaccctgacggttgagaccaccgggagttccttgacccatttttgttaatctgagaaaaacaaagagagaacgaaaagagaaagcttttgagtatctgagagttgtctttgggatcaagtttaacaattcttctcaattgttaaatatcagggcaatattgggctgggcattttaatgggctcataggtaaaagaagcccattttactttactatgggccataagcccataatacagaatgggctcatatgggtagagtggtcatatgggttatgatagggaaatttagatggtatactaacttttactatttttttacaaaaatactgccaggcggtatttttactttt

SEQ ID NO: 308280 - DNA, 1578 bp, Cannabis indica
aagtcaaaattttgtataacctatcaaaatgttatgttttaattttatgtaagtccaaagtccctctcaaaactcaaaaagaaaacgaagaagaacacacactgtatggaagaacccaaaaacaaaattgggcaacagcaaagcagagaagatgaaaattgtgtgacatgaattacatcacgagaacagtcagcttcttctagttcctactccctcttttgcaaatattccaattataattgatgttagacacaagtgttttaagaagaaataaagggtcagacctaatcattctttcaacctgctttgcaacgctatattccaaatctgcttctttttgcttggttcgtccggatttcgccatcctctttgattccaaaattctgggtagaacatagagctgatattcctcatgcaaaagtatatactgcatattttaaagtcaacaaaacagtcaacttcttcattttgataacaaaatgtttcattcagcaaatataaatagcaagtctcacctcatccctaaataatgttagaactagattttcttttagtaccacctgaaataatcaataaaaatgaaagaggtgagaaaaacaagcaatacaatattccattgaataaattaataaatgtttttaatgttatactcttcaacaggatcattctatttcacctcttacaaccaaaaataatttgcaataaagatacttgatagcatggtgattacattcatgcaaaagttctacccttgagcatggatgcataccattggcacaccgacaagttttacaaatcactattgtatttttttttcgaaataaaacagccctgtattacaaatcacacatgcatattgacaaaatagttattccatatggaagatgatttgaataaaaagcaaaatccactgggatttggctttccttatctacgtgtataagatggctaaaaacaaagaacaataataaaaaaacccactgactgaaatcacagtatgcattttaatgatctcaaattgcagtagctatgctcatgattgtggacgataaaataatacaattttgtaaaatgaaccagaagattatcaactaattaccgaattcaattttacaatcaagcaatttaatctattaaggtttaccatagcaatatcgatgctagtaacacgaagcagctcatctggacaaacaagatacccaaataacacccattctcgataagaagtaacatttgctagatcctgagctctctgcaaggagcaaaaagcatgaaattgcagttagctatcacttaagaaaaaaaaagaaaataatacggctaaataatgcagaagaagtaccattggatgagcagaatttgtaagaatatctggatatcgaggatgatacgggcttaaaaagccttcatttctaagttttcttgtatctgttgataaaaagataataggacctactgcctctaggacctgaaaaaagctcaaatacaaattataaatttcgaattgtaatagttgctgaaattactaaatcgtgtagataatgtttctacaagcgtgtagatttttctcggacaaga

SEQ ID NO: 308281 - DNA, 1973 bp, Cannabis indica
taattgaattttatttctttttactaacctaaggctataacgggaacaaatctaaaaaagtgggtataatttaaagaatattaaaagggaggtaaaaaataaaatggatacaataaagtggttatagagtgtaatttcctcattgttttttttttcttattttgcatcttgtgcattggagcacaattgtaaatagtgggctaaatatagcacaaactcattttttgtgccaaatttagcacaaattttagatcttccatttgagatggtctaacttaaatagattctctatgaaaactatagttcttagaggcgttcgatgatggtggcgtttattggaagaaataagatcaaattcatcagtgaaaagctaccagaacattatacaagacatgaaaattatgatctatggtagaggtgcaacaatttggtaatatcctcactacttcatgttgtgcaaagagaacataatgtatctttacaatgtagctaagatttggttcaaactttaagaatgatatcactagaagaattctactagagtgtttgaagctaagagagctatgtagatttcaaattaagatcctaattctatcacaaattttttttacttgattgaaatttttggagatctaattcaagaattcagaccacaacttgtttatagttatggtgctatgaagaccatatagaaatatcaagagaaatatcaagtttttgaatttttaatttgtctaaatgagtcttatagtaatgtttaatcaaaaatcttgatccaagatctattttccaaaatcaacaaggcctttgcttcagtttttcaagaagagaggcagtgaggaattacatctatttagactgagactaataagcctgttgcatcatctttagagaaatttgatggaggttttcatcctcataggccaaaaatggtatgcacacactatgaaatttttggtcatattatggaaaagttctataggctacatggatattctccaagtcacaaactgtatggaaagttcctgaatcaaaatgttggaaaacttgtgaaaccatcggctgtcaacttctcaggagcttaagaagaaagtgtcaaactagagattctaaaatgttgaacaagatctcgagtcaatccttgctcaatgtcagaaactgaagactttgttgtcccaaaaaggtcaagacaatattaatcttgttcaatttggttagcctttgctgtcataattttctagtaaaatcctttctaatcactcctctagttggatcatagatacaggtcttattctgctaaagtattgtgcattggaactattgtcttttcaccaggtcttattctcacaaacattttacaagtatcagacattcaatacaacttactttctgtcacttatttaatggaatctagtacatgtttattaacatttaaatctaacaatgtatgattcaagacatgtgttgttaaagatccagtttattgggatgggtgaaagacgtgagaaaattttgcacttaaatcttcctaaaacaaaaattgattcttgtgcattttcttcagtttctaattttgagattttcaatgacacaatatcgcactatattttaggacttccttcttgtatcaaattaaaattattaaataaaaaattaaactttcagaatagttcttattccatttgctattatacaaaatagaattgaatatcttttgtttctaatcacaatattgctgaagcttattttgatttaatttatgttgatattttgggtgccatataagacttcaactattgaggaaaatagatattttaatactaccattgtggatgatcactcttggtattcctaagtttattttataaaaaccaaatctgaagcacaagttgtaacgtccccgcttcaagcctccattgggtccttccacccacggaataatggctcttatacacgagtacgtcactctggct

SEQ ID NO: 308282 - DNA, 2058 bp, Cannabis indica
cttctttcatttttttgtgtacatatcctgcaaaatagctcttttcccttctactgtcgtaattggaagggggcaaaccttgctatgatttttgatggcttgtctagtaacatgaatccctcaccatcgactttgcctccttcgccacaaccagtagaaggaaggggtggtcaggactaaagcttggttttagatagcagtggaactttctatagtggctgcacctggatggcctcatttgtggaagcccctacagttggaatagttgaaagtgcaccaatcaccttaagtaggggtgatggctctttagttcatggcctcaagaagcttcaattttgaccttgcattttcctttggagaagacactcattagtatttcttagaacgggcatcgacaccagcgatcatcttctcaataattatcgttaatatggtttaggggttcttcgcaaaaatgaagtagattaaagttagatacttaaaaagcaaggttaacacataaagttagcaaatacaagttagacttttatttgggaacaaccattgactctgatatactagggtttttcctgatcaaacaatagtacgtcttcccagccaaagaagctatcatattagtcaaaattttggaacaacataactgtgtagggatctactccactgtctaagatggcagaaggaaatgatttaggcttcctacgatttgatcttccctatcataatatttgattatcgaaaatcaattgggttctatttcttaaaaataaggatcaaacccttccaaaaatagcatgcgaaatagatgggaggtattacctcttctagaggtatgggcacctgaagtgcctttgttgggtatgattgcaacaaaatggatctttatcttcactttcttgcttatcagatccggatgaaccagtgattaatccgcgcagccatttaatatgcttatggattttatgatctcttctaccacaatttcaatgatgcctaccttaacatttgtagagtccttgatgatgttgcaagcattgtacatgtcgatactttggtggtggtcgatcagtccaactcttctgagattatcagtggtgtccaatcctttcactttcagcgcatctaaagacatgctcttataatatatctcccttgctagcaggatggcagtggccactaaacgtttagtgttacctagaaatgtaaagtggaatattagcaaggtattctctgaatgcaaaagtaatttcaagaaatgattaaagaaaaaaagaatcaatggtgcttactaggattggtaaaatccaaagacaaggttagggccgttttcaatgggaaaccagaggggagaaccagtagtcctggatgtcttgagtatgcctcaaggtactagttaggcagaccaccttacacgtttttccagcttgtaagaaccaatctttgttttgtcctatctcatggcttacgactttacactgtaaaagtaaagtatctcctctggtgccagaacttcaagcttttggtctctatagagggtgtaccaccctaaataatgcttctacggttgtgggataaattgaaaaggagcaactccccttctgtgtagagattcgcaaaataactttggaaacgaagctttgttcctaccacaatgtgcacctaactccaagtgcgaaacccttttggacacacacacggtaacttgttcttgcgcaaaggcctaaccaatataggcatgggatatcacaaaccccacgaatgtttttgtaatatccccacttcaagcctccattgagccttccgcccacggaataatggctcttatacacgagtatgtcactttggctgcttcttggactgatgactggccctacagaccaacacaagtgtttccagcatacgttttcctcactcgtacgcttcctagaaaaactttccaggaggtcacccgtcctaaaattaccccaggtcaagtacgattaactgtagagttcttttgtgatgggctactagaaaaaagatgtgccttgttgatatgggtagtacccatcaatccattta

SEQ ID NO: 308283 - DNA, 1221 bp, Cannabis indica
aacaaaacaaaaatattattaaaggcaaccataaaatttcacaaaaaaattatgaagtcttaattaattaagtacaaggtacacctccattgaactatggtcaaacgtatgcatgcttaaattacatcaaagcgaatccttttacttgtttaaaaaaacaaaaaaaccaataatcattctagaaaggccagaagattggataacactgctttcatggggaaaacactagaagtttctctcagtcaataatatcttatatatatattccaatatttagaatgttatacactcacacatccttggtaataagaataaatacaaaactaatagggccatcatcacatggcgatcttgtattaactctaattcacacgccacctaaaaaccaaactattgtttgttacgtggtttagttctattcccttttaattattttagtagctaataaaaaccgaatatataataaacaaatcatgaccgtcaaatagatcatcctggcgtatgtgtgacatgattttgatgaagctaaattgcatcatttctagccccagacagagagacagagatgcccatttcaaaattttcttatttctttaatcccctactttaaataatttctttttttggtaggacaatggtttcatttaggttgattaatttatgatatataataataggttgataaaaaaaaaagagtcaagtcacatcgatccattacgatcgagtcagccatgttggctgttgaaagattatagggcatagtgggagttgatttgaataggagtcacctatatctatattctataccatactattccaatacaatacaataccacctccttccaaaactttttattaattatttcaattcattttagtcattacctggctgaaattggagaccgtcttagttgactctcttaactttgaaattggtatcaacacacaaatattaaatcatacatattctgatttttttaaatctttctttttgtacttagctcaaattcgaagttaatcgcagtatgaattataagataagtctatacattaccattgtaaatggaccttcccttatatctcttatttattaggtaagaattttttagaattatataggtgccgtttggtaacacttttgttttttaatttcttaatcacaaaatgaaagtaaaatttttgtttttaaaaaataaaaatgcgttctgtaaccacttttgt

SEQ ID NO: 308284 - DNA, 4726 bp, Cannabis indica
tgttataccaattttcgcaaaaaaataaaatggatactcttgcacaaggtctcacatgccaagagtactttgaagacactaaagtcaaccatgcgactttgactaagactcataaatgtcaaacaaatcaagacatcctttttaaggaccccagggcccttctagagagctcgaaaaggtcgagcaaccatttggcgccgagactcatacacccaagtgtgcccaaacaagggttcatgggcccgcgcgagcgttttcaccctagagacctcaatccgccaaggaaaccaataaagacttgacttgtttaggcataaaaatgacttaggtttatgtataaagtcaaaataggactaaaacaacaagaaaagagtaacaaataatcactgccataagaaatggcagtgctctccagccttagagacctgtgccataggatatggcagtgctctccagccttagagaccaatgccataggaaatggcagtgctctccagccttggagaccaatgccataggaaatggcagtgctctctggccttggagacccgtgccacaggcaatggcagtgctcgtcggccttggagacccgtgccacaggcaatggcagtgctcgtcggccttggagacccgtgccacaggcaatggcagtgctcgccggctttggagacccctgccacaggcaatggcagtgctcgccaaccttggagacctctgccacaggcaatggcagtgctacccggccttggaggcctgtggctggagacctgtgccacaggcaatggcagtgctctccggccttggagacctgtgccacaggcaatggcagcgctctccagccttggagacctgtgccacaagcaatgacagtgctctctggccttgaagacccgtgccatagagaacgccagtgctcgccaaattggaggcttgtgccatagtgaaatggcacaggccgattaccacaccaggaagaggaatttattgagcaagttatattttcaacatccatgtaccaaatagaagtgagagacatcaccccataacttcttacaagccatgggtgacgtgtgccattatccatccccaactgatagcagtggtcaccttttagggtctcggacgtcgaaatgaggtttttgggtcatgagacctccaaagtatgactcgccatcaaaagaacaagtcaaaacacaccccgaagggtttgagaacatgcatttccgacctctgccatttggtaatggcagtgcttgcaactggtataagacaacataaacagactttagtaaaataggtataactctctcaatttttattcaaaggacctggttcaacttgcgttgtaaagataattttgaaacggatcaaagtgtgtctcgcagtcatgacttaattctgaagttatcgagtccaaaattagcttacaaggaaacctggtgcattttactcgaaaattaggaaatgcgacgctgtgagattcggtggagcacaccgtcacagcctatgtggcgttgtgcgcaagcatcggcagtccaaagcacgtgtgttcagcactccatttcaaattggtgcatcatcaaccgaaaataaccaattgtccagtattggtgggatatttgcctagatacaatgagattgttattgatatttatttatttgtaatattttattcataaaaaggagttgtatacgagatttgttagtaaaatatccttatatgtaagggatcactaacaaaccctctagcctatatatacatcaagtaaaggctgagaaaggaagcttgatcttcatcttcttcttctatctagcttcttcctttggagatctttctctcttttttggatcttcctcatcgtgaccttccccttgaagtttacttgacaactgccaaaaacactatattatttccatcaccttcttcattgagtccaccatactcaggcgacaccagacctcaaaacaccatttaatatatacttttttcacaaattattggtttattgttcccaagaactttacaacctttaatttagatcatattcatgaatatcaagtctcctacatgagccttatattcataaatctcgattaagatttcatctagaaattctttgctgtacttttatccacacactcttgagaacataactctggtgtgtcggatccaattaataaaattacaagtagacgtagccccattaccatcgcgacatggaggtgaactactataaatcactggtgtccatttaatttattgcggttttatcagtcagattatttaccgtggtcatcttttatttacgatctcttagatcagttgacaaaaaatcacgtcaagaatatatgttatacataaattttatgtgaatggtgtacataaatagcataacgaacacaaataaatgacatactaataaaataaatgaaaatgttcattttagttataaaaatacaataaaatttaatatttactaatcaataaatatatttctttagcgaataaatatttgatttctatgtataattaacatcaaatacatataataaaaaaatattttttatattagtttttaaaaatattagataagatttttctgttcaatcaaacaaatgttattcaattaacaataatatgattacatattactctttacaatcaaacacagtttgcacgtttccctacgattatattctccttcataatattttttataattaaattattttgaatactttgtaccaaacacccttttaggatatttttttaattaatttatctaatttgattttgttatatttttgtttgttagtgtggtcgtttgattttaattattaataggttttttattattatttgttttattaattgtccaatgtcatttctcatataatatgagaagattttgtggtatacctaggtgtactcatatattttcttgtattttcgccttttaagaatatattattttttataaaatacataattgtattcgttgtaattgtttaagacatataataaaatattaaaaaaaatatacaaacaattttttattttttttaggaaaatcataaataaaaaatgttgaaattataattatatatatttaaaattaaaatatctatcacaaagacaatgatacaaatatataatacaagataaatttataatatacccgagttatttcaatagaccctctatttattttactattcaaaagatctttttattagtctttattttttttttttttattgtattgtataagttgtagctatttagaattacctgtaacttttcagaaaattctaaataatttatagtgccgaaaataagattcaaatatttttttttgcactcgtgattattttttcatatgcgtgtgataagaaactcattgaactttattttcggcacaataaactatttagaattttttaaaaatttacaagtggtcctaaataattacaacgttcgggaacatgaaaaaaaattggactaaaagctcttctatgtcaaaataaataaaaagtttaccgaaacaatcttttaaaaaaatgtattatatttccaataatataaaatcttataaacaattactaataatataaattaaaataattaaaattaaaaatatatatttataatagaaaaatacttttacttttctaattgaaataaaaaaaaaaactgtattaataatacatattaaaaagtttcatgtacaaaattaaggaaatttctgtagtaccggatattttggtagaagctcttatttgttttgaaatccatataagttttttagttcaatttttatagttatttatggttacttataaacttttccgaaaatcctgaatagtttataatgtcgaaattaacgttcaaacaatacgtgtgtaagaaaaaaaaaagttacatgtgcaacaaaatattcaaatcttatttcggtattgtaaattatttagaatttttaaaaatttacagatgatcctaaatacataaaatgtacacgatcatgaaaaaaaaaattataaattcttttacatgccgtaacaaataagaaatctatcaaaacaaccctttaataattattaaactaaactaaactctataataatatatttttatttaattgttatatttcataaacaaaaatatgaatcattaacaaaaatgagaaaataatttgacacaaattttaaaactaattcattctcgaaagggacacactaaaactacttttttgcttttcttgataaccatagcaaataaaaaaaaatgtatataatggtaagtaaaacaaatatgtataaataattaaaaaaaaaatgtatgcagagaatccattttgtttaatgtgaatttaaaattgtatgcttttatcattggtgagaaaactgtcctcatagtataaggaacaaagagagaccctaatgtagtaactctatgaatatatgtatatatatggggcaagattatggtaggacctagcaaaagttccctaccggtagggtattttttttaatcattgattttagatcgtgtggttattataatataagacgtatactcttacgataagactgcttgtatataattaaaattttatatattataataatatttaatgatatatttatttaatttaaaaaataaaataatattaataatttataaaaaatatagtaatttttaatttaaattattattattttttaa

SEQ ID NO: 308285 - DNA, 2586 bp, Cannabis indica
ggatgttaattcaacatacttgttagtaactctagatcctcgtaaaatattcctaacaattttgtatgtttaacaaatgttaacttcaaattacacaagttaaaccaaccactagaataaaaaaaatcatagatagtaatagtcttacctcccattgaaagggtaaaatttggaagagtacaaaaacaaaagaggatgaaagttggttgaaaaaaaaaacgaaataaatgcagcaaaatgtggggagctggaacacaacaagagaacatataggataaggcaccaaaaacgaaaaagaagcagaacaactaaaaacaacagtggaacaacacgaaggaaaactgaacatatattggagcataggatactgaagaaaataaattacatacaaatttcgttattttcctattataaataaaaatagagcagtacaataatatttgaaaaagagtgataaagaaattaaagaaacagtagtaaaacaacattaaaacaataataaacaataacaaaataaatcggtaacaaaaaaagataagttggagaaagagggtggacttcgatatacgatagagatggagccaacactttgagaccaaagagactaaagaacatgaacttagtgagaatttctaaaagatttctacaagaagctcatcacagagcaacctctccaactctctcacacacacaaccacattcttatctttcccaaatcctattctttttcctctttcacatactttttttttgttacctactacaaaaggagatgattaaattttatttgggtaatattctagacttgggaaaaaaaaaagaaaaaagaaagaagaagataaacaagggagatagagctcaaaaacaatgaaaaacaaaataaggtatgtatttaattatttgcgaaagagcaatatataaaaatacatatataaactattgggaatagggatcacgtgggttgtgcctaaattttaaatttaagtaaaaaaaaaaaataatcacaaaagtgacataagccatcaatcaacttttataaacacatttaaagagcaatattatatataaacacatatataaacttttatgaatggtatcacctgggccgcgggcttaaattttaaatttaagtaaaaaaaagaaaatggacatcaattaacttttacaaacttttatatatatatatatatataaacacatatatattattataaattaagtaagcttgctcaaaactacaaaaaaaaaaaaaaatagatacacagtaaaaatgtaataattgtcgtgcaacagtaaaaaaaataaaatggaaaaaatcaatatgaggtgtaaattttacataaaaaaaaaaagtgacagcaaaagtatcttaacttaatgttttgttgcaattgtgctattctagttgttaaatgccaagttagcatgctaaatgccacctagaaaacatgtagtgttatatcattggaccacatgataaattattaatttagaattaaaatatttatttaaaaaaattataaattttagcttttttataaataaaaaacacatgatttattaaaaaaattatttaaaagaaaaaagatttggaaatggggaaagatgaacgtgaacatagaccctcattctccaagaaaaattctaaaacctcctttatattgtttattgaaattttcaaaaactaattaaataagaactttagaaatagtgacttacgtaataaagaagataaagatttttacgtggttcaggcgttaatgagccctagtctagaagtcagtatgttgcccttaagaggctaaaatgtattttacagtggtgtttatagaaaaactcgaagaaaaagaaagcgtggagcagttttaacggagtttcagctattaattttttgatttccccctttgtatgaaaatcaagaggtatttataggcttaggtgtaggtatgaatatacccatgacatgtctagggtttcattgtaattagcccactattggggtaaaatacatgtaatcatttgactgttgggcttccaagaaggtttatgatcgtgcgtagaagcagctgggcaataggggaccataattggtacaagatatgtgtcgccaaaatgtttgaccttgaaaagaagacgtctagacaaatcatcaggcaaaaaggcgtgtatatgttagtttttatggttcatatcagagtcataaaagcggatgcagaatttgataaaaacaatttttatctaatatgaatcataaatccgaggatctcaacataatatatatacatatagattaaatttaaactactgaaaaaaaaagattatacctcttgaagcctatacacgtatccttgtttcctttcatataattatcgaacatccaatccaagaactttgttgaagaatctccaccttgatcttccaagccagcctcaacactcaagaatagagtcgtctattagatcttattcagatgaacaaatttaggtattacagttgtactcaactcatgagatattgtaatagagttagggttttgatcccacacacacctacaatggtgtatacatatgagagagagagagagag

SEQ ID NO: 308286 - DNA, 2013 bp, Cannabis indica
taatattttagtataaattaaagtttaacatagtattatataaaaatatgatatatatctaatttaatataatacaataatacaaccttatacgacgtttcaaacgaaccctaaatctattaatcaatgcaagatttttcattgactcgggctttattcactacaagaattaccataaataccgttcattaataaagaaaaattaaatcttataatcattataaaataagttttagagaatggaagaaatagacaaacaatcatattatttattggtaaaaatctacttcaccacattatgagctacaaaatttaaatttaagttgtgaggttataaatgagactaactttacaatccaaagtctttagaatatctctctcaaccgtttaatccataagcatattcattctacgttcaacatttgtaggccatgccatactcaaagttaaatgggcccattcgagataggctaggatctagtttcaaatcatgagcactcaaattgggcccattctgggcttggcccatgaatctcacattatgtaatgtcaaacaccactaacaaggatttaccatgcagagctaaatttgcaatttgccaatctctttgactaatgtaatggcttccactaattttagcttttggtagtgaagtaatcctattaacaatatgcagcggtattagtgtttcacaatgtgttttgattgcaataccattcagtttgttatggtgtaaagaagttctactagtttatgttaatcccttttacatttacattttaatgttaaaataatattataaaatatctaagtggcatacttaagtttaagtttgcatctttactgttggaaattcaatccaaacccaatctcaaatccaaacacgaacaaacacaattcgaacaaactgaaaggaagtaaaacaataaataaaagatatatacaccgaactatagagattcacacttcctttaaaattagttgaagagtctatttctttcttctgaactcccaacaatatagattcaaattcttgcactatcatgattcaagtttactattacaaaaccaggtgactaaacaagttgcctaagaaaactctcaatttctctctatgctctctctctttctctcactataattttgggctcgagaaatctcttagtttagattatctcccaactaagttaggaatctttatgtatagaccctagttagtggggcttttaaaagctatatttgggattctgaaacttcaaaaatacttctgttgttagttgggtaactaatgaatttaaacttttagctctaaaaaatatttttaattttaacagaaactaactttagtagctttctcaagaaaatttcttgagaagttaaaagcagaaagaagaattttaaccaaacaagacttaagcggactaacttcataagaggagacacaacggactaacttcataagaggagacacaacagacataattgcaaattaacaaaccaaaaaatcaagaacctaactaaagaagaatgatgtggtacatagacaaattggatgtgatgcaatatttacattactaaaacaatataaataaaaaattacatctttactattacattgactattaatattaaattaactatgcttaatattaaattacatttgtaaaattgactatgcttacattgtcaaactccatactcgtttgaaatataactatgtataagagctgttggaaatattgtgaatattttaacaaaatatataagtgtcttagtgtgtgtgagttggaaagagtctcacatgggatatgggtataaagagtgcaactttggcatttgggtttgggccccaaggggtacccagttttgtgcgaatgggtttccgactgcttgcacactcctgggcagtgccgcgaacgtcttaaagagagcgacttagtccgcgactcaacccagaattcttcattcggtaatatcgttcctcttttattttgctagcagtttactcaaca

SEQ ID NO: 308287 - DNA, 1786 bp, Cannabis indica
ccacgtattttgggcgaattctggagcaacactaactaataaggttaaaggggatatttttgacaacgcttaaattagagagacacaattatataaatgatatgtttacttagagggaataagaatcaatagtatgatattaatttcaatataataatttattaaattgtggaaagagagaaagtagtggggttcacacaaattagagagaaaataaagaataatgttctctcctcatttttatagggaatactttctcctttattaatttagggaaattttatttacacctcaaaaatttctaaagacacctaattttaataatttttattttatataaaatttgtattattaattgtactaaatttttttaaacttttttcttccaattcatattcttaaaaaatttacctatcaaacaaaaataaaattatattaaaaattaaaacaaaaaattatatttaagtttatatttttttaataatagggtgcatttatcattttatggggtacaaataggaaatccctcaacatcgatgagaatatgagcgttgtttgcccttaaaatttgctctgtggcagttgtgtttttgttatttctttttaaatgttttctctctaattttgttcccttttttgatcataacttcctcttttggtctataactactcccgccctgccatattcaaaatctaacctccttcttccctagttctttctcccttgttcttgcttctgatagtgtttccacccttgcttctaagatggattcgttccatcctgacatctccaatgccctttccattagagaaagagaagttgttaacttgtccaatctccctacacctccccaacgtcctgtttcccaccgaattatttgcagaatcttctctcacagaggtttcaatccaaagcaacttattaatttcttcaccactcactggaaaggccgatttgaagtcacaatttctacttatgaaaaggattcctttatgatcacctttggttgtgaaggtgacttaagaagagttctctctaaggaaccttggcattttcataacaaacacatgatactatgcactccaactaatctgctaaatgctccacttgaatcttatactacaactcccttttgggttcaagtgctgcaactgcccttcttgagtaagtctgaatcacttgcacgggttattgggaacttaattggctccttcattgaagttcatgaagactccctttacgaaggatggggtccgtttcttcgaattcgtgttggaattgatgtatccaaaccaattctacgcgggcaaactgttacttttccttggatgtcggatgaattatggcttgattatcgatacgaaagacttccagatttctgctacgaatgtggaattattggccatgtagttgacaaatgccccacttgcttggaaaaattggatgacggcaaagaacctggccttccttatggtccctggttagaagggtctcctctcccaaaatccaattatgaccgctacagacaagacttttctaaagcaggtccctgtcctttcatcactcgcctttctcgcaacactatctcccacatcatccctcacccaaagccactccctgcttccccctcaggccacttcacgagaaaaaggaaaagctgtgatgattgacaatgacaatcctctcgctgctcttaaaatcatgtacatgttgggttttataccctaaataaaactccatttcaatgtaatccattttattcaacatcaataaagaaacataagt

SEQ ID NO: 308288 - DNA, 1942 bp, Cannabis indica
atcactttttggcacactattggagtacactttttgttaaaggagctatattttaactttttaccacttatttacacttatattgaagatgctctaagtaagatcctcatcaatggtaaggtaggtcaggcccacctggatatgtctctccgggaacccttctagttccgtactcacagagccttccgccttcgtctaacctagcccaaaagacacctccagtatcacgagcctgaaggggagagatattgtgttctcagaagaccctttcgttttccctatttatcctcgcctataaataaggaaatttcaaatgtcagatctggccaaaatatcatatcctgatataaggggaaacttcccataacaagtgcgatgtggttatttcagaataattgcccaccattagtggacacggttttgactcgatcaaccaaactccaattcgcctagtcagtagattgtattgttcatgggctaaacttcatgaaaaagcccaaagatattgtttaattgtaaactcctcagtagagggaaaaggggaaaccctaatataattctctaactactataaatacccccactaatctcatggattagaggttgaattttcttgcatactttgctcaggcaaatttacgaacattcatcgtatgtatttcttaaagtgtttacaagtaaatagattattcaataaaaccgactcgtggactaaggctgattaacaccccaaccacgtaaaacattacttatctcttgctatattttctctttcgattattattactgcagttcttattattttcattccgtttttgaaaatctcaggaaatattttggtgctttcactaagagttgaaggaagcagtaagaccaccagcaaattacttttgagtaatcatggctctcactagaaacaaatttggtctgcgtttcaccgatccatattccaaagcaggagatacgagcgatccccaagaggtgactagccgctaggaaaacggtcgagacgaggaccagaaaaatataaaaaaacctatgtgcatagtgaagcatgtttcgcattcaattttgagacttttatcgacattttagcgacgacatcgcaataaaaacacatttctttaaattaagtataaaataaaattatagacattcaaacatatatagcgatattgttttcgacatttatcgatatgtgtgtaaatacttacaaaaaactagtaaaatataaaaaacctaatttactctgtactttaatcaccaagttaggttttggtaaaacaggtccacacgccaccgttctctgtacaccgacatttgatcatcgttaattttctctaaagatcggttcatcatcaagtgttcgatgtattcaatggcgtacattccacaatcaccactacaaaaataaaaataacaattttagcgaaataggctacaacaatacattagtatgggaaattaagatagttgtatggttgttacctattcttgctttgatgaacaacctcacttgtcatgcgttaacatgcattaatctcacttggctactatccccaagtgtgtgagtgagaatatcattgttggtcgtgaaataaccaattgaacacaagagatgtgtaaatagctccttccaaggtgtcataaaagtaccaaaaaggttgtcgtcccaataagagatgtcattgtcctaaactcgaatctgccacaggtcaatgtctacctcaacatccacccaatgttctttagcagttacgttcaaggcaaagtatatgtaaccttggtccttccaacatggtaagaatcgctcaagatgaccgacgtagtattctgtaactgcttgtgtaacaccctaactagcataggcgtattacgtgatttttaaacatactatgcagctcgttgctaatcaacgaggtttatggaaatcgtgattaat

SEQ ID NO: 308289 - DNA, 2411 bp, Cannabis indica
atatctactactcgactttcctgtggcaaattgggtcaggacacgcgggtttgacaaaacatgaaacaagattttgcacgttcgccacaatacaaaatttatgcaagtagtgttagtgtccgtactttataaatttttcgtgtcacgggttgtgttcatgtcggtagtttttcagtaaatgtaagacctcaacaccacacaaaaactacaagcaaacacgaattgccacccatactctactacaccaagaaggcatcaatgaattaccttttggtttgttgattaagaccactgttccattgggagaatcccatcttggaggaagctcagtactcctagtcacaaggtaaggttccccattatcaactcccacagcatcatccttactgggaactttcttcaaacacttaaagaactcctccaccttcttctcagtaacatcattactaataatggcatccttccccaattctctactccttttttcttcctcaccttcatcaaagaaaacaagccccttattactatcaacaccatcaccaccctcaactttctcaccatcaaccttactcattttcgccacaactttcccctttcgattctcagcaataacaacattcgaatttgactctccagcttcaagaaatgccttgtccaaacactgatcaggaaaatacttcttctccaacttataaaccatcttataatgcttatctttctcccatggataacaaaaagtatcgtaaaagtacaactcttcttctcgcttatgcaatctcgaaaactcaaccacatcaggcttcaactccacaaacccatcttcatttctcctcctccaatcttcttcatcagaatctgttccgtacatcctctgcctcctcttgttatagtactttctcttagctttatccatctccataatctcagagctgggtccctccgtttcattcttcttcttctccgaagccagtttctgatcgacccacccttcaaaacccaattccgaaatgggtttcgaattctcctcctcctcctccttctgctccggcgagtactcggaattgggtgtggtgcatcgaaggggtgggcggcggttgtgagtctggtcgagtgaggactgagttggtcggttaatgatcaaatcgtattgaagtgggtatttcgtagaagtggaaaagggtagtgaagaagaagatgagactgagagaagagaagtggttgttctatttacaagtttgagggttgaggaggaagaggtggccatgaatgttgttggccgagctaagaccaaagatagataattggaaaggaagattgatttcgccattgccgaaatgagaacggtgaatggtggcctctctctctaaaatctgggtttaagcatggttttatcagtaaactcgtttgttgtttctggtgtttatgaaaagattggttttttatttttttctggtctttgggcgttttatatcgtttgttccaaaagtatttatacttttaaaaaaaaatcagttatttattattttttttttaaagcaattatttattgaaaattttttcattttcatatttaaatttaactttcaattataaataaatacttaaatttaatttttaacggtaataattttaaaatttctgtaagtacgtagctattaaatgttaagtaaattgttgtgtctttttaagtaatagatgtaataaaatataattgtttttaaacttaactgtgatgttaattaggtgattgattatttggtttgtttttctaattctagattgcaagcaattattttagctaaatgtaggtgtagcaattcatgtttgtgggtcgtgtttatgttgtgttgaggcttaggtattacaagtaaatgtcaaattcaatctggactcatttattaatcttatcaaaaactaaaactcaaacctaaaccgcttataaatggattgacctgatccgacgcgtttaatctatttatataaagaactattcttaatttttgatcaacttattaacttattaacatgtttataataagcttaacatatttacaatcttatgttaaaacttttctatgagtaatttaacatgtttataccttatttaattaaaaaatataatttaaatataataaacgtggtgttatcgtgtctaaaccaaattgccacccttaactaaatgttatttataaaattccaattttttttttcaaaaaagaaccaattatagtttcttttcaaataaatattaaatattctcttaaaaaaataataaaggggtcttttcaatattatacctaatattgattttatttataaaaatacctttaagaaaattatttagcacaaataccgattgccacgtcagcataaataccgaaatataaaataattaccgaaaattgaaaaaa

SEQ ID NO: 308290 - DNA, 1904 bp, Cannabis indica
ttaagtagagagtaaaagtatatggagaaatccactcacaaaagtgggtactttttaatgaaatataatatgagggtattttttattaataaaaataaaaaagaggtatttctcaacttatcacttttttttaagaccgaaccaaacataacctttatccttaaatgcatctattttcatctcttaatgggcatctccaactggacttcaaaacaccaaatatagtacagtttcataccatttttattccaatgggacactaaaactattcttataaataggtttgtctacagtgtcccactaaatttagtggagtactgtagaccacactatttttgctttttaagtttttaataattaaataatactttttaggagaaaaaactaaattattatatatatatttagtattaaaatattcttcttatattaataaaataatagaataataaataatataaaatttggtgtaatttttaatgttgtgattggaattgaaaaaaaatttagtattgaaatagtaatattttggtgttgatttaacaccaaatttagattttaccattcgagatggcctaagtgccaaataaaaaagtgggataaaatattccaatgtactttttatcttattttttatttgtctcaaatatataaattgagataaaaagtctcatttcttgtagtgattttttgttatttttttaattatttttccaatttttgttaagaaaaacgtatttttataattttaaacttttataagcgtattttaaactgtaaaattgtaaataaaacataaaaaagaatatttttgaaaaaatttctttttaatttagggattttcgccaaattgaaactaagttttttaatttagggatttcttttttcaaggactaaaatgatcacaattataaattatgggattttccaaaaaaaaaaaaaagaaaatggtgtgttgcaaaataaataaataaataaactatgggcaaaaatttaaatttaaaacagaaggcaaccgaagtcccgctctcaactctcaaatctgaattgaattctttcagtagcttaattaagtcctttaacaaaccatggccatctacccagaatcccaagctgccaccgctctacacgaccctctcttgccatggctaaggtaatttcttcttcttcttcttcttctccctcttttcatgagattcgccagttttataaatgtttgttaaaacccaggtcgataaggaaagccctcgaagatttgaaatcggggaacgattcctgcttggaactcaccaagcttgtatccgattgtatcaaaatgtttaaggacaacgctcggtaccgagacgacatcagattcctcaagatttggttcctccatgtacttgcttacaccttctgtttcattaattgcgtttcgattgattgtttcgttactattttctacaaatttggagggtgttaatcagtaaatatacgaatgtgtatgtatacgtgtgtgtgtgtcaaagtttcattttgttcaattaagtatattcattcaagaaattgacatgtatttatgccattataccaaaatgttccttcttttaaattttttagttaataaatgatgggattatttcgcttttgtacttaaataggtaattcttatggtttcttgaaatatttggttcttttggatttgtagatcggattttgtaaagattatgctagcatttttacagaaatgctggagaagaagatatgtgttggccaatctttactttatgtgtggtatgcttcatatattgaatcgaaagggaagctgtacgaggcccagatggtttatcagatgggaattatgaggtctcgtttgctcatatgtgtttttagttttttttttaattcgtctgtatgccctttgt

SEQ ID NO: 308291 - DNA, 1055 bp, Cannabis indica
tcgacataatttttccttctttctagcaaccatcgctcttcaagagttttggtatagatttcatgccctataacaatttgttagttcagtaacagtttaatgacacaatttaaacacaaacaataataaaactactataaacaaccatacatgtactgttgtttttaaaaatcgtcctatatttctctaaaattctccattgtagtcgatgtcatgaatttatgtacaaaacttaattattaaccccgaacaacacgagaacaatgttaatcttaaaaatatttgagtagaagaattgtgtttagttaaaatccagtataaaagttattatttaaaagtggacagtataaatgtaatactcaattcttccacttctgttttttattcttttggtcaatttatgagtagtgtttaattagtgcaaaccttagtccttgacgaatcattttgtggtccatgataagatttttattaaaatgtcatgtaacacacgaatataccatatttgtacatatattttctagacagtaatccactctatccactatggaatgaggtttttgggtttaataatgcaattaatggagatcaatcgcattaatttgacaattataatttagatttgcttttagatattgtgcttaagtagtgctacctcaactttattgtgatgatgaaacacagacacacatatatatatatatgtacacacatatatagtatatgtattgctcaagcagtgtactctactattggactatgtatataacatgtacttaattacttataacctacgtttagtggctaccgaccttaattaattgcatggtaaaccacccaacacaaatattaatttctatttttttcttgtcagtttttatctcacaattattttctctcttcacactcattcgcattgctttattatactttttccatacattatttttttctcctcatattgtcttctagccatctcatcacaacaaaaaaaaatatatattgttatgaaataatataaaataatataaagtagatgagaagaaagaagaaga

SEQ ID NO: 308292 - DNA, 1552 bp, Cannabis indica
ttaatcaacatacttgtgagtagatctaagatcctggtaaaataaattccaacaaataaaactaagccacaaacaaactctaatttagctcaaataatacaattttaacttcagaacataaattcaagcaactaaaacaaccacataaccctaattctaaaattcatgcaaacactctaactttgacattaagaaaacataaaggaacaggctagagagttttaccttgtgttgaatcactaagaagcttgctaaagtaccaataatcagctgaagaaacgccaacttgctgctggttttccaagggagtgaagtgagagagagaagttgattttttcttaattttctaattttaggttgaataaaataaactaatgtatatcaaacttaattaatgaatattcatattattaaatctaataaagctcactaaaagataagggatcaaatggctaaaaagatattttacccctcaccaaagccaaaaagcttcaaggtggtcattccactacctcgagtaattctcgatattttcaatgtctaactaagtttccatgttactacaaatatgctaaaatgtgattctattggccaaacactgcgttccaatattgtcgggcacaaaacatgcaaaaacataaagttttatatatggcataaataataaaccctaaattctaataaacttccataaaatcataaatcataattaataatctagtttcataattaagccctaattatctgctaattccaaattaaaactgaccagtctttacaaccaaatttaggctactgaatttgtgttacacgtgcacaattacaaaatctagaaatatatataattaataagaatataataatccaaaataattaatataaaagacatataacaagaaatactaggattaattcaaattcactaaagcattttatcaataatcaaatagtataagaaccttctataaataaataccaaatatttttcaaaataaagtttgtcatattcatgctctccaacttttcagatcaatgttcttcacttttatagtttgccaaagacttcttatttctgtttctaacttcactctgtaaagactctttataggctctttaaagaagtgtttaatattgtgacagtttcttgaaaaatgaatagaataagaatacacactatacaaaaatttgaatttagtaacatttaaaaatgttattattgcttaattttagtaacatttactgttttaatgacatttcctacaaatgtaagatataatgatgtgagtaaaagtgtaaatgttactataattattttggtatcatttaaaaaaatgtcactaaaaataaataaaaagtactttgaaatattattaaatttttataataataataatatttatatatttattattatattaaatatatataatacataagcagttggattctttttcctttttaaagcgtataatgtgaacaatttgataaaattatctcttaataatttcaattgttaaacaacttacagaacatcaatttcaaaaaaaaaaaa

SEQ ID NO: 308293 - DNA, 2009 bp, Cannabis indica
ttttttataaaataactataaaataccaaacataacaattaaataactaaaaaataacaatataataatagataaaatttaacacaaaacagagtatataaaatatatataatattttcttaaaaaaattcagccctacaatagaaaagagaaaaagaataaaatttgatgtggtgtaaaaaagggtaagttgaaaaataccacttttattaatcaattaattaaatttatctctaattttatatttaattgaaacataactctttttatatatattgtgcccaaaataacctgacataagaaaatcacatggagagtattttgaagtgacaggggcaaaattggtacaatatttaaagaaaaaaaaaagtaaaaataatagactttaataaaaaagataaaaataaaagaagaacaatttaaaaagagtatagagtctgtaaaaatcccttatgcgatgttgggcttcaagccttgcatttccgtgtaatgggctacgctcagatatggagtttacccaactaacttgttcttttttgtctttttacaagaggacgaattattttacatcaatattgtattatgttgttttatgatacaaatattttactaatggactaattggtgactcatttataacgaatccaaatgttggtgcatgctaaaacctatataggcttacattacaagagaacttgagtgatgagttttacaagtttttcatttttggtacaattgagtagtgaattaaagcttagttaacaaaacctatataggctacgtactgcccctcttctcatcattatatcattatgtgagtctctctctttctacatgactgtgattgggtgaattatatatgtatatttttttttataattgttgtccactaagcacccacaaacaaacattaaaaagtgaccgtcaaacaacaaaactaactattgcaactgtagaaaacaaagaaaataacgaaaataactaatcaagaaacaagtttgttatggctgtgagaaaatagttctactatatttttctattgtaacttttagttataagatcactgaccattcttacacataaataacaatgattattcttatttaaattagttgagcaattcattttctattattcatttttttttaccttcctctctatatatatattctggtcaagttaaaaactctgttttttgaaattcttgtatggtataagagaaagtctacatgacccaatctccaagtttcacaaatcttcattatccaaatcatgcgtacaaactcaacaaaacaatatatagtctccagcaagctcctcaagcctgatttgacacacttaaaacactctactgcaatggagattcagaaactcaaggtcagatactattcttttctacatacagaaacacaattctctattactattattagtgtatgttgacgacatcttcatcacatgtgctgacacaacataaattcagaccattatcagtgcattacaatctcaatttgcactaaaacaacttgaatcagtgagttatatttcttagttttgaggtcattcgagacaatgccactattttcttcattcaacgaaaatagacaaaagatctactcactcgcacaaaaatgctagatgcaaaaaccacagtctacaccaatgtgtgcaagcttcaaactgtctaatttgtgctctacaatatctttgcaacatcaggcctggcatttcatttgcagtaaatcagttgagccaatatatgacaaaaaccaactacagaacactggggtgcctgtaaacgtgtacttcgatacattgcttggacattactgttggattaaaaatccttttgtgggcacatatgtataatgtatatgctattataaagtgtgatacaaaattaagtgaccaattatgttatgggtatcaaaagggtattaaagtgtcatggaattaatgtgtagataccataagttaatttataatttgttgaggggccaaattataaa

SEQ ID NO: 308294 - DNA, 1177 bp, Cannabis indica
ttgaacatatcctttttttattttttttactcacgtacttagacttggatctcgaacttattggattaagacccgaattcgttcggggtccgggttcagggttttgagtccggggttcagggttttgggtccggggttcagggttttggctctagagttcagggttttggctctagggttcagggttttgggtctggggttcagggtttcgggtccgggatttagggttttaagtccaaggtttagggttttgggtctgaggttcaggatttcaagtctagggctcagggttttggtgtggttcagggtttcaggtcgggttgagtgtttcacgtccggggttcagtgttttgagtttggagttcaatgtttcgggtctggggtttagtttgaggtgggataggttcatgttgtggtatgttataaatattgactttctttttctaaaaaaataaatcgaaaaatagttttaaaaaatttgaatcaaataatattaattaatttttaaaataacaattttttttttctgtactcactttaaaaacacaataaacagcctccaagcttctcttcattgagagttccatatctttgcccctttatgtatctcatatgaaaattaattttaaaaatacaatcatcaattaaaatagaagctatctcacatgaaaattcattcagagacataaacaaacccagatctcccttgacccttcgcctctgtttcttgtcgttctccattgctgagaagaagaaagatcacctcgatcccaagtcctctaagcctgtcgacctcttccttaattgaccttttgccaaacgaaaaacaagatgaacaataatccatcttcgtaacatttatttatatattaattttctaataataaaaaaaaaaaaagacacaaacgtctaatttcttaatctttttaagtaatatattgagttagtgtattttatttattttataataaaaaacaccaaacaaattattcttattcacatagatacatacacataaatttaaatatatatactaatttatttattttagtaatgaatacatatatattttagtgtaaatctaaaaatgagtacatatatattgacatatatgtatattggtttgatttatatataaattgagatgaaaatagattattattggagattaagaaac

SEQ ID NO: 308295 - DNA, 696 bp, Cannabis indica
gtatttttaggttttttttgttgtttttttttttttttttcttttctatataaagtttattttggtatatttcttcttttgaatagtggttaattcgatcgtttctggagtgggtaaaagaagacttgaatattgtaattaataagtttgaatggtgcattgtatatttttttcagttattcttagtgaggtcatgtgagaccataagtcgtatggaaaatataatttagagatgaaaaggtaaatgggtctctattttttccatgtagactactaaaaggcaacttatacttgtgtagaaataaacaaacaaatttggaattttgagtttctacgttattagtgtgcatctttttattttcttctttcttttgggtgagtgagtgatcgtgcatcttcgctaatcattcttcaacagggcaaaatcggccccagtttaattaatttgaagacaaaatacaatgattgattctctcaaatatgaagctaatttttctatcttacaaaagattataaaataagttttagttttaatctcaaagcttgttttggcataagaagaaatttatgacttgtaggtggcgtttggtaacacttttttaatgagttttctgtttttaaaagtggaaaagtgaaaatattttttaaaaacatgttctataaaactgtttttacttttcaattttataattagaa

SEQ ID NO: 308296 - DNA, 991 bp, Cannabis indica
ctggaacctcctcgaaccaggatagctcatcgtctaaccacagagcatgctttgccaagccatgggccgctaaattctcagagcgagccacatgggacaaaattgcccccgaaaatttagacaataaaactataacatcttcaacaattattttcaaaaattataaaatacaataaataattaatttaaaaataccaaatataattaattttattatctttactaaatatgataactaagcacttcacaatcaaaatactttgacacaaatataaatatgtgttaaataaacacaaatatctctttgtaaatgcatcaaattggtaactaaatataataatgtgtatgtctagtatattttattccaagtacaatgcgtacgtgaaactatattgctctaaaaacaaaaacaaaaaacaaaaaacatgaataagaacttgaaatgtgtagtacacaagacaaggacattcatatatatatttttgatgatctttaaacactgtatgtacgtactattggatggatgccctagctaggtcattataacatctccactaatgatttttttgaatcaattctatccccaaaaaataaaaaataaaaataagcctgcccaacaagtgattttacaaataatatatagatatatgcattgcataatatcatatatgaaaatatatacattaatatggaagcgtatcattatacctataatgcactataaaacttttcgaggtggctgctaattatacataatattattccattgtattgattattggatacttgaccgtctatgatacaaccatgatttagaccagaccaaccacaccctattataatctacttattaggaagccacgttttcttattatgtctttgttttttctttctttaaattcatacctaattaaataacatttataaatttcaaatgaatttttaaattattgattggttatttggttatgtataattaagacattaagag

SEQ ID NO: 308297 - DNA, 1165 bp, Cannabis indica
ttttttaacaagttgtatattttatgaggtaaaatcagatagtaccgaaagttcaaggtaaaaatactaatcattttttttttcaaaatgataaaaactcgtgtaaattgatcaaattttaatttatatacatccatacaagggtcttggaatttcctattacttttgggagtggttgaataaagttttgttcttgtgttgaaacgtatcgacatgtatttacaaggatacttagtcttgatctacaacaatataagacattttggtaataaagaaaggtagtaaacatcatatgactcaatttttcttgctcggtaactcctcactttctatcttactggaacaaagaacaatctttatatctatttatgaacatgatcgaacaaatgttaagctcaaagttttaaacttgacataaaacaaaatgaattctagtaccattggaaactagttctaacgtgagagacaaaatcgattatagtcattatcatcatcaacatcccccgttatgtagtaagattagaccaagtgagtacttatctgttcaactggggcacttccacagactttattttctaccaatcaggttgcactcaacaaccattatccttctcactcatgtctccctattttctttattaattattatatatcattaaagtataggaatatgtatttttttttttttcttttggttggaaattatttttctactgagtttgtttctgtaaaagaagatccacatccgtcacatgttatgtcatgtgttcaaattgaatcatatcctcacaactcaaaaaacatatccacataaaaaacacaaccaccatggacggctgagatttttaaccagtaaatgacatcatccatttctacacacctgttggggtccatccaccctcataatacacttccattctaaaaagagtacaattacgttaatgtggttagtgaaattttaaaatgtatgttactaataaaaatgtatcacatcaaatgttaggcatagcctttctcaaaaaaaaaatgttaggcataacaaaattcttctaaaacccatttcttcacaacataaattactctatcaccaataatatatatatatactaagtgattgttacgtgccaagccacatagtgttagttttatttaatattttagtttt

SEQ ID NO: 308298 - DNA, 1151 bp, Cannabis indica
tttcttaatttttttaaaaagtgaacatttactaacttagttaccaaatttaaagtcattttgcatctcaacccaaaaaactattaaatttatacagcttataaacttagtacttatatcattatttacctaatctagtaattcagttacactctatcacaataacaattgtacaaactttcaaacaagcaagaactactaaaacaagttcttcctccgtaccttcctatctttgttctcacaatctcgtttgtattttctcatttaaacaaacaagttaaatttaataattactttgaattacactccatttcaattaaaattcaaaaggctaatattacatttttaacatattagtgttgttacctagattgaccacaatgatccaccactgacttctcagcctctaagaaacgactcaaatgtttatcatccaagtgttcctgccataataacaacaacaattttcaaaaataccacaaattttaaaaacaaagaaaaataccaacaacaaaaaaagaagaaaccatacagagagacatgctttgtatttctgccattctgagatgcactcctctttctcccattgaccttttacaaacttttccgaataccatctatacccatcaatctcaaaaaattcagattcaatctaagaaaaaaaaacagaatacgaatatgaaaatgacctgttgaagcaattgtgataagctgctctgaaatttgcacaaggagatgtagaagaagaagaagatgaagatgaatctgaggttttcttgtctttcctacttagcatacccatcgacgacggtggcgcgtggcggtggcgcgtgggttcagtttttgtaagacactgaaaataatgagatgcagatgactattgactcctactattctcctactttactactggttttggtttttgtgttaattgtattgtgtgtttttttttcttctatttttctactcgttcatcgcgccgtacacgtggcacttagggctttttctagtttctacttttttttgacaactaatttggcactttatttttggggaaatatatatttagatttttttatattttgaaaaattatatttatatatatatatattttttagaaagatctattattattaatgtgaagaatcag

SEQ ID NO: 308299 - DNA, 1378 bp, Cannabis indica
aaaaaaaattgaactaaaaattcttcagggtgcatcggtgcaccctcttaaaaatgcattatagatttttcatatattatgtatattaacaaaaattaatatatttttaaaaaaaaaactaatttgtaatcataaattaatattatttttagtgtaacttttggttggtgttgtggttataatggaaagagttttaacactaaatttaatgataaggttggagttgccctcacaccccaagtttaagaaacactcatgtgtagatttaatatttcaaccttacactagctaattgacaacaactaataatttctaaatccttaacctcatggcaccatttcttgacagccatgcttggttgtgagacatgtcatttatagaagtaaagtccttaaataaaatgtgttctcacccataaaataataaaaacctaaaaaagttgagagacattcatgaagcctctaaactgtgcttaaaacttttcatttgattacaaaatattttagtacaatagatgatttggataaagcctgcaaagcatttttgagacaaaaagtagagaagtaacaaagtttacagatactcattcataatctcaccaccaccaccacactattacctttcattactaataattatttttatagccaattttggcgtgcagctaaggccttcaaaaagggttagtcacacccacctcctcttccaccatcatcaccacaaacaaacctccctaacaacactttccacctaacagtagtactactatatatacttcactaattctagttaggtcattgtttttagaagaacaatataaaataaacaaaaattgtatgtgtgtacgatctcaacatgaagagtattaaattaaactttttgacatagcatgaaattagtactattttgagatacgacatgaaaaatatataaatttggatcaattataatatgatgtttgttgatggatatcatatgacaagacacaaaaaatatgagcttaaatacagtacatcatgacaaatttgaagatatgataagtaaatacaaataaattaatccgaaagcattacacattaaaacactataatttttttttacaaaaaaacattctataatttgataataataatagtaataattatttttaaaagttaattaagtatttaattattaatcatatatagctaagatggtaataataaaactcaaatgtatatataacaccaagtattataattttataattaagcttaagtatacctaagcataatttcatcttatagcaggctgtaaattctcaacttttcatcatgaatttattagaatatttctaattaaggaaataaaataatattattgattctgataaatgaat

SEQ ID NO: 308300 - DNA, 1662 bp, Cannabis indica
ggaaaaaaaagaaaaatttgtatttatgcacaatattttttctgtcaaaaagaagtaggcatttaaatataattataattaataaattatacaaataaaatacttataatcatgacaatttgtcactaacatacactacatacttatttcattattaaaaaagaaatacactagatattctttctttttcttaaaatcctaacatatgcatactttgagtcaatactttgaccaaaaaaaattcaataacaacattattatcatgacgatgagatttttgttaatcacactcaattaagttaatgaaaagattgcattgtgtggcacataatttttttaatctgtagactttgttttaaattaatgtctccaatatatgtgtattcctttattaacataatgttaattattttataacaaataatatttgggtaagaaagaggctttttttccagaagagagagagagaggatcttctattaagaaaatactttccaacactactcttttatgtcacgggtgtgccttgttctgtacaaagaagtatatatgaacaagggtttaggaatgttcctagctactaccatatatatatatatatatatatattaaaatatatatatatatatatattcattttataagataagggaaatccataacgtggggttctatcatgtgcgcaccattttttgttctaacaaaatatatgattgcagataaggatatatagagagagagattaaaagaagctttcaatttatatattaatataatatattttgagtttcgcaaatactagggatcaaatgttgtcagaaaatattatattgatgttcttggcttggctaatatacaatacatgcaggtgtagtagagtacaatatagacaatattgtacgaaaagaaagaaaggaaagagacaaagcagtgtgtcaagaacacttcttctacttatggccgaaatcaataataggtacatcacacaattttttaataatcaattttataatgataacatataaattataaaagaatgcattaaaaccattgtacgtataaaatatatacttaagtgtaatgttttttacattggatttaattattttttttttcttttataattacagtaggatttttattcaattataaagctcgttccctaaaattaaagggaaaaaaggaggagaaaaagagaggataaaagggaaacatcatgattcatgttagcttagctgtgtttccatccaaaaagtagtttatataaataaatatatatatataactttaggtacgatcatctttcttggttatttgcctttttcttttatattttttcttatttttgtgaatgaagtcaataaaaaaattcgtaattttctagtctattacatattcttacaaagtggttgacggccatctatagtactactagtagtggctatatatagtgaatctagagacacatattctgctatgcaaaagctagcctaggcacacgagtaggtcattggtcatagtctccctacactacgaccattattcattatgtatatattataaagacatgtatttataactttatatatacgtattttacccacgcaccaaccaatctcaaatattgaggaatgtattttgtggtacattaaatgagtctca

SEQ ID NO: 308301 - DNA, 1633 bp, Cannabis indica
tgtacccaacaatcttttgctcatataatacatcggatactagactttatcctcctctcgcacgagtgcaacgctgatagcatgatctgacactgccaagtacaagaacaaatattccccctccacaggctttgataaaataagagccttagtcagatgctcctttaacttctgaaaagtgtcctaacactcttcagtccacacaaactttttgttgactcgcagtacattaagaaatggaatacacttgtcggtagattttgaaatgaagcgcctaagagcagtgatacgtctagtgatcctttggacgcctttatgattttaagagaaggtatgttgatgaaggccttaattttctctagattgtcttcaattcctcaagaattgataatatatcttaggaacttctcggaggacaccccgaaggtgcaccttttaggattaaatttcatctcgtattttcttatcatcgaaaaggcctcttccaggtcatagccatgctcttcagaggttttagacttcactagcatgtcatgcatatacctccatgttcctccccaactgaacagtcgatttaccattcgttaatacgtggcccctacattcttgaatccaaacagcatcaccttatagcagtagatacccttatcagtctagaaactagtatgctcctaatctgtatgcattttgatctagttatatccagaataggcatccatgaaggtgagcaacttgtacccaaacgtggcatttactgtctgatcgatctgctggagcgggaaacgatctttcaagcgttccttgtttaggtccgtaaattctatgcacatcctccatgtaccattaggcttcgagaccaacacatgatttgcaagccaaactaggtacaatgattcctagaggaaatcattggtagttagcttatcgacttctacctttactacatcggctctgacgggatcaaaaggtcttcttttttccaaaccggggttacatcttaatgaatattcaaagcatgacaaatggtattccaatcaatctcgatcatgtcagaatgactccaggcaagcacatcctaatttttcttgatcgtgttaataacatcctctcttacagctggagggagattctttcccactctgataatcctagtgggttcttcctcactgatacttacttcttctacttcctcgattagttacaaatttatttcaattcaaattctaggatctaactcgtccacacactcttcccagattatttctttattcatcaggtcttctattcagggatctatgggtgcttcttcctaaactgtgaacacagttcgggtggacacattgtagcaattcctcgcactccactagtcacctttgattataccgatgcacctattgtcacatgggaacttcatacaccaatgccgaatggaagtcactgcactgaagtctactagggtcggtggaccgagtatggcattataagttgttggatagtccaccactacaaaggtcaagtgtttgaatgcactcgctttgctatctcccttgagggtgactagcagttagactttaccatgggcattagggtgtcaccgttgaaaccttgtagctgttgttggaaatattttacc

SEQ ID NO: 308302 - DNA, 1978 bp, Cannabis indica
ctggtctaactttgttagctcaagcttcattaccattgaaacaccgggatgaagcctacagggctgttgtgtttcttatcaatagaatgcctaatccaagactccaatatagcacccctttagaggttttattcaacaccaaactagagtacacttcccttagagttttcggttgtttatgttatcccaatctcagaccttacaatagaaacaaactctaatataggtttattccttgtgtttttcttgggtatagattgtctcataagggctataagtgtctttgtaaggatgggaggttatacatctttagagatgttctatttgatgaaactgtttttccttatcctgttgtagccagcaaaacaaaacaacagcctgctcaaacctttaaattacctactgctattccacaggttgttgtgtctcaacaacctgctcctcaagcacatcctctcactcactcacaagaatcccccagtcacatcccagcatcccctcccatctctgatgacacttcaactcatcacatccctaccatgcaaccaacaaccattgtcaactctgacattgagcagccagctatcccaaacactacaactatctttcctactttccctctcaaatagaatctccccatatactacaaccaaatgtcacaaatgcccctcctatttctaatgtgtcttctgccggaatcaataaacaccctatgcaaacaagagccaagtctggaataagaaaaccaaaagtcatgatggcctcacttcaaccaacaatagtaaaataagcactcaaagatccaaggtagtttcaagctatgaaaactaaaaacatgcattggttaagaaaaaaacttggtatctggtcaaattacctcctggaagggtccctatttgttgtaaatgggtgtataaaatcaaggaaaatactgatggttctgttgatcggtttaaagaaagactagttgttgaggggtatcatcaacaagttggatttgactacactgaaacctttagtccagttttcaaacatgtgaccataagagttgttctatatattgctatatctcagaactggtcaatcaaataattggacatcaacaatgcattcctcaatgaagatttgcaagaggagatctacatggttcaaccacctagatttgttgatccagaacatccatattatgtgtgcaagctctaaaaggcactctatggactcaaacaggctcctagggcctggtttgacaaactatcatctgttctaatcactttggggttcaactatgcaaaaacagatcattctctctttttgtcaagcattgtcctcaacacacactttatgttttagtgtatgttgatgatattcttataacagggagtgattcatctcaagtttctgctttggtcactactttgagcaataaattttcccttaaagatcttggtgatcttcactacttcttgggtattcaagtgcttcaaacaatagatggtttgctactatatcaacaaaaatacctccaagatctgctatgtaaagctaagatgcagggagttaaagctcaaaactcccctgtgaatgcaggtcttagactctcccaatatggatctgaacctattgaagatccatctcattacaggtctatagtgggagcacttcagtatgcaaccatcaccagaccagaaattgcatatagtgtcaacaaagtgtgccaatttatgcataatcctcaataatctcactaggtttctgtcaagagaattcttaggtatttggatggcactttggactttggactccaaattttagcaactcagtccactcatcttcaagccttttgtgatgctgattgggctactgatccagatgatagaagatctactactggcttctgtgtattctttggtgataatctgataacttggcaatctaggaaacaaacaacaatctctcgatcctccacagaagcaaagtt

SEQ ID NO: 308303 - DNA, 1359 bp, Cannabis indica
ttttttactgtggggtaatttttttaaaaaaattattgtgtaagtttcatactgtgtactgtgttaaatttttactgttgttttacggttgttttttagttgttatactgttgtttataactgttctattttgttgttttacggttattttaggttgttttaaattactcccctcatttcaaaaattcactgaaattttcatgtcttctctctttccctctcattggttctcaccaaacaacaccatcgaaaccaccgtccaacctccgagaccactagccacgaccctccctcttgcctcgtcccacccactacccattttgggtatggggacccacaaacaaacggagagagtatcacgagctatttctaagttttgagcacacccaaaaaccctaaaccccacagaacaaatgtcaagggtaagttttttattattttcatttttttatgtgttgattgatttaagaatttggttaatttcttaggaataaaattagtgaatgttatggtatataaaatgtgtgattggatttgtgaatgatttgattagcgatccctttggttaaatctggtatcgtctgcaaaattttgtttttttagggagaagaaagggttcaactgagcccgatagtgaccgatataggcctaatatatgtccaatagaaacatgttaatataaagaatttgaagttgaaaataatcacccgatagtggtacgataagtatctaatagggttcataacttgttatgaaacgatagattgtaatatagttagtgtttgatattggtttgataggtatgcgatgacttcttatgtgttatgtagtatactatagtgtgatacatgtacgatagttgttcgatatcagatgttaatcaatttttttgatagtatttttcattcccatatctgacggggtacaatagtgtacaatgtgtggcccaatttttaataatttttcttaaatttgtgtttgatagtagtacgatattagtacaatgtatgcttgatgtttgtatgtaaaatgcttattttttttttctcagaactcaagaccaatgcttttatgttccaccacctgtaagggcccgtttggcacaattttttagaaaagctaaaagctgcttttcaaaaaagctgtgacaaaatgatgtttggtaaacagttaaaaaacagcttattaaagaatttatggaaaagctacagctaaaagctaaagctggtacaacccaacttttagaaaaagctgttttgattaaaagactttataataaattatttttactaaagtttatataattatttattatatattataaaaataaaaatatttttaaatgaaaaatatttaaaa

SEQ ID NO: 308304 - DNA, 1033 bp, Cannabis indica
aacaatgagagttacatgacaatacaagggataagaatatgaaagtaatatgacattatttatcattaaagggcaaaatggttaatttagggtttttattttattttattactttcttggttaaagtttagtgtaagaaagctagtaggtgggtggaatcttttactataacttaactaatgtcagtctggggtggggtctattagcatttacctgcttctgtagcatttatttggtacttattcatgagtgaattctcagtatatatatgcatgcgctattttaagcatatttaaattcctattaaggaagtactttattaccaaatatccctaagttaaccacacgtaaaatgttatactattaggatgtcattggcatttgctctaatttaaaattattagatttaagaatgtgattatttatatattaaattgtgtttttttgaacttttctttatcttaagtgccgactgttcgttaataaaatttaatgaaaatctttaaatttaacagttttgataattcatagattttttaacaacttaaaaacattataattaagtacacaatgtcaaaattcgacaggaaatctattaatctatctaatccaagactactttttgctcacgaggcagctagtgtccaagaaattatttgtataaactatttgaaaaattatcttatacataagtactaatcaatattttgtattagtcattgtgaatatggttaatcaatttcagagattaagttcatgatttattattattttattttatatttcttaagtacaaaaaaataagaagaggattaaaattataattaaggctaaaaaaaaatattaaatggtgtttagtatttttgtaagtgttaaatcactattgatgcaattaagtatattgagttctaataaaaaattaaatctaaataaatatttagttctaatttagattttttgtcccctgaactttgtacatataccaaatcatgccctctcgaactctaaagtcgttaaaaatactactaaacta

SEQ ID NO: 308305 - DNA, 1869 bp, Cannabis indica
tcatattcatgtacgttatatctatttaagatatcctacaaaattttgaaaaattcagaataatttacaatatagaaaatgatgttcaaacagtctattttacacgcgtataaaataaaatagtcacgcgtgcaacacactgtttgaacgtaattttcggcgtgttaaactttttttgaattttttaaaattttgcaggatgtcttaaataactataatttacatgactatgagaaaaaatttaacgaaaaaattatttcggatactaaaacagatagagatgtatcggtatatcatttttaagaggtgcaatataattttcctaatatttattatgcaaattaattaatcacatcaattaatttaattatctaatctcaattattttataataataatgaaaaaacagaagtatagacttcacctgaaaagttttcctccggctccggttactcctccgaatcaaatcggcggcgactcagattatcatccagaacttccgagtccgaatcaaatcaacggtgagtcagattatcatccagtccttcctggatcagataactggttcagttcaagctctgctgatgccaacataaccgaaggaatagctggaaccagtggcggcgccgcctcatcctccgccactaccgtcgagaatgagaacgaaggaagcgacgtcgttaatgaagctgacgacagtttcggtggatggtttgctcaaggctgaatcactgggccaagatgatgggcctattgggccgagatcgtgctgtgtaataagtgggctggcccacatgactttcttttttatcaataaaaaactttttagttttgttttcttatttcaacttcaatcaaatttcttattttctctttcttttgcttgataatttatttatttagtaatttttttttttgggaaaatttacacaaagagcttaatttttttttaacatttttatggtatgttgttcttttagaggaaaataacgttgattttatgttactacaacataaaaataatgtggaaataactctttttagaaccgtcaaactataatgttgtatattttagtaaaataaataataatattccgtaaaaaagaaaaaattgtaatttttttttggggatttatgaaaaatcattttttttttaaaatgaaaaaagtaatacaaactacaaaaaaatcatttggatttggatgaaatgaaagtattatccatgacaaaattaaccccattctaattaatttcacaaatttattttatttcttagtttacacaaaaaaaaaaaaaaatccatttctaccaaattgtaaaaatgaacccaaaaaaaaaaatccaaacattaattgcttttttcctttgaaataaatttataaagagatatattttaaagaatcaggtgctaatgaatcttacttaccaaaattattaatttactaaaaaagtgaagataataactcatttatggttaaaaacacctgtattgcaatggtctaaaaataattccaattagactcatttcactataagaaatttataataataagattttcttttatataataataataataattatataacatattatatattgaaagaaaatggaaatatgttgtgaataattgaaataatatatagatggaaaaaaatagaaataagaattaattggggttgtggttggtcaacttgaggtgtgagaattattcaaccttattaatcaagcaaagattccaataataaaattttcagaaaatattcaataattatttaggtgaaattgttttataatttataacaaagaaaatgaaaagtaaaatattataaaataatgagcaagtaaaatgttccacaaagatggga

SEQ ID NO: 308306 - DNA, 1210 bp, Cannabis indica
atatgggaaagcaattaaaagtgaaaaagaaaagtcaatgcaatacaatgcaagacatcatatattgtttctaatttttatggaagtgagtttgccatgttaacatttaattattaattcatcaaaaaaataaaataaaatattaatgtaatttttgttaaaagaaatatattttgggggagtagtgtgccaaccccatgcaccggcctcgatggggccaccaataaagagcatcaataaaccaaatataattaagaaataataatattgcttaggattatataaagtagcatgtatatatataattctaaaaaattaattcattcatatctagctataggtagcaatcaaattccaaattggcaaacccacatgcttgcgttgcttagcaaccctttcatgactatgtactatatttgtatagttaagcaaaaaaacaataattattaatatatatatatataataattccactaaactacactacataccaaccaatcatgtcaacattatagacattaaattattgatatatattgaacaatatatatacatacatatactctttttcaatttcgcaaaacaataattctggcaacatgagtacgaataatctccactagtactcaaagtaatatatatattattattaaattattcgtactctatttcatgctaataattaatatatatatatataggttaattaccgggtaatactaattaaaattttgtatatatatgttgatcatcatatatctatttgtacggtccaagtatgtacataattaatctctttccaattacattttatataataaataataataccatgctttattaagtatccatatcatatcgtagatcaatatataatatacatcatatatcgacatgaagttatatattacgtttaattaacttagaactctccatctatgaattggtcaatttcttttgatctataatttaattaaagtacatgttaatttagttattaattaaacgattattttctcccggtaattattattattattattattattattattattattattattattattattattattattattattattattattattattatgtaaaattcaaagtgttaatataatataggtatagttcaaccttaattaatttggttcattttactgctagctattgtaggctgtggattatacaaattttt

SEQ ID NO: 308307 - DNA, 1794 bp, Cannabis indica
aaatattaaatttaaaaatattaaaattcaacctccttctaatattaaaataatatattaatatttgtatatatatttaaattaatttaaaataaataatattaatatttatatatatttataaaattaatcctactaagtaaaaaaaaaacagaattttttatttttgaagtatattttgttaaattaataaaaataattaaataactcattttttatatataaagatataattagagaagttattgagatttttgttataaaaaatattatttgagttttattaatggagaattgatgagcgtgcacgtagccataatatgcaataaatttggtagcatagcagttatcatcaattttaatttttattttgtcaaatgtcaacatcgtggcagagtggcactgccgattagccaccaagcaaaaactacttttctgggtctttcatcttcaccatgcagtcggcacatacataaactatatatttttcttatttgttattatatataattgaaccaacaacttgttattcctataaataatataaataattatttttggaaggagattttccaaaaataaatatattaaattaagaattaagaatcaaagatatggaaaaggaggagatatgaatattaatgaactctaattacgagttagcttgaaaagccctgaagtattaattcagagatgttcttaataaacttagaattctgtctcttaaaaggtttgagaattactacgcagctttcaatctgaaattttagtagaacgtcagcagactcatcaaccttcagaagttccatttacgcaaaatatactatatatataattatatatttatttaagatcaacttcccttttcttaagtctttttttcagaaaagggtttaaagtttttcttttttatgtctttatcccacttctacaccacacataaaaaaaaaaagcccaaaaaaaaaaataaataaaaaaaaaataaataaatcagtaaatcaataaaatcctgtcgtatgtatctatcattatcatttgccaaaattttcagttttcaagcatgagtactagtagcatgtttattttctacatccaatagaattaaatgattgccaataagagtatgacgaaaatataaataataaaaaaattggaaaacataaaataagttctaaaagaaggtttttgagaataggatgctcaagcacaacccattttaaaatgttaattaattagtgggttttggcctgtgattaggacttaggagtgtattaattaattaatataattggtttaagtatataataatataacaaattgttgaagtggacggagcagaggttgtagccgtgttgaagtagttgggccgtaaagggagtttcaatctcaagacgagttttgtctttatcccttctcaccaaccaatcttttaagaaaataagcaaatcaacaacttaaattaacttaacactaataaagatctgaaataggacacctcaattgttgatttccatttttttttatttttaaatcaacaatgttaggtcatggaatttcaaagattgtttgcgactcttgtttaatcccttttcaaacttgagttcaatgtatttataaatacaaacggtatatataataaatgttaaaagagtatctctatatggtggctaatactcttataaataattaattataaaatattatgtcacattgttgctaggtatttccgatttttctctgatcgtagcattcataggaatgacattcctaatgagcttcatgctctcttgtatg

SEQ ID NO: 308308 - DNA, 2219 bp, Cannabis indica
atgggttgagaatgagatgggaattaaaatagtcggcagtgtgacttaattaattatgagaattacccaaatctcaatgatgattttaaaaggaagtgtactgtatatgttcactactttttgttctcattttctaatatcgataatcacaaccggtgatattcaatcatcaatagtcatatatatcatttttcgtcgtacaaataaaaaagcagtgtgttgagtgatcatcagtagtgttaattatgattgtagagaatgaaacattgtgatttacagctgttatttataatagtaattagtgcaagcgccaccttccccatttaggcaacgacagaaaagcccccactttccttgcctccaatataaaaccctaatttggccaaaccacccttcacaaaacaatatatgtataataagagtttttagtagctaaatttcatttatacttaacttttttaagtttaaattttaacggtaacactttctaaattactaaactatatattcacaaatttaaggtatcgatcatccagttaaatacttatgtattaatgtacatgtatgccacgtgtacaaaagtgtacacataaatattctaagttagcagttaactataataaaaagatgttattttaaatttactaacagttcattagtttggaaggtttcacaaccaaaatttgaatttaaatggttaaatacatgtaaaataataattgaaagaatttaaccgaaaaaaaactcatacaataaatacaagtatatatgtatgacttttaagctagctaagctaggtttcgactgatcatgttttaacaaaaagattgttggtcataatataactttaataaattagctttaccttttttattttcatctttaatatttattagatggttcttattaattggcatgtatagtaagcttgacttgatcaggaaaaggtaattgagggttgaaaaataaagtatttggtcagaggaaaacgtctgaagtaagtaatcagattcagatctgagaaaaatagcagtgtctcaggtcagattgtttttactactccatctctatccctcccactaccactacgtacctacgtactttaattcaaaatatactttacgtaattatttaccaatcttatacagttatatatactattactacgtacgtacgtacgtacctcatttgacattgtgaatggtttcgaatctctgccaatatttactactttttttcttttgtaggacgttatcgtttcgttgtctacgttaacattagtgtatatgtctacatgatatatctagttaatgttgtgctttgtgaaaaaatacataaaagcattgaaatattattaatatatatatatgagaaattttaaaaagtattaagagtggtgcttaatattctctcttacatgttaatattattattggagtaattaaatatatatcgggtctgattatataatttaatgtaataacttttagaccgtatcaatcgttaaccaattacaaggtaacacaaatgtactaggtaccattgtccaatatcaatactttattaatatttatctaaagaggaagaatagtattaatagtatctaacaccttggaaatatgttattttgtaattacttagtgatatttaattgcaccaataacgatattaataacacataaaaatgtgctagacagtacacacagtgttaaatatcactatcggtgtaggtctcgtcccatatataactttaagataataacttttaagaaatatcattaacaaatactataaaaaaactatttttaatgacaactgtttagtcacatcatagtttttttgtactttttttgtgactaaaacatagtatttagatacaagtatttgtcactaatttagtttaaatcatgtagatttcgactaaaaatgcatttagtactcacaacaaattttaatttttgtgattattacatttagctacggactttttagtcacggtatagaaatgatggcttataattaatgatatcttttttacttataatcacaaattttgttgtgactgaaaataagaatttttatagtgaaattatatcattttaaatagtgacggatcgagaatttttattttgtagaacttatattttattgttaaaaaatatttatacttatattataattattcttattagatttattcaattttataagaatttttt

SEQ ID NO: 308309 - DNA, 2830 bp, Cannabis indica
gacttttcctcctcagtccactcagcttcgtagtaagactcttcagtagatttgacaacatccttggaaggaggaaagaacatgctaccccactgtgggaaatgaactaaggtgacaggtaaagtacaagcacaaatcatgactcccataagggatagtcctgtagccgttgaaaatcgagaagtggagaagaacactagttgggtcaatccagaaccaaagttccctcctgcaccggttaaccctgatatgattcccaaagatcttcgagagacgaagggaatgatgccgaatgttgctccgcaagctgcttgagctccgatggagaagaggatcatggagaacactgccagggggagtgtgttggcgcggcctagccaaatgcagaaggcacctcccatggtttggagaatccaaagggtccacagtctgcctctcatcccgaagtgtcgagccgccacgtctgacgcccacccgccgaagggacgagccaagaggttagccatgccgaatgaagccgctatgataccagcggtgtgtagcttcagattgaacctatttatattgtaaaataagtacacgatgaatttaaattaattacttcttcacatgtctacattaattagtccaattatttaattagtacttctctacctaagcactaattaattttgtctagctaattacaacatttccgtacacaatatatggtactttctatagagtatattataatctaattctataaaaagaaaatggttgctataatatagctagggagaaaagtacaaacctgtcatagaaatattcagcaatgacattatcagtggacaattcaacacccatggagtatccgtagagaaggacaaagatccatgtcctgtagttggtgatggcgtaccataacacctgaaaaagtgacaaaacacaaaattaattaagtttttcaatcatttaatgattaatattttttttttttgctttgatcaaaatataattaataataaaattactaaataacttagctacctaccttggaaaatttgtctttggcaacatcacccttcttttgtagggcaccaaggttcccatcgggcaagtcctgaccaagagttaagaccaaaatacccatgatgacgtgaagccatccgggaatgaagaaggcaatcctccaagctgtaaaaggtgtggcaccagctttgcgaatcagctcatacaccacaggcatgagaagctgagtggctcctccgcccatgtttccccacccggcggcggttccattgacaagtcctatgatcttactattgaacatggtgctcatccagtattggcaagacacgaacgtcgctagtgaaaagccaatcatgaaacgcaccgccgtgtacccacccgcggaggacacaaacgacatgcaaaacactgttggggcagagagcatgatcagaaaagcacatccgtatctgggtcccaaaagatcgcatacggctcccatcacaagcctgcaggagaccaattacataaaccaatatattatattagtacgtacaattactcaatacgcacatgtgaaaaagtttggttgcttattaattacgtacctagagaagatacttcccgacacagaggcaacaccggcgtttccaatgtcaactttggtaagattaaggttgtcccgtataatgggaacgagaggggccgctgcgaatgtagagacaaagcaagtgaagaaggaaacccaagagagatggaaggttctcatgtggggattggccattgagaatagcttaaacactttagccttgtgttctgaatccactggcaaatcgaacttcgcagttgtatcggttgggaccatcggagaagccaccgagaaagcgaagctctgctctcttccggtgactccatgcatcgagcttccaggctctcctaaaccttcagtagtatgatcagccattattattttctttactttcttattcttttatcactatagctctagctcgttagctaggtagtagcagtgcttattaggagttgctattaattattggaatgaagaaaaagtagggaagcttactctatttataataacctcatttgcttaattaaggacgggtagccgttgacaatataactagttcatattacatcatcatacttgtacattaaaatgtcctttgataagaatataagccaattaattctattagagattgccttaattatataaacaacagagaatcctccattccgccgcatctgccctaaacaagggaagagtctcgtcgtgtatcccaaaggataattttataccttattatattattataaatatcctttgggccaattaacaacttaatgacagagtttatatcccactttatcaatctgtacggccgaccgtagaccttattaatcataattagttcataaattatagctaatactatactactactctgttttcataatattattacaactgacgtgaactgccttatttattcgtagaggggtctaattgaatttttttagtgatgcaattatattattatataagacgtcttcaacttaataatataaggtgaattaaatataaatatcttaccgatcaatatctattttttaataaagtgtgtctatataacagaatttttagaaaaatttatgggtgactttttatttatattaaaaataaaatggtttattattaaaaataaaatggtttatgtgaaattcatgcatcactttttatttatatataataaaataaatactattaaattcaaaaaatatgattgggtttttacatctacgattgggttttctt

SEQ ID NO: 308310 - DNA, 1215 bp, Cannabis indica
atacggcgttccaaatgagccctgtgaacaatttttatatatataataaattaaattaaaatattgatatttgatatgataccttgtaattaataacgctaagcactaatagtcccttgtagcatatttttcatataaatatctttctttatttaatagatattgttagtttaagaaaaaacattgtgaactttaaatgaatatacaattatttaacgaaatattttacataatttttttaaaaaattaatatttcaatgtatatatattgttacaaagataataaaaaaaaagtaaataacagcataagtactcaaagttttgagtttgtaaaattaactgatactacatatttttggtccagaccaaataatctaaaatttgggtcttatatgtattctgtttgagacaataacagagtctgtattgatgaaactggaagaaaattacagttttataaacattggtacttatgccactaaaaaaaatcattgagtttatgtcgtttataaatctaaaactttgagtacttatgtcactatttacccataaaaaagatcaataatcctgtgtgaaatagtactatctttcatattcccattaattagtcgtacaaacaatgacctttgcaaagttatcttagtattttaattattataggaatccaagttaatgaatttaatgtcgttgaaaaaataattaaaaatctataatttgactgcaaaagttaacccacaaaattttcaatctaagtggttgatcgtgctaaatgtcaaagttcaaagaatttgacagcaaattatctgtttttattttttgctaaaggaaaaatctttaactttgtgtgagataggaaatgttttaaattcataattgctgatgttggtatgatattgtctgtttcaagcctgagtccttacggttaagtcctcatgctctaatgacccattttcataattataaactagaatgtatataacttattttactaagttcaaattagtcaacatttatatatttcgatgcaataacaaaatattaatttacactttcaacatttttatttgttccaatatgtaaataattaaaataaattgcaaatataatagcaatgaagatatcattcattcttatatatccatgattatttctatttctaatcaaattggaattttttttttttttttgtacaaagtgattagaatcactcatgaa

SEQ ID NO: 308311 - DNA, 1166 bp, Cannabis indica
ggttcctggttcgtggtggagatgggtcgacggtggtttctggttcgtgaagagggaaagtcagagagagagagagggaaagtcagagagaatgaatgaaattttatttaaggggaatttaggaatcgttttgaattagtggtatcaatttgtacaaaaaataaaagggtccaatttttgatataggatattttattaggggcaaataatgaaatttccctttctgaaagtacaaaagccaaaaatactcctatggtagaaacaaaactgatgcctccacctaaaagtttccattatatatacttgtgtgtatatatagagagaaagtgtaatgaccacatatttaaacatatgaattagcagacaattaacttattattagtaatttaattattataataatatgtacattagtagaaaataaggcttattgtcaaaaataaatattaatgagataatttctcaattatgaagattttattgaattataaatgtgtcatgcatgttatatatgaattttgctatttttcctattttgggctcagtaacaatgaacctcaataatttggtcattaatgtcacagagatacgtttaagtatcttatatttagcatggtaagattttatggacgtttgaaatgtcaaggttgtgtggggtaatagatttttagcattttacctctaggctttaaggttgcttaaagaggaagaaaaatggtattttagtctttttttcctaagttggagttagttaagctaaggggatttctagaattaattaggttagtgttgaattagtaattaaaataaaagataagttagataatatcaaaaattaattttcactctctctatacttctctctctcgaccctaacaaaccccaaaaaaaaatcaaaatttcaaatcaaattcatcatccttgagcaagaattcagcaagatttttggtaggaaagtgatttttaagacctaaggtaaccctagtctactcttctgtttgaatttctaagaaaaagcttggtttgattatgtgagttctgaatttatttctgtttgaagttggggagtttagggtttattttagaacatgtattaggtttgtttgagatgtttttggtaactgtagtgggagttgagctagtttgagttcttgaactcaaagctt

SEQ ID NO: 308312 - DNA, 1943 bp, Cannabis indica
gatttttccagttttttctatttcaataattgttttgaatttcgatatgtatgctgatgtggcacaacggtatttgtgcaaatatttttcttaaaagtatttttgtaaataaaatcaactttaggtataatattgaaaaaatccctaaaataaatttgttttataaaaattaattttttgtcgttggttttcaaattagcgttgaagtagtcactaacgcaaaatattacttttttgcgtcaattgataactgaagcaaaagttttgcctttgtttttttcattattatggttgttggcgcgtagtgttgaccaacgcaaaactgttttgtagagtgaaaacaaatatcaaaatttaatacatttttaaattttttactaattcagcactcttttatttttttaattcaaaaagtatactataaataatatgagtgcaaatataatttttgtatactattaataaatttttttttttaatttaatttgtatcttctacagtataattataaatagtaaaataaatataacattatctttttataaatagttcaggaagtatggctattatgtgctgaataaagagtgaaagtgggttgagatttaggagcattgctaaatagaatgagtcagctataggcaaatatgcatgggcagtggcaacgaagtagggacacatgcactttaggttcagtaggttcattgaaattataaataaggattggtgggcttaaacaatcccaattagtatggtgcattctttcataaatgggaagtatataatcagtgatgggtacgctctcatttgctcaactcaaccgaaagtttattagtgtaaggaagtttgaaatagaatctttatactgaagcacatatttattttgtgaaactcggtgttggacagattacaagtgaaaggtaggttgttgagatttaatttagttcaagattcaatgcttgttgtgtggaatgaacaaagaaacaaaagactatatatatttgttctttgaacgtcatttgagcaatctttgttggtctcatataaaggaatggatggaatggagaacctttgcctccacgattccaaggcttcttaggtggatagctcgggcaaagatttctaaatttcgaaaacaggtgtatatgcttgcatctttggtcatgtcaaaatgaagtttatgcaaccaaagaatcttaaataatagtaaatgaagctattcacattattattattattattattattattattattattatttaataaaaagctattcacattattattttgaataaagtaaattttcattaaaaagataaatcatctattataatagacatcaactcagagggagaagagctcacactgaaattgtgatcaccacaagataatgaccaactttattaacagaatatttaacaaaacataaataaaaaatgtaaaaaataaaagtaaatatcttcactcattaaggaaaaaaaaacacaaaatttggagcgttttttcaaaatcaagtagtttcttgggggatgtttcgaatattaagttaaataataatgttattcttacgtttcctaataaatacattgccgttttcaacaaacagctattccttgtaattgtcattttaacatatatatataatcactcttgtaataaattgttgacgttacgtagtttgaattatgtcgtcgtactacatttcaatgatgacttgtcgtttccctatcacgtgttatctaccctatcttcgtatctaattatgatggacttttgtcaaaaaaaaaaaaaaattaaggatggacttcaattaattttcttcagggcccgtttggtacgcaagattagactagactggacaagattagattatgctgaaagtaatcctgtgtttagtttaagaatggactggactatttatttatttctttttagaaaaaaaa

SEQ ID NO: 308313 - DNA, 2286 bp, Cannabis indica
ttttttattttttatttttagaataattaattttattataattttaattatttattacgtggaccaataaaattgtaccacgtgtacactgtgtacacgtagacattctaccatggcagttaacaactaaaaatggatgaaaatattaaactgctaacagaacacgagtttagggggttttactaccaaaattttagaattagggattagttgcaaaaatctaaccagttaaagaggttatgccgcaaataactctatatgtaattaatttaattagtaaagcgaatgtcgcatgagttaattagtcaaaatgaaatttatgagtaatagtgaaaatgttatgattaataattataaattatcatttctatgttgtgactaagacgactgtgactaaatgtatatttagtcacaaaaattacaatttgttatgactaaatatgtataatctaaatattatattttaatcaaaagtaactttttattagttacatttagtcacaaaaaaattatgttgtgactaaaaattaattgtcagtgatggcagtgccattcttaatggaatgataattctccatgtacatattgatgacccaattaagaaagaatataaggtataaatctataattagctcgtgatcctcgaaaatttgagattgtctaaactactgaaacgttagagaaagaatctgcaccacattatttttgttttttttattttcttttcttatataaatagtggccatccattaataatttttaggttggctccgccagtgtcaagtcatgtatcattgtgtcgtcaatttatttatattgttatgcacaaatattaataacaatttgtgacatatattaatacttttaaacttaagaattttttatatgtgtcacatcaaattattttctgtatatatatatattttttggtagttattccaataataatatatatgctctcttttatattttattatatatgtataaatatatcttgtttgtgaagttataataataatcataatatatataactcatttgtggattatgactatacttatataataggatcttgttactataattaaatgattaaaaaaactagaaaagcatatgcaaagtaagtaagatgatgatgggcattttataatatgcaaccctatttggcagtaagtaataatgttgcacatgacaccatatatatatacatatataaataccacagaatatgaataattttctttttcttctgtttattatatatttatatatatagtagtgtgatgagtcatgatcattgaaccctccctttttttgagcttatataaagccattcctccccttcttttagatccacgacctagctagaaagagaaagataataaagagttttgccaatcctagccttgaattctctctttctttctctctctctatatatatatatatatacttatacaaaccctagctagttctatatatgtatatccttgaatagttggcttattatattattaattatggtttttgtggatatgagaagagatggagagagagctttctttagtccactcatgggtggcagttatgagtcaattagctgctgaatcattcatccaaatgctgagttgaattaattaattagtaactcagtaaatgagtgaatgaattgggagacaaattgattcttaagcttcctgtatttggactgaagggagctccctcctcctatatacctttatatatatattgtttatatatcatatatgtacatatatagtacttatctagctagatgagcttttgtttggaacttatccattcaatattcattctccttctctctctctatatatatatatatgtgagattaatttaattaattaattaatttttttatatcctcttattggtatatctatagctaaatatgccttttaaaaatgaattatatatgtttgacataattggatcccttctcatatataatctagctagggttttgtggttatctcttgctaataattaattactcttgcattttgtttttggttataattgtgttcattaattcatatatatatatatataaatatatatctaacaacagtatgatttttgtcagtttagggttttggttgaagctgcatgtgtctctctctctctctctcgatctgatgatgatgatcataatggtgatgtttttagttgagaaatatatatatatatatatatgatgttaatgaggaagaaaaagcttatatatataattacatctatatatat

SEQ ID NO: 308314 - DNA, 745 bp, Cannabis indica
aaaacaaaaacaaaatcagattaaaaacccacaaagcagaagacctaaaaccaagctctttctgaataaaagaatgaaaaagttcagaaaatactgaaacaaatgcccattgttaatgccaaaaatttaacacaaataactttatgagtgcctgcacttgaaggagtgcagaaaaaccaaatggacatacaaaacaacgaacaactgaaaaaacctgatagaaacacgaaataaaggatcaaaaaggagccaactttaagagagaaaaaaatcctgtttggttgctgagaaagttttaaagaataagctaaaacataatgggtgaatgaaaaatttgccgtaacaagtttaatttattatcatcatcatcagtataaggaaaggtaggagatgaaaagaaaaagaggaagtgacctgggtgtttgggtggtgaagaaagaaagaaagaaagtgcgagaaaatgagagaaaaagaaaagaaaagaaggcgggggtggcgaaggagaggagtttgtactttgtggcgctgcttatgaatatgtaaagctttcacatcactcgattatttttataccaccacacgtccgcattgtataacccctgttcgctctcgcacccgattgtttttattttacaacgtgtgcgtctttctcttctcacaatactatattaccctttactctaggcctatatatatactaggtaattgttacgtgtcaaaccacgtagtgttagttttatttaat

SEQ ID NO: 308315 - DNA, 1621 bp, Cannabis indica
ccaacgacaacgagtctatttttataagccataagtgatttatggtaacaaatatatgataaagcaatgtaaagacaaaggaattttatagaggttcagccccgagcagttcggtagtagcctaatcctcgttattgtattaacttaatatcaaggagaaagattccttttcttatagctcttacaacaatatctctgaatgtataattcttagataatatatttagggtatagtcttagctcaactgcttttcgacctcttggccagtgaacatgcatcactatttatagggctagtaagcttggggaggaagagtttcccctctcgttacaatgcgtataaataggaagatcgtgggatcaatgcttaatgcaaggatcgtgggattgaggctgaatacactgatagtgggatcgtgtgtataccatatccacgtaaattgatccctgagttatagggattgtgctgatgactcacgatgcgaaagctgaattcactaagtgttggttgctctgcgcggattgttgaatactttgctctaagaatgccagcgaggcatcctgctcggactatgcttcccgagcagatgttccaagtggattccacgtgtcaccattcatgtgacgccacgttagagtgcaaaaattgggataacaattaagttgttctagggtttttttattattattttactggaacacaatatttttgtaattttaaaactttaaacacggtattgctgtaaagttggtatagtaaaaatataaaaaaaatcgtgtcagagtgtatattttgtaaaattttccccactttttcagtatttttgtaagttctccaaaaaagaatcactatgtttttttactgtctgaacttacagaccacgtctccttccttcttcgttctcgtcaggagcctcattttctcctccttgtttgttctcaattgaggcatgattttcttctccaaaaaatcgtccaagctttgcaaaactaaggttgcaatgtagatcagaacaaaaaagtgatctgatctcctaaaaaatcaaaaatcaaaagatataccagaaaaaaaaagatttgtaacttttgcctacattaatttgaaaaaataacaatctaaaaattataattctaattatattgtacagaaaatttgttaacaacaaaatgaaaggggaattgaagcttatccaaactggaaaaatctgaagaaaaaaaaatttgaaggtacggagattttagtgattttctatataattagattattatttagtgttttaaatcaaattaaacataattcattgtgtaaattaattgatttgaaaaaacaatgcaattaatttacaattgaacaattactgaataaatttgtatgattaaaaatgcatttaaggttataacctgtttgttgtcatggacattttaatagattaaaatatggttgttttaaattattaacacaaaatactgagacaaatgccataatttaatgatatgaacctctacaaatattaatggttattgggatgacaacaatactatgttgattacggtcaagtcgagattaatatcaagtgattgcacttatactgaaatagtgcagataatgttgcaggaacta

SEQ ID NO: 308316 - DNA, 1592 bp, Cannabis indica
taggtggccacccttgatattcatagagacatcaaactttttaacgtctcctctcaaaatgggcctacacataacaatagcaccctttaatagcataatcaccaccacatgtattcaaattatcctaatatacctagttgttcacaaaattactggcgaatcctaaatataaaattaggtagttatgtgaagatgtgtctgtcaactacataaaatcaaaaatgacacattaacctatctcaattaattgattggcaaatacctctacaattttgcttctaggaacgaataagatgactttgtttcgtctcaaatcccatcaccacaaacccaccttccatataaatttttgatgcaaaaaactaaatgatcataaaagaaacatattctagattatatatatatctcagaaaagagagctacataaattaatacaagaataagtaaatcaccataaaaactttgaggatcaaactctattcaaacactaataaactttaaaaattaggaagacagattgcatatgaggtttaataaaaaagttatacatataaaatacataaatattaaaattgtaaaatacataaggtttcattttaaaaaactcgctctaacaataaagaaaaacttaggggatactaatttcgaacttcagggatggacaatatagaatgaccaaaaaggtcaccattataggttggctaataaaaatatctaaacctatgctaatgataatattcatgaggttgtacatgaattaagttacttggatattaaaggggttttatgaatgagctaactacatccgatcgctatcgctatgaagaattctaacctatttttatatatcatatatggaaatctaaaaataaatacaccaaccgtacatctaataaaaataataacgaaagtatagataaaaatgctaagaaaattttaaaaactaaacctaaaatatgatatataaatttaccctattagtacattagttgccttaagaaaataatagatatttttgccatgcttattacactgcttatcatcttcttttgtacttgttgacgaagtattaggagcgacatgctagaagcgacttgtcgtcctaatacattttagagataactataaagatttttagaggcgacctaatactatcttttgttgtagtgacatccaaatctttgttacccagccttagtttacttgtagatcgtactgctataatacaaatagtttgaataaattaataagaaataaatattttttaaaaatgaattaaaatttgatttaaatgaaaaatatatatttttttgaataaaaattaaatgaaaaatattatacatccatatacaaggaatttttttttttataatgtattgaaattaataaacagctaatattagtttcttttttagtggattatctatggaaaatgattcatacttttgggatatataaattttcttgtaggtgtggcatatgtaagttttttcttgaatcattttattgaaagcaaaaattagttcaagatttaataaatcaaataatcactacaaaaaaaaaattatttttagttataacaaaacttgtga

SEQ ID NO: 308317 - DNA, 1775 bp, Cannabis indica
tcatgtcatatctacattcagttggagttgggatttagggactaatacaaaatttgatataattataattacatcaaataaattgtacttgttttttctttaattttttttactataaaaaattggggacattataagaaaaccaaaagttctggcctcctcttgtttattgcttattgttttgtgtttaatgttgttaaattatgttgttctgtgattgtgatcagttatcgaatataaggcctcctttatttcttcccctgtatattgttgtaacagagcttgaatttggaagtccttaaggacaggccccacacgaacaatacctctaagaactttcctcctttgaaccagattagtgcccaacaactgattatagaaatttaagagcgctttgttcactacccatacttaattcataagcccaaaatccattgacatcattcatagcatagacagaattctgcaatatcctcatacacaagctattatgaaacatccttgaattattatcaccctcattaagccatgccattttagctttttgcttcatgaaagagtaatacgcctaagaaacagtagcaaattcttttctagctagctgaaacttctgtagctaagtactcagtgtttaacgggtcgttgtttacctctttttcacagtcaagaagtctctctctagctatcttttccttaacaactatgtcaccaaaactagattggttcatctccttcagaacgcatttgagtctcttaagtttctgacagagacaaaacataggagttttcttcaccagtacacctgcccaatctcttgccaacctactttgatactctagatattgactatgaaagaaacgaagtggtttgtgaccaacaaccctaattgggtagacagaaaagtgatacaaaattcccttcaaggtaaaaagttagctgcaacacttggaaattcatccatccaaatcggatttgcaagcattctctctaactttgtgtaatatcctaaagatttgtggagggttagcaaccttaaacaacttgattatgtgttcatatgggattgtaattatataatccaatatgaatcatcatatttgtaaattattgactctaagttcccctttatgtgtttaggaatatgttcataatttgaggtaaatttgtaactatcactatatttctactaatagactacattattatgtagtaaaatttatttattgtgttacaggtgactctcgtcgagttaatgcgatggggttacaatgaatattttagcttggactgagttcggagtccaatattgtgtttactaaagttctgaataattattataagtggtatttttagaataaatacccttttagcattaatttattacttgttgtgaaatatttaacatgcaagagaacattaggtgggtttttcgggtgcaaattttgagtgtgaatcgaacccacttgtttgggagtgcgagttttcaagtttcgggtgcaggttgggacagatttggttggggtgggcaaattttgcgttggactgggctaataattttttccaaaacaaaaatatatataatataaatctttatttgtcattttgaacttgaagcaccaaagggcaaggagaaggagctaccactgccaacgtcttgaagcttctgcacacggtcgaagatcgagtgaaagtgttacgaaaattgtaaaatcaatacgcaagtgcacgcaattaagtagtaaactcacacaagtgaggtcgaaccacagagaatt

SEQ ID NO: 308318 - DNA, 1713 bp, Cannabis indica
tgtcagaacacacctgaaaagacaacacaggcatattatataataatatagttctatcaagcacgtaattaaattaatttcatcaatttacccttctcgagtcataattactataatgcccctggctcaccaacggggtcttaccatgttataaatcaaataaattctcatatattaaactatacaatagtataattcttcacttattcataattatctagttagggtttcgctaatctatttcttaattccgggtattacaccaaatgtctgtcaaaatgtctattcttcaaatttgatttactcacccttttgggttcaagtttataggctcccatttatgagcaaaaccaagggattggctgtcgctcttggaaacatcatagttaagttcattgatgtttttgaggactctctttttgaaggttggggtccattcttgcatattcgagtgaagattgatgttaccaaaccattaatgcgtggaagagtgatcactttgtcccaagttcgtgacaaattctgggttaaattcagatatgagcggctacctgaatattgcatggagtgtggaagattgggccatctattcaacaaatgtgtcaccttccttgaaaaacttgacaacggattggaactcgaacttgaatataggcttaaactaaccgacctttgagtgtttgtgctgaatgagatttcaatgctaggggtggtttgttcgcccgtcgtactggtattcctagtttcttgtatacctggagtgaacccagctaaaagcgaagtcactccatggcccacgtgagtggttttgtattaacttgtcttgggttgttcctgatggatctctcgcattttcaggagtctacacgcttggatctgtcatcatcgggttgactgaatcagtttgaattcccccacgaattacaaaaatcttgtatcatatcaaagctttaagacaaaaaaagcttgtatctctgctctcaatgaaagcaccaaaatattgatttcgcttttggccaatgacaatgagtctaaatattaaagcaattagataaaataaataatgaaaagcaaagactgtaaataaaaaaaaacacaaaaatttctagaggttcggcccgtgatagtggtgatagcctactcccctttagattttattgacttgtgagacaaagaacaaagtatcctctctctcaagctcttacaatagatctctgagtaattctctcttagatcactatttctctcacgagtgttttctctctgatattattcgtgtcctcaaacagtggggtgagaccactatttataggggctcattggaatggtttcccttaatctataatcaataaaatgggaaataaatatgtttccataattacaataaaggatttgggcaagtttaggttgattgcccttattctttaaagatatgagtcaatctcacaaaagtagggattacttcgtgtcatgcaaacttgaatatatcattgatcactgttaaaatttccaactcacatttccaagtcggtgcatgcgaattgatcatacaattgggttggtcagatgtccttcaatgaccctgttcagaatcctgccatgcatatgcaatttggatcttcatatcaatccttatggactgctaggagtgaaacctgttggaaatattttaccaagatctagatttactaccaagtatgtttcattaacatc

SEQ ID NO: 308319 - DNA, 2485 bp, Cannabis indica
taacctttttaagtttcttaaatatggataggattatactcatataattaattataactaataaattcattatttaggtttaattaattaaaattttatatttaagtaaatatcctaaccaattctgttatacatattatttcaaatttaaatatttaaataaataataatatttagttaaataaatgagagaatctctcaaccactcgagagaatatctcaactgcatggagagaatctctcaaccactttgagagaatatctcaaccatattaaatatctacaactaacttttaaatttaaatttaaataaatatttaacttttgaattaataaattgatctaaaattaaacccactggggcctacatcatgtagtaggcagtgttaggtgccacctaatgtcttaacaaagatattctttcctaatttatttaatattatttacttaaatttttgcacttgcaaaatatttctcatttctcttttattttgtcacatctgtacccttgataatgtagtataaatgcgactcgaggaccatggacatataatagtaagctccaataaattagattatttattgagtctcatcaatacaatagttctatttattaatttaattcttattccactataaatatagaattgtactcttagttattgtagaattatatttactaagtttacttatagtgtccattgttataatcaatactagtagttcaccctccttgtattggctcataattaaaattggttaaattaccgttttatttttctaattactttttttttctttagttaccattaattctctagtggtagttaatttgtgatcatatcacaaatttgcgtgtaatttttcagtactagaattaacacttgggaattaatatttgatctattaggaaagtcaggattctatattgtaaatcaagttcctaaccatccaccttattagattcacaaaacagaagttgtgagaattatctattctgagaaactttaaagagtaaatcaaagaatctaataacatgaacaagagttcacgataacttaagatttaggccgatctactattgatcatcgttatgatatgaattaggtctttatgataaatgacatgttaataaagtcaacttcattcatatcgattcttgtcatatataatctatattatatacaacacattcaccgagatgtcatactacatcaacaattcgaatcgagattgcttgcaccaaataatggacattagtgaaccacactagcaattgttgattaaagattccataacttgaatatgttgctgactattttatttatggctcgtgattctttttttttttttattcatggctcgtgatcttaattctttgtacaaacaagtcacaacctcatatatgaataagaaattttctaatatttatatacataaattatcaataaataatttaatcatcaaatataataacattgttctctttatttaataattaaaatatatttacatacttttataatctctaataaaatggtctccttccaactcttcataaaatatttaatgcattttctataagatagtgtaaatctcaaacatctattgaatatccagttgaaactttcaacaacccaaactccatcatacagtacaatcacaaacacaattaaaaatgcaaataaaaacagaacaaaaaattaatttaaatcactaaaatgccaataaatgtcgctaattgtccctacaactttctatatttacaatatcgaaaaaagtactgaaaataactaataaaacattgctaattttcactcggctactattaattgtctcatatcacaacttatatagctaagcatgcaacacaaatgtccatgatatattgcaaaggatgttgctatacatcggtaaatatcgtcaaacttcatccctaacttctaactcacacgcatatcgcaaaaagttgcgaaaaatgttgctaaacatcattaaaacacggaaaaacccaaaaaacccgtattccgtacaatttcatttcagaaacaaaatgatcaaacaaaaagtagcatatgtgaagatctattcatatcaaacaaaatacaactaaatctaacaacatttagtaaagaaattatattatacattatattttttttcaagaaatgtgttgacacagtgagattttgggtttgtcatacgcaattgacgtagagtttggtggtccagcgaagttgagaactccggcaaagggtgctccggcaaggttggggtgacttgggtgtgtgtgtgactttctagagagagaaaatagaaagagaggggaaaaattgagatgagtttggttttattatttagggtaaatggcggcaagacctccaatactttcgttttggtttcattaaacccccaaaacccaaatttctgcgggtaaacccccaaaaccagaaaactgtaagcaatttaacacttccgtccaaat

SEQ ID NO: 308320 - DNA, 1598 bp, Cannabis indica
ttttaaaaaaaaaaaattaatttgggcggtttaaatcaaccaaaccgaggttcaaaacggtcggttttaagataggttctggattggtgggtcagttttcggattgcaccaatccagaccataaactgaattttagatttttatataaaaaaatcgaccaaaccgatcgatactcaatcctagggcacggtactctgattcaatactggatcgagaccgaacaacttatttcttggaagactaaaacataagtatatcaccaagatagacacaataatccctacagattttctgtcatcaagattactagcccaatctgcattagagtagccagtgatgttcattctatcactgcaccggatatggatgccttgtgttctggttcccttcagatatctcaaaatcctcttagttgcattacaatgtgtgtctgttggacctttaagaaattgactaataaagtttatagagtagtttatatctggccgtgtatgacacatgtattggagtgctccaatgagacttctgtagactgttggattgttcattttctttccatcattgatggacaaagatttcccagcagcagtaggtgttggatagggtttcaggtgttgcagattatttttctttagaaaatcttcaatgtacttagtttgagtgagatagaggcgtgtttcatctcttacaacttcaatgccaagaaagaaatggagagcaccaagatccttgagtgtaaagtgtttgttttgttgttgaacaaactcattcaatttttgattgtggttaccaataacaataatataatccatatagattagcagaaggatgatgatattattgctgatataaaaaaacaaggatgtgtcacctttggaatttttaaagttccaattcagcggagtgttcttcaacttgtcaaaccaagctcttggagcatgcttcaatcaatacaaggatttgtgcagcttgcatacataatctgatttctcaggatcctcaaagccgtcaggttggcacatgtatatatccttttccagattaccatttaggaatgcattgtgaatatccaacctacttcaaccaaataaaacatagttttcattctctaacaactagtagatgagagactcctttctatagtgatttcgcacctcttgctgttcttctccatattcaagcctatagtgatagagtaccatgcccacacataacaagtcaagtactcaatcatagtgccgaagacgatggttaaccaacctgaaggagagaaggagatccaggcttagatcttattattactctgtggcagaaaggaacaagggttagtgatctaagtacaaggagtcatattatattgctaccttcaatgtaaggttttctaaactcttatgtgttcaattttattattttggagaattcatagatagagtgctctggtaaaataagttccaacacttagtgcatgtagtatagaggtcgtacttttgttaagaacgttcttgattcatctgaagcattgtaggtaggtgtatgggggcctagctgtaggttgactatatgtttatatgatttattcttttcttgttgagtctatt

SEQ ID NO: 308321 - DNA, 1622 bp, Cannabis indica
gtgttcatatttttatttttctatagcttttattttttctgtgttgaattatcatcgtaagacttaaatttggttaacgaaaatctgcgttaacacttgtgaatatgttaaaaaaactaagagatatgagcaaaagacgattcatctcgaaatgttcataagtgaagtaagaagattgaccctaaggagcataaaggattcactcctaagtgctatcttaagacttattgtaaacatcaaaagcgaggaagacacctcaattagcgtctcatacacttagtcattcttaacattactgaagaatgtgaggcatatcttgggtatgatatctcgctaaagaaactaccttcaagataagtataaaaattagttactattagtttattcatttatcccacatgctgaaatatgaaacgtggggactgtccacgtttcataaactgttacgatgtaaggaagagcaatttttgggagaaaaaatcttgaaaaattaagtgtagaaaaacctagagattattactttgtatcagatattttgtaatcttaaacagattaagaactcataaataatatggactcctggactatgtagatttaactacaaaatcacgtaaaaattcttgtgtcttatattatctctattattaatagatacttttaattattcaaaaagtctcattattgttaacgaaattctaggttaagaatttggtactttcattgagagcctttaattaaaattaaaactcgaaaaaaaatgcatctccctagaaaagtcaaaacttcttcataatagaaatcactcaactagattagaaagtgagggaagaggagacagtgcatcgcctagggaaagaaccccaatgaactcaaactcatagtagaacgaatcaaggaaggggtcctacaagtaggaattctgagaggaatgttcatgaggaagaattccagagaggaggagttcaaatgcttatgatcccacgaggtatgttctaattgtagaattgaagaatcgccaactttggcaaagacttgcaaagtcaaactgatcaaacgaagaattggaatgagcaatggccgcgactctgaatgatgcaccacttgttcaagaagaacaacatgttaggtgacaaagggggagacctcgcggatcacgaacaagaagggcacacaaacaaatattacggaacaagagccaaataatcctactcgcccccaggagcaaaaaccagcaccataagaaagtggacttttgtcgacgtatttggccaaatgcactggcaaaagttgtcggtgaaaggggatccaggggaattaaaaatgaattgggcttcacttttaccaatgtaaaggtacaccagtaaaggacacttatccgatgcaattaaaacctagaaactaaactatcttttggcacaaatttttcgacaacacataagacttttgtcgacacatatatgccctaactataagtcaaaaaaaagttggagagaatttttcctgtcgtggttttttggtaagagggaaaactttttccctttagcttttgccgacgcatatattgttggaaatatttttaccaggatctagatttactaccaagtatgttttattaacatcct

SEQ ID NO: 308322 - DNA, 946 bp, Cannabis indica
ttattttttaaaatttatataaaaaaaatagtattagagtatttttattttaccttattaggatattaggacattagctcagcagatctttaagatagataatgaatttttaaaagagaccttcctcgcttatttattttttcattaaataaaatagttttacttaaatttaactaccgattgtagataaacacctaagttcaatttttgacaataataatacttatattatatttttgaaatttctctatgtacataaccattaatatcaagtcaatagctatgtgataatttataattagtcaaagttattaaatttttattttatttaaaaaattaatttaattatacaataagaaaatgacatgtgtgtaatgacttgacacttaatagtcgattagatgttctaaaaatataacttaaaaatttatctataaccattcaaaaaaaaattatctgagagttaaatagttaaattttattaattacgacataaattattatatattttaatattttttccttgtatttgaaaaaaatatattttattgtaaaaatatttgaatacctcaaaatataataaataataattatttatttactatgttgttgcttttgtaaaaattgatgccttttgaggaaggaattccttatccaattatttccaacaacttggttggttgggtacgtgggtaaagacaagacaaattcaaaaggtgaaatatgaaagagagagctcgagagagggccatttcccaatggtatcaaagtttcgacaatggactttctattttatgtcataatgtccactaataattttaaactagtgactttataattaagttactaatatttttaaaaaattattatattaaattaggctaaatagtaatttttctctctgaactttgacatatactaagttatgcccctgaactttttttgc

SEQ ID NO: 308323 - DNA, 924 bp, Cannabis indica
aacgatcaaagggagagaaattcaaagctggggttatgattattcaaaatggagttcattcaagaaaaagttgataaaaacaaaaccttaataatcaagttcatatttcttaaagaaaaactcagaaacaataaaaccccaaagagaaaaaacgattaaaggaagaaattaagaactggggtaatgataatacgaaatgtagttctagaaaagttcataaaaacaaaaccttgaaaatcaatggcctagtttggaccggtgatcttcttttgcaacgaatgttcttgttgttgctcttgaagagtgatgattgttctgtgttgaaatttcaagtaaaagaattctctgagaaagagagagaagcagaaacttttaagaaagaatgtttgtgaagaagagagtggaaaagtgtgattgcattgttcggttttgtagagttgacagtttatatatgtactctgtttcaaaattcgaattttagtttttttttatatagccgttaattatccgaaaggcgttgaacgtagaagaattcagttattttccacatgaaacaacaccaaatatttctcaacagtcataaaataattaaatattattatgaataattgctctatttgtagaataaatttgaaaaggaaaaaaaataacggaaaattctaccatgcacttccttaaaatggatatattgatgcacccctatctattttagcatccgaaataattttttagtcaaattttttctcatggtcatgtatgttatacttatttaagacatcctgtaaaattttaagaaatttggaaaagtttaacatgccgaaaattatgttcaaacagtgtgttgcacgcgtgactattttatttcatgcgcgtgtaaaatagactgtttgaacattattttttatattgtaaattattccgaat

SEQ ID NO: 308324 - DNA, 1463 bp, Cannabis indica
tcttctttccaagttggagactacaaatggtaaacttaaataatctcccattattaattaatatacatatatatatttctttattatgtcttataaattgccttatatatacaggagattgttattttatcccaatggagataaaaggttcaatgctaccaacaattatatatctctatatttgacaatatgttatactgatagtcttccaagtggttgggaagttaatgttaacttcactttattagtctataatcatagacacgataattacttgactttccaatgtacgtacgtattttagttgtttttgtttcattattatatacttttgctttgttttgtttggatatatatttatttgatatatgtaggtatgaggcgttttcatgaattgaaaaaagaatggggttttgaacaaatagagtcacttgaaactttcaaagatgtatgtaatggatacctctttaacgactgttgtgcatttggggctgatgtctttgtcatgaagcacactctcaactcagaaactctttctgtatttagacgtgaggatctaactaatcctactttccgttgggagattaaagagttttctaaaatggataaatcaatcatatctaaaaagttctgttctggagaaacacactggtatatatgttcatccaagacaatgttatttttgctttcaactttcagctcaagtcctattattactgtttgattttttttaataatgttataggtatttatcgatctatccgaagggtaaaagtagtaaagatggcaaagcattctcgattttcttatctttagatgatgatgatgatagtgctcacaaaaattcaacaatttatgctgaattttatttgcgagtaattgaccaactcaattcaaagcacgaagagggtgcaggtgattatattttcttcttttttatgataatatacaattcaatactatgtataaatttaatgtaattaattttcttgttgtgttgtaatattcaatttctgaatttgcagttaatcgatggtttagtggttgcaaaggttggggtgttcctgaatttatgttattggaagatcttcacaaatcttcgaatggttacattgtaaaggattctcttatagtggaagttgagttctccatcatgtcacgaactaaggtttcaaactcctagaattgaagaacccccagaatatgctgaacgctggaattttcaagcataatgtgactgaattttcaagattaatgtaaattagttgtcacttttttttatgaatcagcaggtcaatctttactccaaaaattcgttgactttggaacaaaaatcttagtgcatgtttggcatcataactaaaaaactgttttttgtttttaaaaacagaaaattgtttttaaaaacaatttgacttgtttggctttgttttttaaaaacagttttcagaaaacaaagttac

SEQ ID NO: 308325 - DNA, 1116 bp, Cannabis indica
ttttttttttttgtattctttttctccttttactacattgacaattaatccactttaataattttatcaatgtgtttgaactttgaatttgctttgtttattttgtatgtaataagaacactcctctatttttaatataaaaaaaaatataatattaattttatttctacacataataattttttaacatatataaatttaaaatattatatacattattaaaataaatttaaagcataacgaagaaaaagagaaaaaattggtaaattataatagaatagatgtgtcatcggtcaatgcctgctgaagggtggggcagcaagagccactgccctagacccctagcccaaagaggcccaattttttacttgaagaggattaaccacttggagatcttgtttgaccttgtagcaagtcgataaacgggatttgttacacttgcccattttgatcagaaacaaccgcaagcccacgagattctccagttgattggtttggtgcatcagtctgaggatgaaaattgcactactggtcattatgcccagataataatgacctggtagtattgcttgtctgctgtgtggctcacagtttgatcatatggtctcgaattggatggactgtcctgtcgaggttgttgagtgtagttgttggacgttcttctggaccatactatcgttcatttggattataaggagctttccctctatttggacctctcacgagcggagtgtctttcggtttttgtcgtctagtttattgattaaattgtctaatcagttcggttgcttgcacgaatcgattatcaaccgtgcttacattgcttggagtgcttggcttaactgtaagggctcagatggtaataattaacttgtctggatgtcccatgctcgtctttagactttatcgttcttggacatgaatcatttcgaatggtacatcgagggaaatatcgtccgtctaaattttagattgttctttatgtgtcactcataataaggtcgtgtcatcttgtgcaaaaattagaataagagtaaataaaaaagttcaaagcataaaatataatttttttttggtattaatgtattatataaattttctaaaaataattaaaaa

SEQ ID NO: 308326 - DNA, 951 bp, Cannabis indica
gtttggcagtggcatgattgggggggtgtttgattgtgcatctgaaggagttctctgatggaggatcaacaccttttgatattgaattttaaggttttcgtttggatgttgagattgggcttcacggtggagagctggggtgcttctcctcttggtgatagctagggttgatctgcgtgtggtggcgccccaatttcttatgtagtggtatttgatgatctcattaatcttttttggtattttaatttccttatttcatttttcaatggctgtttatttttattttcttatgctttttttaagctattgtcttatgcttttaataatggtagtttctcacgttctcattagatcaatgggtgttttagtttttatctcgaatgagatttctctgcacagtggtcagatctgggggatccctagattgttatgaacctatttttctatggatctaattgacaataggtttgtctttggcttggcttggtttgttttgttattcttctttattctagtttagtgtctctacccaatttttattagaaaatatttggttgcttgtcattgataggtgtgatctgtcacatcttcattcgggataaaaatttagtgttcttcgcattctttcgatgtttcgtacactgacgatttatgggtcatttagttgaaaattaatgttgtcaaggtcttttcctgtttattgtaaacggtttggttagtctattattgttgaatctgctcgataaacaatatttacatgtaatatagtatatctgatttatctattaatagaaattttcatttaaccttcaaaagaacatataactttttttgtgaatattagtaatgatttatttttacacatgaacttattaatttcaagtacttggagaaacttaccaatgtgtacacttgtgtataaatgacatatttttattgactttaaagttt

SEQ ID NO: 308327 - DNA, 769 bp, Cannabis indica
acatatcaaaactatattattataaatttagcattaaaaaaaactatattattaaaaaaattgataaaccaatcattaaagatagaatgatgaatattcaaaaagaaagaataaaatatgtatgaaagtgaagaaattccttcttgagtaataataataggtagccataattatcaattttttggtgcatgttgtccaaagtatcatcgtcaactatgaaaaccgaattaatatttatacataattataataatgtcttcgtcaaacaaggaatttaaattttgattatattataatgatattgacttgtttttatataacaagtctaacaatctaaacatatacatacataaaatcaattggagcaatcagcaatggagataataataataataataatcaacaaatgaatgtgaacattctaatatattgtgaggtagctagggtttatggtgtcaaaatcaagcaattccttgcaattgcatgggaaatatatagggggtgttacgtccatctccatgaacagaaacttggaaaacaaccatatcaaaacaaaacaaacacaattaactttaatttgcataattattcaactacccaaattctaatctaaaaggatatatataataataacatgaggtggccccattatccttaatttataaccaatactcattcacacatatacaaaatttaaatttataactacacggcacattctttttatttatgtatttatatataccacaaaaataaaaataataaaaaa

SEQ ID NO: 308328 - DNA, 1412 bp, Cannabis indica
agtgagagaaaataaagtgaatattgagaataaaaaatacaaaatagactacatgattaaagaaatttgtattttgaaagtaacttattttcatttcaaaatttttaaaattgtgatcttattttgaaaattgaaaaattaaaataattttactaaatataatttttggaaatattttaactttttcaactagcaaaattctaggttacaaaaaaaaaaaaaaaaactagaaaaaacataatttttgaaaatttattgtgaggtttgccattggataatatttatacaaatttggtgtttaccattgtttagacttgctctaatctccaatggttaaactattttggtgtatatttttttttactaatttggtgtaattttgttagtgtaaaaattctaataattcaatatcaaacatcacactaaatatgatacttaataaaaatattttattcaaaagattttatattttatattatttaaattaacaattaatttacaatataattatacatattatcaaaaaaaaatataattaataatttacaatataattaaccactatatttcaaaacaaattaaaagaagggttcaaataaaaataaaaagttatttactaacttagtgttgattccaaattcaacacaattagtaaagatttggtgcataccaatttaatgaattcttagtagaatagtgtaaagatttcacactagctaatttggtaggatgatgcaccattaaagatactgagagcaactcaaattttaacattaaatttagtgttacactaacattgaatttgatagttaagactctttctattctaattacaacaccaaaagtcacactaaaaattatattatttattattgtacattagtttttttaataaaactagattaatctttattaacataaataatatagaaaaatactacaatacactcctgatgcacctttatttattttggcatccgaaataattttttagtctaattttgttttttgtggttatgtagattgtagttatttaagacgttctgtaaaatcaaaaaatttaacacactgtttcaaacagactgatgcatgtgtagctttattattttatacttgtgttgttggattaattccccatataagttaacatgcaacagttaataaggtaaaacagttagttaaaatcctaactaacctatccatatgcaatccaacatcaagacatcagtcagttattcctaactgacttcttctactattacaacacctataaatagaaggacttaaatcagagaatacttacagcttcatttttctcttcagaaatccagagtaatgagatgaaaggtccagatctagaaagagagagtttctctcgtgtgtagaaagaaagaaaccagaaagaaatatta

SEQ ID NO: 308329 - DNA, 728 bp, Cannabis indica
tatatatatatatctatatatgtgtcagaattgaaagtactgaatcctgtaccatataggacccaactcatatgttgtcagaagaaaatctctcaaaaacatctttttacataacggttcctaaatttgtagtctttccattcccaaaaagaaaccctaatttttcaatatgaattcccaaataaactcacctaatccaaaccctaattcactcaaaaacaggtttgccaagggattcattagagccttgatgagaatacataaatctccttcaaataataacaactcaccaagagagatctcgaaacgccgccgcagaatcaagaccgccgccaatgctgccatggcctcggccgttgggtccagaaaagtactatggagccaggcagtgttgcggaagatccgcaacaaccgacctggcagtcacggcggcagcagaagcagccgccgtgtcattttcaaaagaagtattattaatcaaaagagttttgtcaagaagaagagagaagaagaagaaatagtaggttttggagaagatgatgagaagaagcttaggaaggtggttccaggtggtgcagccatggatatttgtagcttattggatgagactgctcattatataaggtgtcttactactcaggtaaaggttatgaaaaccataactgaaatttactcaacttaaggatgatgatgatgatgatgatgataaagatggtgagtttcttctt

SEQ ID NO: 308330 - DNA, 2024 bp, Cannabis indica
aaaacaaaggctgaaatgttggagaattgtttaatttttgtgttgataaaagaagtatacaaatttagcttaactatcaattttagttatcaagcactactaatagtactgtgatagatggctaagccaaacatcaatggttgtaattgagctcaaaagtatgatacatgataatcaatgtcactatgtattatagttttaaggaaaatggagtatattttgtataataggttttcgtgaccttgatgaataataagtagtttttctaaattaatggaaggaatttgaaaatttttctagcttgtagttcgattgactgacacaatcattcatatcattttttgtaagtcaatttcactcttttaagtatgttttatcttatgagccaagtgctttgggtcttttttctgatttgagtgttatttttttggaactcacaataatttaatttgggttctgtgtaacaatgtttaatttcaaagttaacatacataagcatcacataattttttggaactctaaaacaaggagaaaaatttagtttctaaaactagaaagctagattctacgaccatactaaaacaaacttgagtagtggaaagcagctctctcatcttccctgcttttttttaccttttgttttgtttgtttggagaggggggagcttattttcatttcacctaatgaaatttgggcagcagggcttttctgatcacaataatttaatgactcggcttttaaaaaagacccagatttactttctccacccccaattttgtgaggcgcctgctgcgcctcacctcttacgcctctctgtcacctcaatggataagccttgagcacttttccagtgcctcaaattatggcacatctcaaaaacgcctttttaaactatgtttccacatctaattgctaatatctatgtaaacttgcaaacatagagttgaatttttgtatttcatattttttgatgtgagctttcaaacattaagctgacgaattagattttatattatttttggtaaagttttagtttctatatattttgctttaaattttctggttttatgtacagaatttaacaattttgtttggttggtctctttctagcaattgagtttgtttttaactatatttattcattcatttgtttgcaggaaaatattaagcggtgtgtttgcataatttatgatccatcaaggtcaaaccagggtgtcttagcactgaaggcgttaaagctttctgatgcgttcatggaacttcaccgcaaaaagaactttacaggagagacgtatgtctttctggatttttaacttattctaatgaaagtaaactatgagatgaagacttatttttctcttgtgctacttttaggttgagggagaagaacttgtcttgggttgatatttttgaggaaatacctgtaagtttttttactttttactctctgatatttctgacaatgaagtcgtttttaatatatatatatatatatgtatatattctgtttaataataacttctgtggctaccgctacctactgttatcattagtagcatattatcgagagtattttgattacttcccatcttaacattggatgtgtgcactcacaattcaatatggatttcatcattttctgattgatgatcttctacttgatagattaaagtctcaaattctgcccttataagtgcctttatgactgaactggaagctgatacccctgttacccaggtattactaatcttttgctctgaagtattctacatcttttacatacttgcattctgatttgacgtttattccatactagtgtgactatgatcgtttgcaattatcaactggtccatttatggagaggaatatggaatttttgattgaatgcatggatgatttgtcaatggagcagcaaaaggtttgcagtcctctctctctctctctatatatatatatatatatatatatctatctctatctctatctctcctctctctctctcacacacacacactgtgtatggt

SEQ ID NO: 308331 - DNA, 1087 bp, Cannabis indica
aatcaaatcacacaacacaaaatccacaaactaattatcaaattagcacatttaattacaatacagaacagtaatctagtgttagaaatgtggaagtctatggttgaggaaatagaaatagatgagtgtatcgtaatttaatggggttccatctcaaaactaactagcaatatgaagagtagttcatagatcttatatgctctaatctttctacacattaacaatttgggactctctaacatttagagataaaaagaaaaattagggaaaatgtaatactaattagaaatgtactgtggcctctatctaatgtctggaaccaatgatatctttagataagattatagaaacacaagcatggaaagtattcatacacagggctgagtgcaaacataatctcacaccttatttggtaaaatttatcccaactctataatgagttttttgtcaatgttagtgttgcagatttcaagcaaaacttttttacaaacttagaaagcaccaataatgttgtaaatgtagaattaaatccaaaataatctcattatatttgatgtttttatgctgttgtagcgggtgtcatgtatgaaatcaaaatttgggtatatttgagaaaaaatatatagatccaatttgtaagaaggtttgttggggcttttgccaatttgttgtatttggttcagtttaataaatataagttttatttcttattaaaaacaaataatgtatcttaaattaggtgaacattacgacctttatggcagtactaattataccattaagaatgagcaaaacaccattgataatcggtgttgaggttatttttcaatcattttaaagagaatttatacgaaaataagcaacataagtgcaagaaattaacagaaaatgagtgaatttccattaaattaaaaatatatcgaactacatatttctacaagaaccaaaacaacacgaaaaggggaaatacaagacctaattacataaccagacctagtttttcctattattttccattaacgcgtttaggccttcttgggagatttaggcgatttagttgcagttttctcagattcagcagacttag

SEQ ID NO: 308332 - DNA, 1660 bp, Cannabis indica
aggtgaagagagttctcaagccaggtggactttatctctttgtggagcacgtagctgcaaaaggttaatagacttgaacttgtaattaactcagctaccacatgcaagcttttattataatcaattgtttttgttttcttcttcaaatgtagaaggaagctcactgagattcatacagagcattcttaaccctttgcaagagactgttgctgatgggtgtcacctgacaagggaaactggaaagcacatatcagaagctggattttcaaatctgaagctcagcctcactttcttatctaatgcctcgctcataaaccctcacatctacggaatagcttacaagtaaatagcaatacctgcaattttcaccaagccatgcccatgtcatgcaattcaaagtaacaattaacacataaaactattatttatactattgggggttcatattaagtttggtcaggttgaagggttaatcaattgtaggcctatatattttgaatgtatacaagtaaatttatatattgacaaatttacatcctttcctagcaaagaaaaggttgtggggaaagtgatattatatacatagtaatgattgttgttgattttgtaaagactagtgttgaaaagggtttgttcctttcccttgtatctcttctgtggacagagtaagatgagagaagacaaagccttatgggggttgggtcggggtgtattgatgataacataatgtaatgttcttcaatatgatgggtatgaaactctgttatattcttatttgaatgcccctttttggcagagaatactgttatgtagttttataccccacatatatttgaaacactaatccagtaagactagaagtataatatattattcattattattattatttggcttgtgaaccattatgagaatgcagtagaagacaatttacagatgacaaaatatattattccattattatgttatcgaggtccttctgtgtgttggcacaggacaagagagataccctttcattccaattggaatatttgttaatgatcactttagaaggggcagtgttcagggttggtgggttttgtttttcattgttatttagatattcccagcaacatatttattttgaatatcatataagtttaattaaactcaccttgaccttgggagtgtttttttttttttttggaataactgaggcaacagatatacacgttgacaatttgacaatgtatgctcaattatactatctacgcaatgtttggtagagaggaaagaaaaattaggggaaagagagaaatatttttcattaagttatttggtattgagttgaaaaatggaaggaaaaaatagttgtatatttatactatttactattttatttatattattaattttattttattttaaataaatgatacttaagtaaattttaagaataattattctttttgcctttgaacttatgacactattaaatgatgtctctataatatacgacttgttaaaaatatctctcaatataatatagttactgaaatttgcccttcaatatataaaaaaattattatatgaaaataaatgtcattgataaagaaatatttaggggtgagcaacagtcggttttttacacaaaaaaaatccaaaattcggttttcggttt

SEQ ID NO: 308333 - DNA, 1108 bp, Cannabis indica
tttttctctgttacagttgagagcgttagttttctccgactccaatgaacaaaggctctctttgctcttgctcctactctaagatcgcctccaatagaaattacctttgaggttgggaccgttagctgagaatcatttaattgagaatgaagaaaggacatgtcatttgccagtaattccgtcaaaaacgactagagaaagaccctggtgggataattggaggaaggtctggtgttcaacaaaagtgatttctatggtttggacttataattagtatttcctcaaaacttgctattaattcttattctctattttcacatttaggttcctttgttgcttgtatatatattgtcatagctaaatatgtaagtttggtataaaatttcatactcatttattctctaattgactcactttaattgtcttaagaacatgattaaggttagccccaacaatgagctctctatgctttttatgggaagtgagaatgtagtatctcctctcatcaaaaacttagtagaaagaaaccatttgagttttggaattgtttttactcgaagctcaccaaacttttactcctttaaattcatcaacaacttctacaagatcatatatgcttagaacaagtgattggttgtaacaggaacaattattggaacagtattttacattgtaaaggcaatacaatgttttaaaatttaaaccaaacattaaaactgtaaagtgattccatcactaaaatgccaaaccaaacataatcttactatttaattccttattatctcatactgatctttgttcttatttgcacattacttggtttatttttatatttgaccaatttgagtataatttaattgtgtcacttaaatagattgagattattgcaggtgctaatgttattgagattattatctcttgtgtgtatatatccacggcaagtttagtcttagattttgagtattaaattaagctagatttcatgttgagaatggtcataagttgttgtcacacttttattttattatagaaagacaaaatgttttctctacaactgaattcatgttaatgaaacatttttccttagcgcaaaatccatcttgttcaa

SEQ ID NO: 308334 - DNA, 2466 bp, Cannabis indica
tcccaccttgaatgatcgagtgcaggcattgttgttgtaatgctttgctagacactgttagtaggctgccattcttatcgatgccccttctcttctctcatcaactgtgtctagttcgtggaacatgacttccaaatttttcttttcagtagtcagttcatgtctaattgttagagctttactttttgttgggatgcctgcttccattccataggctaaagagaaaggtgtttctcttgtggatgttctagctgttgtgcggtaggaccacagtactcctggtagttcatcaacccatctaccctttgccaattgtgttcatgatggtcttattagacgattctgattggccatttgcttgagggtatttgggagttgagaaactaaacttaatgttccaaaatttgcaaaagttttgaaagtcgatcataatttctttcagaattatgtatctacatataaagtttcttcagatgaatccttttacctctttgtcttgaacttggttgaacgattctgcttctatccacttgttgaagtagtcggtcactacaagcatatatatcttctgtccaggtgtagttggcaatttgccaactatgtccattccccacttcataaaaggccatggggatgtgatcgatatgagacatttagaagattgatggggtacttgtgcaaaatgttggcatttgtcaccttgtcttgtgtattcagatgagttggctctcatagtaggccaatagtagccttgtgtgagggcccggtgtgctaagcttctgcctcccgaatggctgccacattcgcccttgtcaagctcaactagtatgtactttacttctgcagggttaacacatctcaaatatggaccgtaaaaggatcgtttatagagtttacctcacattattgcgaatctagctgcttgagccttgactcgtcgggcttcattcttatcttttggtagcatatctttttctaagtacttgaggatgggcgtcatccatgtcttttcattgggattgtcatttacttcttcctcttctctcttccaaacagcaggccactagaggtacaccattggggttgttttggggccgattgtctggatggaagacacaaggttggctaaagtgtctacatgactatcattttccttaggcacctgattaattgtgaactcatcaaaggtcatttacaattcttttgttctctcaaggtaagttatcattttgctattttgggcttgatagctaccttgcatttgattgactacaagttgtgaatcgctagagacattgattcttttggctcctatttctttggctaaaccgagtccaacaatcatagcctcatactctaccttaatgtttgtagatttagacccacttctgattgcttgcttgatcttctcgccttggggtgaggtcagaacaagtcataagtcgcttcctcttgtattgcttaaaccatctacatgtaactcccatgtgccatctgtctatccctcaggtgggcaaattctttttctacttgcacttgagagttaggtgtaaattctgcaatgaaatcagctaatacttgagattttaaggtagtttgtggcttgtaggagatgtcgtattcactaagctctattgcccactttgtcagcctgccaaacaactctggtttatgtagtatggtcttgaagggaaagatagtgagtattgtgattgggtggcattggaagtatggacataattttttggctgcgtgaatgagtgccaatgctagcttctctagttgacttacctagtttctgcatcaagtaaggatttagagacataataaattggaagttgtttaccttcatcctctcttactaggactgtgctaactgttgtctcaaagatggctaggtatataaagagcatttcgttgtcttttagctttgacaatagtggtgggctaatcaagtatcactttagtttatctaacgcttcttcgcacttagttgtccattcaaatgtttttgattttttgagtgtgttgaagaaagaatcgcatcactctaaggactttgagatgaatcggcctagcgcagtgattcggcctattagcttttggacatctctgatgcatgttggtgaaaggatccttaggattgagtcaatctgagctaggttggcttcaatccctcgttgtgtcactaagtagcctaagaacttgcctgcagacacaccaaaagaacatttattaggatttaacttcatgttatattttttaggtatttcaaaagattattttaaatgattgatgtgctcctctacaactagtgatttcactagcatgtccttgatgtagatttccatggtcttccccaagtggtcagtgaacatcttgttcacgaggtgttggtaggttgctcctgcattcttcaatctggacaacatcaccaacaaaagattcctaggttggtcatgaagg

SEQ ID NO: 308335 - DNA, 3501 bp, Cannabis indica
atcccaaaaaataaaacttagctgtgtagaaattaaaatataaacgagtttcacagtctattactctgcaaaattaaatctaaaatcccacattgctaactactctagagactcttcatacatatatatatatatataaatctttccattgatgaacaaggttgtgcttgtttgttcttaaaaaatgtctacaattatttttacatttttctcactctttttcattacttgccccacaattttctccaatgctctcactaatgacgacccaactccatatctctcacccttgacatttttcccaaactataaaacaatgctcaacactttcaaaattttcatataccaaccaaacacagccttagcttacaactcaaacacccaatcactcttctatgcttctcttcaaaagagtcccttcgccaccattaatggcgaacaagctcacctcttcttcatccctttcagtacctctgatctctccagaatcatcagagatatacgtaagaaatttccttactggaatcgcactctcggcgccgatcacttttacctctcatgcggtgacaatactactactaccgattcagatcgtaacgttctcgagttgaggaagaattcaattcagatctcatgcttccctacttcttcctacactaaattcattcctcacaaggacattactctccctcctctcccaaccactgcaacagacacgatcatcaaccaactgtcaaacgtgaatcagagctatctaggttattttagatacgacggagaaggcaaggatggttcacattctgttttggtgaatcaattggctgttgatcctgattttttggttgattttgaaccattcgacgagattagagcttcgagaagtaaattctgcttgtttgagtatggctcctctgatatgtcgaggatcggagtggctttgggattagggtgtgtgccggtggtgatcagtgaccgtctgattaaggatctgccgttcgtggatgtggtgaggtggcaagagattgcaatatttgtcaggtttgggggaggagtggatgaggtgaaacacgtgttggttcgcacgagtggagaactttacacacgtatgagaggaatgggcgtgaaagcgagcaaacatttcgtgtggcatgtgtcacctcagccgttcgattgttttaatacgttgatttatcaactctggttaaggcgacacacgattagatacgcgcttaggactagggagtaatataattaataaaattaaaatataaatagggatgacaacggtaaagtatgggtagagtatgtgtatgtattgctctatcaaatataaaatacaattgctaataattaaaataatagtattaaaaatattaaatatttattttagaattttatatttttataataattaatataaaagtaatttttgtgtgtattctttaaatatgaaataaatatatagtatttaaatatatataaatataaatatatatatgattgagttggataatatggcaatattagggccaatcctgacatatagtgggccataaaaaaatttgggtctttatttagaaaaaatgtggtttttttaaaattagtaaaaaaatgtataattttaaaaggaagaaatattttttgagctcttaggctaggtgggctctaggcactggcctagcctgcctatgcctatgggcgggcctgaaagggtacacctatacccataccttattctacatccacatcgagcacgtgttttcataccctcatcttactctacacgctaattcaacgagtaaatgtgttttcggataaaattgtcatcacaaaatataaaacgtcatattagcaaaatatcattgtacattaaatattaattagaaaaatatatttcttaaaattaattacagaaatgaaatttctcgaggacactcattttgatcaaaggaatggtgaaaaatgaaaatgattgtaaaaggaaagtgaatgatctactattttcttgttgattatatatgactttgctggttgcttattatacacaacatggtcttcaataaggtttattctaatgagaaaatattaagatttaatttcagatcaagatgttgttttgagcgaaaattaattaaacacataattgtgtttaagccattttttaattaattattttattaaaatataatttagttttacttattaaaccttactccctcataagaatgaattattctaactctaaggatatactttgtagtttgtacaattaagacaaagagtgtgtttggtaggtcgtataaggatcgtattgtattaaataataaataacacaatatttagataaaacattgtattattatattaattattatgaccataaattttaatacaatgtgagtcgtattatttaatacataacaaattactaaaattataattaataatatttacaaaggttctcaggtaaaccccgaccctagctctggacctcgaactcgaacccataccctgatcatggacccgaactcggaccccgatctcgactcgaacccagacccagttcagaatccagagtccaagttcaggttcaggtccaaatctagggtttgggtccaagttcaggttcggggcccgagttcgagattgggtctggattcgggtccgagtttggattcaagtttaggtttgggtttgaatcatagttcaggtccgtggttcggtctaagtctcggttcgagtccagattcgaggtctaagtcgagatccgaatcaaggtctgagtccaagtccgagtgtaggccgtgatcggagttggggttaagtttattgtaaataatttataatttcaaatatcctattaatacatttaccaaaaaaaaatacattctattaatacaagtcaatattaaacatattgtattaaatcatgttaatacaatgtaatattatctaacacaatataatataatataatataatgtgtaaaagagtttcaaaatataagaaatatctttgttacaaatttatagtggattaaacattctttctaactaggggtgtgcagaaagtcatccaatccaatcctaaccgaccgatccaatcccaaccgatccaatagaatcggatatccaatcataattggatcggatcggatgcaaattttaaaaatccaactggatcggatcggatgttggatgagacatccgatccaatggataaccgaaccgatccaatccaatatcatccaatgtccatccaatcatatttaatatttataattttatatatttaattattttatttaatatttatatatttaattattttatttaatatttatatattattttattatctatgttagattattaggttttaaattatgttttttctattattttttctttttaatgaaatccgcctaaatagtggctaaatggattggattcatccatgagatttattgggatggatccaatccaatccaatgaaaaacca

SEQ ID NO: 308336 - DNA, 2123 bp, Cannabis indica
agagctttcttcttaaagagaaataaaaagaatagagagattactattgtaaatatttataatactcaaatactttccaaagaaggctaataccactaactcgttgactaaggatcattaacgtctaaactacgtaaaattctatttggttgtcatttaatactttacattttcttaagctcttattaatcagttgttgaaaattttggtaaacaaataacaacatgaagaatgagtccttatatattactaattaaacttgtaacatcaagtatgttggttttataatattaaatcaagtatgcagcggaagcacttaatatgattatcattgtacatgttatcagcattttaggatagaagacatatggcaccaaaccaagattcaacaaaattttaggcctactattgggcccaaaaaggtttacacaaaaatattttttctttataaagatcatcctaggatagtgtaaacaactttcatacaacaatctgggttagtcaacttgctggaaacaacagtacggcatctttggtcattgaagtttataagaatactgaaacaaaaccccagcggtctatcaggaatggaagttcaaaagttatctgggacaaattatggtctccgagaatgcttacatagctcccctctcacacaatcctgaggaatctggcgaattgtcccctccgtcagattccaaaaaggcttacggtgaaaaggtggttacctttttgtacattgcactactactttgacattttctttcccaataacggtgtacgataccagctgtcgtgtcaacagtaccatgcaacttatagaaaattgctttttagaattgggtctcgcctaccttgcccaatagcttaagataacactgtatcaatgtattttacccaatttgtgagcttttttctacataaaaccttagtacaactcgaattcgtctgacctaatatgcaagattgcctataaatatggtattatcttctccatgcaaagggttcacaatctaaaaaatacacattgaagctgtaaaaactccatagctaaaagcttattgttatttgcattttttgataggtgacacatgtatattcaaatcaaatacatatttttcttttgaattaattaattaatccaaaaataaatctagtaaggctcaccttatctaataggcgcctatcattatgtcttaacacagtcaaatgtggcaccatcattgtcttaaccatacagtggtggtgtctttgtctacgcaatgctttatcttttccaaatttattaaataataaatttgaaaataaattatttatcgcaaaataaataattactattttgacaattcaaataggtttttctgaacatcattatacaactttatccattctcttgacagtgtttcaaggtggcgatccgaagaccatggacctataatacaaagttccaataaattaaattatttattaaatctcattaaccaaataatcttatttattaattctatgattactccattataaatatggaattaaactcctagtaattatataattatatttactgagtttactacaatgtgcattgataaaattaattcgagtgattagcccttcttgtagggctgaacatcgggcgggtttaccgggtttcgagttggcggatttcgggttcacgagtttcgggttcaaaaaattgaaaccgaacccggacccgaatagggcacgggttggcgggtttcggttggtcgggtttagcgggttggcgggttgacccggtcaactcagtcaactcggtcaactctttaaaaaaattaattttttattcaaataattattttttttatttattaaattaagcatatataatataacaatttgttcatagtatctactattgaagaaaaaatgcattaatcaatccaaccaacaaacaaacaacctatttatcaaagattcaaatcaaacttcatattcatgttcatgaatcatgataaaagtgaaaactaaaatatttcaaaatacatccatatccaatatccatagtccataaaaatctaaagtccatattatatatataaaaatagtaataaaaaaaaatatatataatatatttataaacc

SEQ ID NO: 308337 - DNA, 1144 bp, Cannabis indica
ggatgccattgaatgcaccatagtcctacaattgctaatttcttagctatgttagcatcttctattatgttaatatgaatgcgtagatcttctcctccttctaaaagattataaatccaatctggataataaacttgactaattttattttcttccatgtcatttgtaatttttttcccaccaaccatttcaagcactaccattccaaaactgtaaacatccgacttgtatgacacatttccaaagtttctagagaaaacctcaggtgcaatgtaccctaacgtccctctagctgtagtcatcgacactatactttgatccttagaacataacttggccaaaccaaaatctgaaatttttggagtgaagttgttgtccaacaaaacattatgaggttttatatcgaaatgaagaattcgttgatcacacccttggtgaagatattcaattcctttggctatacctaaagtaatatgttgcaacttttcccaaccaagaaaatgttcagaatccgaagaagatatgcatcgttgcaatgacccatttggggagaactcgtaaacaagagctcttctagctccatcagcacaatatccaaccaagcgaaccacattgatatggtgaatttgacctattataccaacttcattaataaactcttctccattaccttttgaactatgaagcattttcacagcaactaaaaaatcagcagagagttttcctttgtaaaccgtcccataagctccttcccccaatttttccatgaattgatttgtgatttgcttgatatcagcatatgtatacctgcttggttttagagccttgtaatcctccaaaaaactctctattctcagtttatgctccttttcctctttattagaattgtaagcacgataaactagaacaattactactatcataactgctgtaccaagggtagcccctgtgcaaaaacaaaaatcaaagttataagagaaaaaaaaaattactattatcgatcagtcaaataatatatgaggagtgctaataattacaacctcctattataatcttttaatcgattttcacgctcgaaattatatggcagaatatttttttcatagcggtattcattatagttacagtattatctctgtaaatt

SEQ ID NO: 308338 - DNA, 1287 bp, Cannabis indica
gagggaaaatacaatattatcataaattaaaaatgagagtcatttacaataactgaataaataggtagagataatctctaattaagaacaatcttcatccaactctagaacataccgaaccaaatcgtgagcagtcatattagcatttcaattgacatgagtaatagtaactttagggaaaaaagataaaagacttaaaatatcaacaattaaatcatgaaaagatgaaaattcaaaaaaatattcattcaaagcatttgagaccaccaacgcatctgtctctatttgtgcaattagcaactgtaattggaaaacccgaactagactgtgaaagatggccttagcttccatctaatgcgaatcaaagttgccaatagtcagctttgaaagagcagccatgaccaaaccacgtgcatcccgaacaacgacacaaacatcaattacattcttgctagcatctacattcaacttataaaagcaatttttgccttcctggggtaacagcaaaaattgccatattcccagcatctattagagaacgggtggttgccatgacaagtgggatgttgattgtaaggtgatatcatgtgtgatggtagtagaggggttgaacttgtgtttggcaaatctgaaattttttaaataggtaagagaaaaagcagcaagttgtatagctagtttagtctttccaccatgaattactgtgttcctctcaatccaaatacaccaaagaacgcagatgatgagtttcatttcagccgttgtgtaaagagtggaaagatggacaagatagtctcccttggtcatggcagctaagagatcctaatcaagaactaaaccagaaccatgccatatagaacgagcgtacttacatccaaacatggtatgcccaatagactcccaagcccgataacagatcgaccatgtggcatatgtaatgacctttctccgtactaaactcgtagccacgggtagagcatcatgaacaatacgccaagcaaattttttttaatttttttttttggcaaattaagggaccaaaagtagctccaccaggatgaagaagcagaactggaagagttttccacatctgcaataaacccagcaaggtgaagaccccatctaattgtgtattgacccgaattgtgatggtgctaaataagaatatccagatttgggaagaaactcaaaggcaaagtcaagagtcttcccacatctaaatgggaaaaaaatcaattatttatgtatattttatattaattatttttcaatttatttataaatcaa

SEQ ID NO: 308339 - DNA, 2029 bp, Cannabis indica
catttgtttgaaaaattgatccaaatttttttaattgtgattattattacttcttgctcttctcatttccatcatctttaaaattttcttcagtttcttaagcttctttttcaattttttattttttttgtttgtgcaagttcaatgtaagatatcaatttggtttttttttcatcactctttgattttcttaaattgtatatgttttgttgttctgtatgtgttattggtgtttagcattatatacttaatttttatgttttttagttaaactgaattattttttaatgtgtttaggttaagaaaaaaatttccaagctgaaggttttctctcgtgatgttatggaagtttctactgacaaaaaagtcttgaggttattattatttttttttgtgtgtgattttatttggttattatgtttttataattttagtgttatttaatagttgttttagttgatttttatattattattttatgattaaaatcttaaatactgacgttttgactgaaataatagttattttctgactgttatgtaattgattggtgttctaacagtatctgctgagaataatgacatttcttttattttgacctaaacacaatataaaagaataaaaatagaatagcgtcatcccaatatcaatatgtaaagatatataagttacccattttaatatgtaaagatatagaatatgatgtatgacttagtatacgcgtttaataaacggtcttcactcgtagattagatccttaattaattatttaaatcatataaagtggctctccttatatgatttactctcttaatatctcttatcgatcgtcattgtatagctactttatagttaggctcaaaactcaaaaggttactaaagttttgcaacatttatatttatatataattaaatactatgatactctatctttgtaaaaattatcgatggtacctctattttattataattaaataattcagattttagtatttttttttttttaaaaatgaaataaaaaaaatatattgagttcaatttttgtcatataaatttgaaaataatctaaacttattattgcaatagttatttttttttctcggttcgtaatataaattaatttttagttgaaaattaagttcaagatattattttataccaatttagaaatacaaggtcaaacaataagctactacaaaaaaatactatttttattgataatttttcaattataatataatttttctttaactaaatattatttttaatcacaataaatattatttgtcgttaaaaagtagtatttagatataatttactaattttattttaatcgcaacatattgtagctaaaactacattgagtaacaacaagttataatttttgtgactaatacttttagccacaaatttttttagtgataatataagaatgataatttatatttaatcacaatttttttttttttttacattttagtatataattttattataattaaaagtaaaatttttatagtagttcttatcaatagtttttacaaaaatataagattgaaaataataccaggactttctggtacacttacacctaccataatatatgtctctcatcgtggatttgattggaattttttaaattccttttgagaataaaattaattagttgaagaataattccgtggttatattgatttgaatctccaaggaaaaaaaaaactcatgtctccatctttggtgttagggtagagacactactgtcattgtatttaataatttcaattcaaagctggcttatttcgttttcaaacagttttttctttttggtacgcacagaagaaatttcaacttgtaaatatctttaaagaataactaagatagataattatataatattgctggttaattcgtattaacaaacaaaacacaccactcttaacaataaaaaagtatggttttttaattaatcttagtttaataactatacatctaagagaaaatgtaacgccctaatgctaaggcacgctac

SEQ ID NO: 308340 - DNA, 1590 bp, Cannabis indica
gttgtacgtctttcaaggatggggttaacaatatgcccacaacaccaactggctgttcgacttgaaatccaaccccaagcaaaacaggtctaggtatttctacttttcccatatcaaagagaaatggttgattggcaccacagatattgacgtgtccaagattggtgggttgggggaggattactactttgttaaggacatgggaactacctacacaagctttaagcatattcctctgtagtgctggcctcccttcacactggaacttaggaaaaaggctcaaaaaatacttaaacttcactcagatgctcgaaacatttctctcttgactattgaagccaattttgtcaagtataaactctatccatctgatgccaattttgcctggccaagaagaggaagtgactcccaaacagaaggctttgaagaagaagaaacaaaagaaggtccccaaggtgacaaagtacctgccgagcaggccatcaagatcagagatggtcttgaagaaactgcttgtccttccgtccagatggaaggaaagggaaaggccattgtggtcgagtaagaagaagaatactcttctgatgaggatgcttcttccttgcttattctggaagatactcctgtccacgtgcagggtactttattttattcttaactctgcctgcgcttatttgatttatgcttgttgtgacatctctgtattattcatgtgcagttatgtctcagagaatgctgcgcgcactaaagaaaaggtcaggtgatattttcggccagatgtccccagtgaagcattccaaggtgcaagatatgctgcctaaaagcattgttccgaccatcaagactccccaactgactattgagaagagctcgactgtcccttccacggaggttcccgaggtgacagttattaactcaataccaccggccaagaagagttcaaagtctcaatctacaactgccccatccaggggttctaaagggggagcactgaagggcttggactgcccaagcctctagtgacccctcccgtgctgaatctagaaacaaagtaggggaaggagatgcttcaattctactaggattgggtgcttccagaagaaaacgatcattttaactatcattttaactatcactaactcaaaaagaaaaaaaattgaaacaataaaattgtaacaacaaatttcatgaaaaagtaatgtaatagttcaaaaagataaatcaagttgtcaaaactaagtaaaaaaaattttgagttgtttttttattttttattttattgaaacacaatacttttgtaattttaaaactttaacacagtatttttgtaaacttgatacagtaaaaatgtaaaaatctctgtgtcccactatttgttaactttctcctattttatagtatttttgtaaagagaagttctatttgcaccctataaaatgataaatacacctattaattaaaaaaaaaaaatataaacttcaataatttttaaaaattactcttactatttttttaaattttttttcctcacattattttatgttaatttcaatacttattttgatttttattttcaataattttttctaa

SEQ ID NO: 308341 - DNA, 1890 bp, Cannabis indica
cttgctcttcagcttcgcatatacttggctcgcataatacctctactttgaactaaattgaggttgtttgatttgaattacgatgccaactttgctaaagcgtcatcgttagagttttgttctcttggaacttgctcgattttataataatcgaacttcatcaagttcttccgaactttctctaagtatttggccatcctggtgccttttgccttgtattcacccaacacttgatttacgatcagttgtcaatcattgaagcattgaattgcttcggcctttaaggcttcaacaatctgtagtcctgctagcaaagcctcgtactttgccttgttatttgatgctttaaacttgaaccttaatgcataatgaaatatgaagtttttaggagatattattatgatacctgcccctaagccattatcatctgaggcaccatgtataaataatttccgaacctcttgatctatttcttcttttgagtgctttgtcagagcttattccttccactaggaagtctgctaaatcttgacccttaatagcaactcgagaatagtatgttatttcaaagtgtcccaattcgatcgattattttattaatcttcccgatgtgtcgggttttgatagtacctgtcgcaaaggctagtttgtcaacactttgattgggtgtgcttgaaaatacactaggagctttctcgaggcgtgcaacaaactaagtgtgagtttttcaagtggggatatctcaattcttcccccagtaatagtttacttacatagtaaactggttgctgggtttctccctcctctcgcaccaaagttgcacttatggcattctccgagacggctagatagacatataacacctctctagttattggttttgccaatatatgagatgtggacaagtgtttcttgatttcttggaaagcttactcgtatctctcagtccatttgaatttcttattgtctcacaaaacattaaagaacgggagacatttatcagttaattttgagatgaatctatttaagactgccattcttctgattagcgactgaacttcctttgacttttttggtgaaggcatgtcgagcaatgcctttatcttctcagggttagcttcaattcctctcacgttaactataaaaccaaggaatttccctaataaaactccgaacgaacatttcttagggttcaacttaatattgaatttttttcaatattgagaagcattctacgaggtcttctgcatggtcctcgcttctgattgactttactaacatatcgttcacatatactttcatgttccgacctatttggttttcgaacataccattcacgaggcgttggtatgttgcttcagcattctttagtccaaatggcataaccttgtaataacagtacaaccccatattagtaacgaagcttgtgtgttcttgatctgggacatacatatttatctagttatatctagagtatgcgttcataaaggtcatcagatcgtgttccgctattgcatcgactaaatcatcaatcattggcaatgaaaatgagtatttcgaacatgctttattcaggtcagagaagtttatgcaggttcgccacattccgtttggtttaggaacgagaacaagattcgagatccatgtaggataaaatgcttctctaatgaaattattagttaataatttatcaagctctccctttaaagcattttgtcgctcgatatctagatgaagtctttatggcgttttggtagataagataaatctatgttgagattgtgacagatcacatttgggtcgatcccaaccatgtctaaatggatccaggcaaattgatcctggtttgctttcagatgtgtgattaattgttattttagttcttccccc

SEQ ID NO: 308342 - DNA, 1540 bp, Cannabis indica
tttttaaattttaaaataaatttgaaaagatttttttatagtttttaaataattatattaggtggaccactataaatatgccacatgtacataatggtacacacaagcagtccatgtcaccagttaattgagataaatagatgacatcttaaatttattaacggtttagagtttggagggttttaccactaaaatttgaggttagagagttaagtgcaagtgaaatgatagttgagagggtttaaccgcaaattactcttatgattaatgtttatttctccaattctttctaaaataaaatttgatattagcaaccaaatattaacaataatttaatgtgagcttaattctaagtactcctttgtcccccatcgatgctgatacttggtattggaggtttgaaaaaaattggccactactcagttaagagtgaatacagacagctacaagaggagaaggatgagcagttagtgggtgacaattgtggctattggaatagaatttggaaattaaaagtccatgttaaggttaagaatgtgttatggcgagcatcaacaggttgtttaccaacaaaataacaacttagatcaaagcatgttaatattgatgttaattgtcttttttgcaacctggaaagggaatcaattttgcatgtgttggttacctgatcctactcgaaagcttactggcagctgttagattcaaggattacaactgatgcggatggaagtttttctagctggttactggcagcatacagtagtttttcgaatactgaatgcatgttgatttctatgctagtttggcgatatgaaaatgtcaaaatgagctgatgtgggataataaacacagggctgtaggtgaggttgttgtgttggcaagaaattgtccttaatcaatggcaatgtgctcaagaaatatcatttgatgcatccttagaattgttggcttctgaagatggacataagtgttagcgaactccaatggaagatacgattaaggtgaatactgatgctgcatttttcactcacgcaaactgtaataattattcctttatggcttgaagtcatacaggtacattagcagaagcaaagtcgagttgtactagaggaaaaatccagccagcaatcgctgaagctataggaatacaggacactcttagttggataaaaaccagcgctagaataaattctaaattgaaactgattgtcttatagtggtccaagctactagaagctcttctacaatattatcttactttataagaatcattaataattgtaagattttgagcacaaagatatttctttaaattttgttaaacggtttacaaacaaagtagcccacttcttaacgaggtctactagtgttatttctgttcgtgtttattgtgggagcaatgctcctttagaattcatttttgtaatgatgaataattttttgaattaatgaaattttatcttttttgttaaaaaaaaattaattcctaaaacttataataacacttcaaattacctaagtactcttttttttttttttt

SEQ ID NO: 308343 - DNA, 864 bp, Cannabis indica
ccaaacatgcacttagtttttaaaatatatcatcttaaaaaaattgacattaaagtatttaaattgtattgtgactaaatttatatttatctacaattaatatttatcaaactaactttatcactaacaacttatattcaaatattatatattaatgacttttttttaaaaaaaatatattatttagtcacaaaatgactaaaaattattattaaaagatattttgtttttggtagtagtaataattatttaattaattaagtttaggaagaaaaaaaaaagttaatttaaggtgatatgatgggatgggatgggatgagggccaagaatatgttctactcacactaatcaccattaattttataatggaattgggttttgtggagctttttatctctttaaatattctttccaattaaagttcttatctttataatactaataatattcctccaacgttattctcatgcatgtctatatcttagtataaataatatttttatatatatatactactactactagcttaaccaagctaggctagggcatatatatatatactaaattactacaaattattagtttttgtttttgttgggttttgagaagcaaaatatgagtgacacaaaaaatgcttatgtaaacccttcaggtaattttctttaaaattatagtttggcttttaacttagtttatatatactaatgtaatttacaattactacatttgttttctttataagaatttcatttataaatatttctacataatgtttactgaagaattaaattcaacacaatcaaatatttatatgttattaattaatttgattattgttattaattatttattattatatatttt

SEQ ID NO: 308344 - DNA, 1100 bp, Cannabis indica
cgttccaaacgagcccttaaatcataaatggcaaagtgtgtgcctcaccagtcaccactcggtcacgttagcatacaatcacaatgtatttatactgtacacccgcaaacgtgacaacccgggttcgggtttgggccccagtttagtagacaatgggcccacatgaagcccacttgttgttaccggtcaccttcaacccattagtctgtcaccatcggaaccgttttccaatgcaaagaaacgtcccctgtttcttctacgtcattcatttccgatcttatataacctgcggtgcaggttagctaagctcagtctgaaaaggaaagttgagttgtgaccaaaacgacggcgtctttagcggctgacgtagtctttttcttgcgccacgtatcccggatcgtgtctgctttcgaacctcctaaatatttgattatgttattcgaggacttgtttgtcattaggttctaatatttaattaatgaattaattaacatcttttattagtgtaataatttgtttcttttcagctgattaatttgcgtttttatattcgattaattaattaacaagtcatttaatttagggtaaaagacaacaaaattactcgaaatattcttgttgattgttcgatccgcttaatcttttacataatgtttttgtatatgatcaaattgtattattctgtttcattccttattttattgtatatttaaaaaaaaaaaaacatttatatgaaaaagaaagtacaattttcttgtcatgacatggatcaatagtaactgtaaacatttgccttggacccttttccagtactcctttttccttttccagtgtatttttttagatcccatgttgtttatattatttacttgttataaatggttgtatatatattacactgctttgactgtttcacatcctatacctaataaaaggaccatgtaattgaaaataatttgactttgaaagagtaaattttttttagcgtagggaaatagtattttataattgggtaattagtaatttttctccttaaactttgacacgtagtaaatcgtgtcccctgaactttttttgccgttaaaaattctccccgaact

SEQ ID NO: 308345 - DNA, 1522 bp, Cannabis indica
caaacactcagctcagttttttttccacagttttgctacagatgtcttttactcacagtacagttacagctgttttttcccacagcacgacttgtatttgcatcaccaagaaaagtaatctaacaatctcatccaaaaaattaacagtggttgaatttgagtagaattaggagattttatggggattatcaaattttcctaatacagtattaaatactttttttaactaaattaataaacattcagagaaaagtttatagttcacctctttaaaaaggtgttctatattaatctataaattttcaaaaaaaaaaaatgaaaagcttaagatgctaaaagtatgatttaaatattttattgcaggtgtaattatttttattatacaagtggtaagtagttatttaaactttatttttggcattgataactattttaaaattttttaaaaatttacaagtggtttaaaaaaactacaacatacatattatgaaaaaaaaataaattattagcatttctaaatattttaggagtagaaacaatttgcttagctttacacccctccgaagatatcatttttaatatatttgtgggataggcttggacacattaagtataccttatacatatattgtaaatttttactgaatgatattgaattgatttataagtaattttaaatatctaaaaaaaacatccctttgtagggggtgtgttacatacttttatttagtgtttactaaatgattcataaaaataataataatcataaaaaaagttgtttactaaatgattgatacattgttacatactatgtcttaacatgatatactttctaataaattatgttattaaactttttcacataatagtaactctggttttgtttttattaaatttggctatattcataatcataatagatagatgccaaactgcccaccaatattatatcaagaaactattttgcacataatttgtaatataaaaacaattataaaacctctatcaactttccttaaaaaaaaaaattaattaatgtacatttaaaacaaaactacaaaactcaccctttctctagtatactatgaaactactaatataccctcgaacagtattatcgtacaaacaatgggagataatcaacaacccacccattatttattcgagagaacccaccaataagtaagacacaataaaaaaaggcactatcttagatagattttaacgagtctcactttttgggtgttatttttctctaattagtgccaagttgcttaatctactacaataataatataatataaaatagtatggtgtttctagagcttttaaggttttggattttgggtttgtaaattgtaatggtggagtagtgcagtggtactaagagcatctccaaggatacactgaatttagtgttacactatcactaaatttgacgtcaaaaaatatttttactccaaccacaacaccaaaaattacactaaaaaaatattccttattattatatattaatttttaa

SEQ ID NO: 308346 - DNA, 2909 bp, Cannabis indica
ttaggcttgttgggatattacagttacaattatcattagccaatactatttgagagattagtgggagaaatgatatatttttattgttacttgttattgtatatttttcatattttatgataataatttattcttgagacagttaaactgttatttgataatttctataagattaagaatccttgataaaccttatatgttctaaatatttaagtttttcgtgatgagatcaacggtagactgaattatctcattgtttgcattgactaactattattgtgattaattttttgatttcattgagaatatttaaataatctaaagtttgatatgttataaatgtacatgtatattagtaatgacaaagagatcaaatttgaatttatcctacatatatgcttattgaaggcagtctaaggcttactcaagtatacacattcctatcatgatatttgttataggcatgctagattagtacttgaattgtcattcttatggtactaaggatgagttagaaatcaacaaaccaatatcattacatataatagttggctttacagttggacacgctgcatagatgacaaagttcatttttaagcacttataatggtaagaagagttattttgtggttaagtgtaaaatctaaatgaacacttacaacttcctctctcgtacatgtagtataatagtaagaggagttattttgtgattaggtgttgtgtggacacttaaaacttcctcatttgtagagataatgtgtgtatgcaaattacgaggacattgatttgattgtatattccaactatgctattttatttcagtgttaagagtaattgactctattgtgaatttactaaacttatataataaatattgcaatcatatctttctctcgaaacttgaagagtcttgctactccattggtgaggatgatgttccatttgtagtaaaaaagttgtggagtcctctattagtatcaaaatatgcacttaaaaataaaatgtcaatgactacactaacacgacttacctaaaagtgtgcactaagaagacatttcttagttggatagctaggtgtcaaagatgtatttgatcagtgggcattatatttatcatgtatgatagacatgtgttaaggattgttattagttgttgatacatgcatattcgggttcactcttgaatattgagtgcacatttgtcgatgtgagccaatggcttagtcattgtgctatattatgtgtggatccagattggtagttatattcatactcatgtaattctccaatgttttattatatattatatttgtatttatcgatataatatggtgcataattagttttacagacatatgtattttttgagattttttgcataaaaacactattatttcgtgaatacttgttgatgtaattatgtggtccaagtgggagaatgttataatattttatatggactaagataattaaacatcgctcatgcagtgtcattttaagcatataggggtaactgtataattatgtatggtatagtgtctattatgtaattcggaccataatggttatggtcagtttaattaactgtatttgaggcacacatggtagttctctactgacgattgattgacccattaaatcatagtgtactatcacttatattatgagccaaaaatatatgctcatttcagcccttaagatatttaggcatataatgagaggtttgaatgtgttaaataatattttgataaggtattaagggttctattaggggatgctctccataagttctcttatattcatgtttttgatacttaaaagaattcacgatgattcaaaatgactcaaaaattagtcatgctcaatattgagatatatttattgtataatttaatgctctaagagtatcttcaattgagagctataaatgtagtgtattgctattttatagaacattttgttaaaagttaacttcaatggtaatgtaaaatgtatgctaaatttgacccaagctaaaaaatgtgccaaattttgcacaaaaaatagcatgcgccaaattttaccctacaataaatgtcacctttttttattatatatttgcactaattaatactagttaatatttttatatttattagttattaaaataatataaataaagttaatttttttatatattttcaataagtattaatgatattattgacttttatagctaatttgtatcttatgcattagagcacaaatataaaaattggactaaatataattttatggtatattttggagtaaatttaatccataatatacactatatacattagagatggtgtaataaattgtgatcttggattatataagcaataatttatattgttggattactttactatttgctcgtatgttgttatttttaacaagtagggagagtctcgtatgattacaattaacaatattatagaattttaatttatagttgagaaattatactaggaggatttgaattaattaaagtgtgctctatattgtttggaaaaactgtattatgtttattatattatgacttttagaattaatataatagtatttttttaaaaaaaaaaaaaattgtgttgtgtatgtacagaatgtaatatttaataaataatttattatttttaataaatatttaataatatttttgcaaaataaatatatttaataaatagttttgtggccatggtatgattaataggcaagagaaataatttattttgtgcttataacttttatctcaacgactttttaaatttgacaaataagtatttcaagtttttaactctattattataatatggattgttttgccatctttctttcaggttatttattttttatttatattgtgttgttatattatttacaataata

SEQ ID NO: 308347 - DNA, 1452 bp, Cannabis indica
taactagtttattatgtattaatatggaattatattattatataatttaatatatgaaactactttgttaaattgcattttaagaccctgttagtgtactaggggtattttcgtaattttgacatgagaatggtaaaattgtgatttaatgatatatcgtgcttattggctacattagtatatagtatgtgcattttgtctatctacatgcattttctcacaagtcagcgcgctataatcacaaccgggtatttttggccgaatcgggtttaggatccaaaatgcatttttagggatttatttttggtattaatgtgacaaatgtaaaatctgaaattatgtgttatatatgtgtgtgatgaaatgactagtttgcccttgattttatagttatgcttattaatgatttaggggtatgttggtcatttgaccatattatatatttttaaacaaaaaggaaaagaaatcagattttgttgattaattgggaaaaactagaattttgggtttgtacccttggctgaccccttccctctctttctcttctcactttgttcttcaatttcaaccattttggaaggaaaagccaagaatctttggtttttgtatttggagcttgaggtaatccctttatccatttctcaccttaaatttttggtatttatgatgtttcttatggtgttcttgaagttttgtgagtgttcatgcatgttgttgatttgaggctatactttgtaaatttttgtgtgtttgagctctaagaaggatgtgtagtgcttatagactatgttggttgttattagggttgaaattaaggtttgaatctctaagttttgagcatgaatttctggatttgcttgaaggatttgaaggtcttatgtttaagcatgtgcattggagaagttatgttgatttatggcatgcttttgtgcgtgtgctttgtgttggtattttgagcataggatgtgttcatatagtcttcttttgatcaactgattttgtattggaattgtatggttttggcatgttggtatgaattttaggtatgaaaattcgaagttgtaaaaatggcaaatttttgggttacagggtcccttgccacggccacgaccgggctcgccgtagcgaggccctactttctcgggaatttttgggtttttgtttttgccataacttttgactcgagagtttgaaatgaacttttttgttttatattagtgcaagtaggagtttgttgggttttgtgccctaaataaaatatatttcaatataatcaaatttactaattaataaagatcacaaattattttatgttgcatggttcacatgatatatttcatgattataaattctattaggtcgagaacatatgtatttgttcatgattatagtgttgtcagcacagtggaatataatcatgattatatgttcaaaagtttaattccctgattt

SEQ ID NO: 308348 - DNA, 2009 bp, Cannabis indica
tttagagaccaacccagctttgtaggaatcaacaagtttcaacaacagtaatagggtttccccattttccaatctttgtgatgaaatacaacattgaagtcactaagaataagccaagctttagcaacattaatcttagataaagctagccagagatcacttctatttatctatagtgttagcaccatagataaaagtggcaaagaaatccttgttctgccctaccattttaataagacaatgtacatgttgcttggactcctccacaacttctacttgagcaaaattctttctccagataacaagaattctcccctctatagcattgctactatagtagtcctaattcatgaatctactagccatcatactgtgtaacttttcccctctaaacttggtctcaatgagaaccccaacacctagtttattaagcctccaaatatcagcaaatgaatcatatttatccttattattcaaaccccttacattccaactacaaatattgcaactatccttcaataattaacaatcaatgaaccctcaacccctaattcctctccctaattttcttttaaaatttcaaaagaattcctcagaacctgcttttgattgtcacttatctttttggaagaacctgatcctttaaaagatctttacttaggagaatgccaaccttccatatttggactcaatgtgacccctatatcacccacaacaacagcttgggtatcaacctactgctccttagtcttgttaaaatcagcagcaacataacttgtctcagttgaaaccgaatgagactgaacctgcttctctttagacttaacaccaacaaattcacttaaaatcactacagttttctccactgtcttcctctcttttggagtctctttaggcttttcaatccttctacagtcacccattatatgtccataaaccgcacagtgtttacactttacaggcagccattcatactcaatcacctgctccaatagttttccatactcatttaaataccagaatgaacgatctggaaaatttggaatctccatttcaataagaatacgagcaaattgcatccttttatgatccttagtatgtttatcagccattatcggtttcctaattgtactaataagagcactcaaggttttcttcccctaatattggagcccaagatcgtgaagccttatccaaagaggaaaacatttcactaaccttcccgcattcaaatcagaggaccaaggtctaactatgacaagcttcctattagattgaataactccattttcaagaacttaacctcgtgtagcttcatcgtttaacttgaccatagtgagttccattgtcatccttgctatctggataatacctagatgcccccgaattcgtcttatgaaaccttcaaaaactattgctagaacattttctcctagaaccatacaaattacagttgatttttagttggcttccttcgatttcacctcttccaaatctacctgagaattttcctaatatacttaacaagaggtttagtaaatgtcagtttgggatttcgcaacttagtatcatcgccaatcgccactcgaggttctctaaaaggttgatttctagtaggggtgtgcataaatcgatccaatctaatgacaaccgaatgatccaattacaaccgactgccaaatattggatatccaattatgatcaaatcagatcagatcttatttttgaatatccaattggatcagatcgaatgttggatggggtgtctaaaaatccaatacatcgaacatccaatcgaactaattaaaattttcatttagtttaaatgagtaattagattttatattgttataggtaaaatataaatgtatatataaaattaacattaaaatttcactctttttttttggtattggatggatccattacaatccaatataaactggaccaaaataattggatggatccgatccaatccaatatccaactggatgttggatcgattggat

SEQ ID NO: 308349 - DNA, 955 bp, Cannabis indica
ctctctctctctctcactctttctttgtttgtttttttgcaatcatatatcattatcttgtatcttacttagaatgtgtacgtgttcttatattgtgtatactaaacaaataaaatggcaagaatcaatcattgattgtaattgtatacatttattattcgatatttttaccccaaaattatgatttatacgttgttgtaccccataaatttgtatttttttttaaaaagaaacgttcattaatcaaaatttgatctctcattcattacagaaaatattattagcccatttactaccttatggaccataaagttacaagttttagcaataatacaaaataaacaagaggaaattacactctatacttactttttatttcatattttaatttttaccttcattttactactctttaatttatacacacttttataagttatatttccattatgtactgcatcaaaaagtctagttttgataagttttgtgaggttatatttgatactttgattataaaagagtgtatttatcaattcgtattattttagagttatatttagttaatgtgtaataaaaaagggtagttttcaacttatctcaataaacaagtaatgaaagatgaagcaattcttttaccaaataaggagtagttttcaatttctcatctagggtctagcaattgagagaatcaaccactagcttagaatcactttctaccaagataaacttaattcctataaactattcacggtattataaagtgatctttctctcaagtttcgtcacacgtaaaataaaatgataacatgactgcttatctagtttccacataatgtcaacgccaaatgaataattaatttaaaaaataatttatttatttttaatttagttttacataattttcttaatcattaattattattttttttttgaaaaaatcattattttttttttt

SEQ ID NO: 308350 - DNA, 3045 bp, Cannabis indica
atatatatacatatatatatcacacagaaatagtcaaattgcatattcatttggttccttataaaataaaagtacaaagaatctacttaatatatttctcaacagtaaaggatgtattcagttacatttactaatatccccgaccgagtaataactaagcttggagccacttaaccttatggctacattgatgctacaacaaatttataagaagaaaaaaaacaagataataacttcaaaattgttgaaggtgcctcttcacatgggctttctcttcttttgcactctctgcaattttctccatttgaggtagatctgatatgacaagccagaaaagaccatcgccacacagccccattgcttgcttgataggggattaccactgagcagggacgacaccacaatgctgacaaacttgcgggtggtggtgatggtggtattagcaagagaaccgaatctgctaatggttaagaagataaaattttggccaactgcaccacatagacaatatagaaaaatgtcccacgctgcttccgggtgctgcttgcagaactggactgcctcgaatccaatagcttgaggccatccaaacatgtatacgaggttgtatatggtaccccataagttcattcccaacattatgtcccaggcacttgtctttgggtacctgaaaatagatatattgtaagttgtttctaaatcatttgatactaaggttagagattttgaaagtcttcacagagaatgcaaatgaaacaaaaaggtgaagcagccaatactgcatcttcaactgattacacagataaggaaggttcataacacaccttgcatttattgaatcctgagtagcatttgtaaatccatcaaaagcaaggttgaggaaacatagtccatatccaagaggagcatttggatgagccaacttgctaatagtctttgagctagtctgataccaacccacgctataaaattagcataattgcatatctacagacctatttggccgttcttataattctaataacataaaactgatgacatgtagaccagtttgaccattttgaaaccactagaaataaaacaacagagaaaacatgaatactactgcttcattctcattctaagctgaaataatgctaaccttcaaaagtgcaaatacagatacccctccggcaacaagaagagtgcaaaggtactcaggaaaagtgtacctaataccatagactagagtacccatcaacatcactgcaaggataacttatagggtcaataattatgttcttaacttctttttaggtatgtgaattcataacaaatgatccaccatacccaaaaatgacagactaaaatcgtatattataatttttctcatgcttaacaagtttatagcctcataattttctggacaatacgctaaaagaaatttggtgaccataagttacataattcatcattttcacaaatagatggcattttgcgttttttcattcaataaaagacaaacgaagcaaaggaaaccaagaaagcacgcgtatgaaagtaaacagactcagttgtaacttaacagtataagaactgcaaacattgacccacctggaatcattttagaagacttggccaagacctgaacaatgaaaataacaacattaatgttaaaatccactaaattatcattcacatactacaaaatatcagtagaaagtttaaagtattgcatgtcaacatttatgtaatttgttttcaagaatgaaattaattgtaaataagtacaggagccgttgcttagcaaaatctccatgaaccaataagcattcacaaggaaaaaagaaacgaatatgtaatgtccaaggtagccaatataataaaaacgtattagtgtgagtgcagtgtcaagcaacaattctaaattacatctcatacagcaaattctttccacataaggctaaaagatcactaagttgaacaatcccattctattaactcagtcccaaggagaaaaaggtataagaaatgtacctgggcagggtaactaatatacttaagggcttcaattcccatggcgggtccaatggtattcgtaataccagcactccagaatgtccaccatggcgcaccacctctgctgccactagaccaaagcttgatcactgtttaaccgaacacacacgagatacagtcaaccccaaaccatccctattgattccccccctcaaaaaaaaatataaacctatagatatggttaacaactcacttatataagaccagattaaacaaactacattctgagccaaattcaggaacgaaaggtgctcaaacctcttcccatctggaccaaatcgcttagtcgacctacacaaaagtcattaaaattattaaaattgcgtaacccaaaatgcaggaacagtagagattcgcagatcatggagcaaaatgtagtaagatctcggtccttagcaacgaaagagagtaataacttacagagtttcttgtaaaacaccttggtagatataggcagaccatattccggtgacgcagaaggctaaaactaagatacggcggagtccggagccatgagcttccatttccgccttaccaaaatcaaataatgcgaaaaagattggaggaggaggcagagagatagagatttgcaaaaatggagatccgaaagccaagtggagatttcttttcgtttttgttattaactgaaaaagaggcgggtgtaggtagcgccaaccgacgtggggttatacacgtggaagcttcctattggtttgattacttatctttctcttctcattggctgattaaacgcggactcttctagtcttctcttctttcccacaacgtttccactttccgaaccattccatttcttttttacatgttattttttttaaaaaaaaaaaacgtttctacatatttcagtgagtttcggtaacttaatacatgtttggcatcataactaaaaaattattttttatttttaaaaacaaaaaattattttaaaaacaatttgacttgtttggccttatttttttaaaaaca

SEQ ID NO: 308351 - DNA, 1180 bp, Cannabis indica
ttaagaacttttatctaattttattagttttactaatgtgatgattgtttatactaaatcgtgctctcccaaatttgatatctatcaaatcatatccacttgaattttgacatgtattaaatcgtatactttaaaatttcatccacaatctataagtaaattaaacgcacgtcaaaatttgaaaagtaaaaatttaattagtctttttttattaatcaaaattcaattttttttttaataaattaacagagcacttaacaaaaggtcaaaaaatattagataacttagataaaagcacacaatattcctcaaccaacaatttaaaaataggaattgagatttaaataacttgaacacacatgagaatgtagaaaaggagtttatcttgtattttgtgttcataattctttcaaaaatagttttttatataaatttttgatagaattggttaaaattttcaactgttaaaaattttgattggttggttaagttgtgtagttaaagtttatatatgtttaatttttttttttggttggttaaagtttgctaccattaaaaattttgattttaaaattattaactattaaagatttcagttaactgattatattttttggttaaatttttcaatctataaaatttttgattggttggttaaagttttttaacaattaaaatttttgatctgatggttaaagtttttaactataaaaaatcttgatttgctggttaaatttttagattgattagttaaatttttcaaccgttaaaaattttgatcggttgcttaaaattttttaactgctaaaaattttaatcatctcgtgaaattttttagttaaaatttttggtcagttggttataatttttgaccagctaaatttgttttgattagctccaaaaattttgatggactttttgaattttttttacaaaatagtgtcaaaatgtgacatttagcagtctcgtgtttcgtaaggagaaatatcgggtaagctgtgcaatcccacactacttggggaaggtcaagtgggatgattctgagactgtgcaggtatgggagtggacagttgaagaaggcttaaagggattgattcatactacctatatcaacaaggtgcatctctttttcggtagccctatcacaagaagaactccatagttaaagcgtgattgacct

SEQ ID NO: 308352 - DNA, 2998 bp, Cannabis indica
atataattgacatttacaaaaacacggtttttcaagtttcattcagccaaagacgctcaaaacaaaactgtgatcgatttctttcgtgttgttgttgctgctgagaaaaacaaatttttgccaatattgctctgtgatccgaaccatagtagaccaggtgtgtaacagttggtgagacaatattgtcttgccaagcatggttaatgaaacaccaatccaatctctccttaagagatgctgatttttctttttttttgtttgcccacgtgtaatcatcaccaataaaaggaagttcaagcaaattacattgatctaatgtagagagaaaagcattcatttgattatcatttcgaagaggaaccccattcttatgagatgatgaaaaaatttcattgagatcactaattaataatcatggttcaaggggacaagcatcagccagacgtttagaagggtccaagtgtgttttttattcattgcttcaggaaaaccatacacagcagaaaaaggttagtgagagccatcatcaaacaagacataacaattagagtgatttgtattcatagatagtaaggttacatcaacattctctttccacaataacataaatcaacctttcaaaccaacccgaggaacttctaaaccattattgaaatataaagactttttaaatctagaaagagcactagtagaaacctttgtttccataagaaaaaagacatgaagagtatgctcacgaacaagtaagcgtaggcgactaaatgcactttgactccccaaaccatgtgcattccaacttaaaattttcatgatgaggagcgggattgctgagcaattactgctgcattatcaaatgaaccagcagaatctgaggaagttctaaaagttggttggttaggctacacttcaactgatgaggaagaagcatcaggttggtgaactgctcgacatcttttcaatgtttgtcttaaagttttggggtcatgttacctcttgaaaatatgattgggatgcatattttctttctcattgacggcatcagcaatagaagaaaatgcaggagcaagtatagtagcaacaattgatggagcaagggagaaagtatccctaacagtagggagggaaatattaaacagagaaggttttgtgacagaacatgtaggattatatggagggtatgtagcaaaaggaaacggtgaagagaatttgaattgggagacagaagaattatctccaatatctggtatgaacacattaaatatatgagcaatggagactactttagtggccaaatctgatggtgtagtaagataaaggtgaagtgtgattaatagggacagacgatgctaaagacaaggattgaatattggcaatggaagtaatgagagaagatgaggagtaaaaaaagtggatgtaactgtctatgccaaagaagttgcagtagcagtaagaacattctgtcttattggatcatcttgttgttgtgtgtttgaagcctctccaatcaaaagtggtctcggatgtgagggaggcctagtaagtatctatgagatggaggcagtaatagaaaatctagccaatcttgtaagaaagggccaagcctttcctttagaataatcagatctatattagtcatatggagaagtcggtaacactgaacccttcaacatggggccataagccaattatagttcaattccattgtcaagattctccaaaaagataaagatatttttggtataagtggccaatcaccccacattccatacaatagtatggtaacctttcatatcgaaattccacccaaaattcatcacgaattgttggcaaagttatcatttttcctctcagcagtagcttagtgatgtcaagacgaactctaaacctcaaaaacggtcctcaaccttcatttaaggggtcatcatggactgccaaaaactcacccaacagattccctaaagctttagccaatgatcttgatttgctaagaaatggaagcctatatgcttgtacccagaacagagagaaaaccatatccttaggagtaacattttgcattaatgatggagaatataggacaatatgatggttttgaaagtgtcatggttcctttttccatgctctaagtcgatcaccttcacaaccaaagcatactaagaagataccaaaatggtgttccttgatattaactttgaaacgaccatcccaatgctccgccatttaacgatgcaaagtagagagccagacctttttttaggtaaatattcttggaaacagggcatattcttgatgagcattaacatgcgaaggatcattatccacaatagcaaacactgatctttcatcttcaattaagttcatgtttgttttcatcttgtgaatgaaatgatccacggtatagagaaacaagggaggttaagatcaaagaagagggaaatataaataagtttaattttctattcacaaaatcttaatttgtttaaattatttattaaacttttaataattttagtttaattttatgaagtgtgtttataaataaaataaaatttaaaaatattttaaaaaaaaaataataatatagatacttaaagtaaatttaatttttttaggggaattaccctatatactacttttttaacccttttttttaaatttacggtttgagtttttaaagtggttgcaacgctagttgcaataagagtttctatacaattttgtgttgaaatttaggctgcagcgctagttgcaatagagatttctatgtagaattctgtaaaaaaaaaaaaaaaaaaaaaaaaaaaaaaactaagtttcgaagtgtaaaaatgaaaaagaccttttttttttattaacttcatatttttattatgttttttaattttttaaaattaataaaaaaaaatatatttttaaaacttagcatctatatatctatataaaggagaagtatgaggcggttacatggaattctaaaatcactctaaagctatttttc

SEQ ID NO: 308353 - DNA, 856 bp, Cannabis indica
gatctacatcctacagcaaaaaatatccttgcgaatttaaccaatcttttctttatcaagaaacattaagaagaaacccaatttagaaatggatattaagtaaaagaatggtggattaataagttttgttgaacttgtatggatgtatcaaactcggattattttcaatgaaatgttcattcgtagaaaaagaataagttttggttatgaaaattttcggattttcatttttatcttcttacaagtacataatatcttgcatgacagtgacacttataatcctgttcctggagtgatggaaggggtgccctcttcaaggaattatgatggtggctttgcaactaaacttatggttagtggttaagattaattgttgttgtaagaatcgcggttcttatactgtttaaaactcaattcataaggccatattgcagttctaatatattcatttgcagttcatattaactcagaaataagattttttatttttcttataataatttcattagtggtaccaacttcactctagaataattaaagattttatgaacatttcaggctaaggatctaaatcttgctgccacttctgccaaagaggtcggccataactctccatttacataccaagcacaacaaatgtaagtcttctcaaagctttggctattgcacataacttttagatttcagtattattcagtgaaaatcattgaactttgtttgttcatatctgtagaaaatagtgattcgaattgtgtatcgatttcatagaataatacatatttatatacaaagctaggagactaaatatctactaaatatctaattcttttacagctaatatacatctaatatctaa

SEQ ID NO: 308354 - DNA, 919 bp, Cannabis indica
aaaaaaaaacaaaaaacctatagtagtactcttatttttgttggatactgtgataatgtaaacacaatcagtatttgttttaattaacaatcgtctaattatttaaatgtatcttcattgtagacttgttttagtttaatactgcaaccaacgcaaatattacgttggagttgtaaatcgcatgtggacgagaagagcttataatgctgcggcgtattgggatctataagaatggaacagagtcaccacttaacgcgtagcactattttcttcaattagcataatgttttttcatttttctttttactttctagcttctcaatttgcccataacgcggcttaatgacgagggaatcagcgctcatcacgctttaatgatcaaaattttcacatgtgatgaatgtgatcatcatatgccatttcttcttccggtgttctagttcccactttttgagaactaggaaaacattgaaaggttctattaattacattgtcaagtagttaagataattgtgcattaaaaaaatcttttatatattattgatctattctcgatttttgtttaatatatgttcgcaaaaataagatgtttctcatctcttttggagctacaacttaaatgcttgagaatcttgacatgtgcggcaacaaaagtagttacttttactgagtatgattgagtttttccccctcgaagatagcatcacgcaatttaggattatgaataaggtaaagcaaatcggcacctcttttaatttaggatccattcgatatttaaccaaataaattggacaataataggatatatatatagagagagatagagaaaaaatcgaggttttgtgatagaaatagttgagtaaaaagagacaaattttacttaccttaaatgtaacgccctaatgctaaggcacgctac

SEQ ID NO: 308355 - DNA, 2068 bp, Cannabis indica
gtgacagtcagtagtcccgtgatctgtaaggggaaataccgggtaagctgtaaaatcccacatcgcctggggaaggtcaagtgggatgattctgagactgtgtaggtatgggactacacagttgaagagagtttaaatggattgattggtactacctatatcaacaaggtgcatcttgtttttcggtagcccatcacgaaagaactccacagttaagcgtgcttgacctggggcaatttcaggatgggtgacctcctgggaagttttcccaggaagcgtgcgagtgaggacaaagcacgctggaaacactcgtgttggtctgtagggtcagtcatcaatccaggaagcagccaaagtgacgtactcgtgtataagagccattcattctgtgggtgtaaggacccaatggaggcttgaagcggggacgttacataattaatatcatattcattaatatataacatctatgtataagtgtttgcaatatataaaaaaaaataatttatggtataattaaatacttaaatttaattcggttgtaaataaatatctaagttgtaaataatatctaaaaaaattaatacgtaaaaatattaatacttgaactccataagtattgaactccataagtatttggccaaaaaatgacaaatcataatccacatatcatttttttattagtatatttaaactattttcttaaataaaaatatttaaagacctggatcaatcaagaattatcacactgtcacagagctcgcttattggttacacttcttgttcattgagtttcacattccactgcctaaactcctgttgtgtggtgtgacaacgtaagcacagttcttctgactgctaatccagatttacatactcgtacaaaacacgtagaattggatctctattttgtgaaagagaaaattcttcaacaaatggtccaagtaaaacatgttccaatttttgattaacttgctgatggtctaaccaaactgatttctagtcaactgttctcttcttttagatacaaactcacaatttggtgaccctataccaattattaagtttaatttccttgtctttactttccttcccttttctcttttttgttctttcctcttttcttgttcttcatgtccaagatgtccaacacctccaacatatgaaattaaaatgtaaaattatttgggaacaataattgatctagtactttataacaagtactcttagtgatcattaattgattggataaattatgttaatatattgagaaattttattgatatatatacacaactcatgttagatcaattatagttaagttgatcaaatgatttttaatcgttaaaaaagttacgtacatcaaattaaattttgatcaaatgagttttaatcgttaaaaaagttacgaacatcaaattaaattttgattaaattttattaaaataaaatattttatatacatagtgggaccataaaaacctactgaataaattctcaatagtattttatggccgtaagattatatattcttcttcttcattttttttggtgaattatatggctgtaaattattgatttgatttgatataatagctttatatatatatatttgtgttgtgggaatagaaagtccattctagtttttttgatggtgaaatttgaagaattaattcgattcaccaatttaatcaatcaaatccaagagagtgaaattgatatgttctatatatgttatgatattgtatcattttcatatgccataaatgatacattaatgtacttttttttttgtctctaccatccaattgcatgtatacatatatatggtcccaaatgtaaacgaggctggatagatgatactttaaaaatgtaaacgaaacagtactttagagggttttcccacaaaaaatatgaggttggatggttttttgcaagtaaattgatagttgagggggttttgccgcaaattactctatataaaatcatagaagaaatgtaacgttcctgcttcaagcttttattggcccttacactgacagaataatggctcttatacacgagtacgtca

SEQ ID NO: 308356 - DNA, 1263 bp, Cannabis indica
tatgtaataaaaattccattttatatttttggtgtaaaaatttctttttattaaagatgctcgtagaaaatatctctttgaatgatttatttgtttggaagaactattgcatgcacattaataggaatcccacattgcttgtagaaaaccaatgatcttataaagttattataaatatagtgaactttagtaatatgtttttacaccgaaatttggagggtccatcatcacattagtaagggttttttttaagagcactttattaaggttagaattttaatattttggcatataatgtttatttatttggtaaattttgtaattattgtcatattttctgtagatataaatgagatttatcagcagtatttattataatcaattaaatattcaacacaatattatttttcaaagtataatagtataattcattgtaaaaatcattatggaaagtgtattcatgatcaatttattttagatatatatatatatatatctatataaaatttcaaatttatgtacaatgagatgtattgtattaaataataacaacattatgtttgaatagacctttgtattgtataaattattacaattatacatttatttttaagattgtaattataaattttttttttgaataaaataatcataaatttaatataacataaatcgtattattttatacataaaaaatagttagtattagctcgtattataatatttagaaataatttgagaacggagttagggttaggatcaaggtttgatgtcctgggtctggggttgggagtcgggtctgaggttaggagtcgggtttggggactaggtccaagtttgggaccgaggtcggagttctggtaggttcaggtctaggtcttggtcaaaggtttggggttgaggttcgggatttagggttagggtctggggttcagggctagggtttgggtttagatttggtgttagggtctgaagtcagggtttgggcccagagccaggatttgcgtctggggctaggggtaggattatggtaaaattagtataattttacataacttattaatacaagtcaataccaaatatagtattgtattaaataatactatacaatactacacaatacgaacacgatataccaaacaaaccttctgtctccaaattttgatgaaaatgaaactacaaaattaaagtaatataaaaatattgattttttaaattattaatttcttaaatagctaagaattgaaaaaaaaaaaaaaacga

SEQ ID NO: 308357 - DNA, 984 bp, Cannabis indica
gcaaatataactgttattgcattaggtattgacagaacattttttaatttttttaatcatgtttttctttcttttgtttgatttgttttagtgttgttttacagttattttaccatgattatttatttgacgttgatctcacttttttttttctcaatctcagaattaatggttgttttccgattgttctagtgttcctgtggtggttctgtccgtgggtgtggaagatggaagtctcatttttttttttgtttacagtataaaagaacaaaaaaattggccaagacagtataaaagtaattttcgccgtgtgacagtatttttgtaaaaattgagccaaaaattagtatttttgtacgttactcttctctaaagcagcccgtggaggggtggcttattctgttgggcctaaatctaaatggaacttactatgatccttaattacaattatatcacttaaatcctaaacttctaaactaccagttgaataaaaattccaagttgttaatagctatctaaataagtttaaaataatgatcaaaacattaaacaatttgataattggaactataaattcaaggagtattatttaaacctaaaagttatgtttacagctttggctttgaaattgcccttaacctctaaattaaagtttcccctcaaaaaaaaaaaaaaaagaaaaaaactctaaattaaagtctactctatagatagttagaaaccataaaacaatgtcccataaatggtggagtgcaatcatttttcttgcttgtgattctcttgattctatgattttaggtctctaaaccttcatgaaaagtcccactcatcgaactataagtcatatttataacccaaaacatctaattaaactttaacttaaaaattgaatttttgttgctcattctaatagttttttaacatggagaaatttgcgaacaaactcctttatgttttatattttatacacttaatccctttttt

SEQ ID NO: 308358 - DNA, 2355 bp, Cannabis indica
aaaacaaaaaactcaagaatacactagtaattataagaaaaacagcacaatcgtttctaaataattacctattttgtttcttatggccactaaaatttaggttagacccttgttattaatactaaaaataaaatttaaatattttattacaagcataattatttttttatatgtgtagtaaatagtttttttttttgaagaaaagcgtgcatgcattagattaaaaaccgtcagacctcgcggtcattacaaaatatattttcgggcatagaggaaagaggcacaaagccgaacctctgatgggaaaaggcccacttggccacattatgggccataaaattacattgtctactaacaaattcaaaagtacaaccagaaaataaaggggaggtcattttacaaaaagagacgtagttatcaatctcccaccgggaatcctgtccgttaagagcgttgatcaccactctcgaatcactttccaaaatagtttgaacattattttcgatactataaatataaactattcgtattttttaaaatttttacaagaaacataaatttatcaaaacaccgatcatagaaacataaacaatcatggaaggtatagaaaaacaattaagggtaccaaattactcttaatttttaagggagtactataaatttaccctaaaaaagataaaatgagatttaatctaatttttttttttttaatttaagcgtttatatattacaatcatgcatactcgaactcataacttccaacacatacgcattctcttatggccacttgagctagcctcaaattactacaaataaaaattacaggaccattcacacttagttgctattaaaacagggcatccgattcaatctaaatatttttctcctcatttgatcaaatctaactttcataagagcactcccaatagatgaactaaaataactcattctttaaattataaagaaaaaattataaaattgagcttctaacaagtgaggtaaaccttagctatttaacatatttcttttagcttaatgaataatatttagctaaatgtaaaaataactattcactgagttaaatatattttaatattattttctttaactttcttatacatgtgtgtaatattatatgaattaaaaatataaaatgaataaaatatattaaaattataatatttaaatgatatagagaaaaaatagagaagctgatgtatgatataatataaaaatttgagataaaatagataaaatagagttttaataatctattttaaaaaatagagtagagaaattgttaagggtactctaataatatatagattttctgtgtattttttaatattatataagggcatgaaaaatttgactttacagccgccattacataataatatatataataataataataatttgtatatagggagagaacacaagtatgcatgcttcttggccaagtagaaatgaagaagacttttatgtaatgactttgatgtgtgaatacatacaaaatcaaccttagaatattaaatgatagtatgaacctaaattttcttactttattattctattctattctattaaaaaattaataatattattattttagaataagaacattaactagatactctctctcactcacacaaattggcctaattgtctttaaatagtaagctcaattcactctacaaaaggaagaattagctccatttttttttcctaataaagagtaaattgtttaaagttattgttatttacttattttccccttataatttgtttattgtgaaatcattagtcattcaaattcatgagtactttgatcttaaaaaaattaatggtacattaaactcttgtttgctcttacttaattttcactacatcttgactagaaatgtttttgtttgactacttaaaacttaaaaagataaggagatattctctaaaaacaaataaaaataatgtgaaaaatatactaaaagtgacgacaaatactattttttcaacaaacaaaacaaataaatattcaattatctcgttgaacaactcgaatccatctaagaagcaccaccaaaaacaagagagaagacgaattaattagtcgtcgaatgccaaaccaatccaatccaatctactagcgagacaatcatcaaacaaagctatcacgatactattttcatacaaaaatgagacaacaagtgattaaaatatcatttctaggtgaataagcaccaaactccaaccaatcaaagagacaactaggggtgttcaaggattggtttggtccgaattttcataagttttgaaccaaaccagtataacgggtttttcaatattagaaaccaa

SEQ ID NO: 308359 - DNA, 910 bp, Cannabis indica
atataatataaaatataaaaaaaaatatgaatattaaattaattgtgtttaaaatataatattttaaaacttagaaattaataataaagaagatttaaaatcaaagtgatcatgtgtataggttataattaaatttgttaggagtgtaattgttatttgaaaccttgcatcaaacaaatagtgttaattaacttcattgttgatgatcatgttgaatagtgtacgaatccccattaaaatgaagttaggttgaagaatagttttcggaaaatttgaagttaggttgaagattttggtgaatgaggtacatttttttttagaaaaagaaataatttcattaaaagataaagagccaaaaaaattcaacgatcattacaaattattatttatttagtttagtcgggactcttattttattcaacttttgtcgaaaattatttctaagtgataaaagaggagaattcatactctcttttttattagcttccttaatcaactatttataagattgaaaccatttgatttctacattattgaagccaaaaaaaatattatgtaactaatcaatcacatactatatatataattttggagattgaaaatgatttaattttttatgtttttgaaaaagaaaaaaaatttaatctcctataatatatatacattaatgtttatttttctatacaaattaaattatggtgtacataattaatccaacaagtacacaatacaacacgattaataataaattcaaaaaaaattataagggtgtcactacaatgtgccttttataagaagaatatcgatgtactttctttttattttgtacattcagaaaaaaaatttttaattttattttttttttacattaatcgtgtacgttataataataaaacgttataattattaa

SEQ ID NO: 308360 - DNA, 2222 bp, Cannabis indica
agagagaaattgaaggattttgccatctaagagatgacttatatacacaactattagtttgatacaaaggctaaggctaacaaacctaacaaactaactactaacagacttttaacagttaacagaatcaactatctcaataatgatggagtcatacctccaaggtcaagatttgtgggaagtcataggtggtagtgatgtaaacccacctaaagatgctagagctttgaagaaatggaatatcaaagccagaaaaaaaaatttcgcaatcaagacaacaatcgaagattaaatgttaaagcatgccaaaaaagttgaatcaccaaagaaggcttgagacactttcattataagaatgatacaagacttcaacttcaaaagaatgagctcttatcaatctcactacaagaaatgacaataaatcaatatttaaaccaggtaaaatctctttgctgcgagatttctagttaagagcctacttctaaaatgttagactcaagaataagaagaataattatttgttggtcaaggcccgaatatagaagttttgttgctgcaattcaaggttggccaacaaaacctttctctcattgagtttgaaaacttgctatccgatcaagaatctttggctaaacatatgtttggagtttcaagaatgaagaagatcaagaatctttggctaagcataggttattgttatgtgaattatgctggagatcatgacatgcgacaatcaactagtggctatatgttcaagattggatcaggagtcgttttttggtgtagcaaacgacaactaactgtgtcattatgatccacaaaagcaaagtatagagcagcttctatggtagcacaagtgttatgtatatgtctgtattgtacacatgtgctagttaagtctagtcacactctagttagaactagcagacagttatgatagtcaggaacctaggcatgttagttggttcctaaatagctcatgtatataaatagctatatctaacccttttgtaactaatacataattgtaacacttttattcaaaactcaataaaaagagaaccggtatcccaaggggattcaaggccaggtttgattcgattaaacactgtgtgtgtgagtttgttcgagtgttttgatcaaggcttagattgatctggaatctattcaaggtgattgattcatgtgaatgctcagagagttggatcttgaagcttttttgaagttcaagattctggtgaacaggagaagagatgggcagcatgaagtacgatcttgagaagtttacaggaaaggatattttgggctatagagggtgaagatgtgtgcagtactagtgcaacagagtgtacaaatggctttacttggggaagacaaacttcctgctggtttgagcgagaaggagaagactaaaatgttagacaaggccatagtgcgataattttaagtctgggagacaaagtgcttagggaagtctcaaaagagaagttagcagctggtctttggctcaaactcgaaagattgtacttgacaaaatctctacccaatagattattcctaaaacagaagttgtattcgttaaagatggcacctggaaagagtatagaagatcatttggatgagtctaataagatcattcttaatttagattatatagtaatcaagattgatgatgaagaacaagcaataatcattatcaattcactttcttctgaaaggtattacaagagaattgggggttaatcaaagagtggtgtctatatattgtgataatcaaagtgccttatgtctaagcaagaggcaagtctttcatgaatagaccaaacacatagatgtcatgctatattttattcgggacaccatttttgaaggaaatgtcaagctcctaaaggtgttctcaacagatgacaaccactcagatatgctcaccaagccactgccaacaactaagtttagacattgtttaaatctactcaagatcacttgactgcatcataatgatcttgaccatgagagttctgtaaactattgtgtacagttgcatctggatattgttacgtaaatgtttgtactgtactcatgtgttagttaagtctagtcacacttatgttagaactagtaggcagttgttaggttattttcagtattatttttaggttcatttttagtgtgtttttaatttagttctactcttgtttagagcaattttatgctttttatct

SEQ ID NO: 308361 - DNA, 1947 bp, Cannabis indica
ttaattttataaatatataaatattaatattatttattttagattaatttaaatatatataaatattattaatattatttattttaggttaattaaacttattaccaattttaaaatagtttaaatatattataaatattaatataatcgatttctttatcttatattttgagttattgtgtgttaatttttttatttaatttgttatagaaccaattttgtttagatttatgtcttagtatatttgaaattgatccccaccttctttttttatttttttttattttttaattataattagtttatgtatgtgttatttatttttactaatttattatgaaactagttttatttttaatttatgtttcagtattttaagaactgatttcctttttgtttttttaattataaccagtttgagttattcagtgttatttgcttatacccattatattatagatctattttaattatagcaagtttgagttattttttgtgttatttattttattcattatgttatagaatcggttctgttttaattataatcagtttgagttattctgtattatttgcttttatttgtcatgttatagaactagttatattttaatttatatatgagacatctaactccagtaacttttctgacgataatgataactctagtgactttttcaggggtgatgacttttccggcaacgataattttttctgtcgacttttctagtgctgataactttttcggtgctaacgactttttctgcaaaattttcgacaatatttgctattaaaagttttataaactttatttatggtcatttgtttggtttctcatattttaaattttgattactttttattcttatattttttgtattatttatttataccatataaaaataaattttatttttatttttcatatttatgaaaaatttcccaaataaattatgctaatttgtattcctattcataataatctcaaaaataatataaattgtaaagtatgtagaattatctgtaaaattacgttaattttttttattattattttagcatctatatttaaagtattaatttttagtcatatttattatatttacactttaagaattgatgtatgcactctaacattaaaaattatcaaatttaattaaattttaaaatttactcataatatattttaatttttcttctacatctttttgtgttaattttaatttttttcaataaaaaaagaagggagacagagagatttcacaataggtgtagtgacatatgtgagtgttataattgtcattattatgaatagattttaatgaaccaaacaataaagaaatctaaatttgattccattccaattgtttacaacaaaccaaacgtgctataagtataaggtcaattccaatctaatagaaaggcacattcttttttggctaaaattccaaagaaaaagtgtctgcttttattttaatgatttttcaagggaacattttattttaaattaaacgataccagatagataccaacacttattcatttgtctgttattattattgttattttaattttttttttttattaaaaaatagctcgtaaaagtgacagagactactctatataccatgccgtgccagcctttagccactctttaccttttacagtggtacctaacctgttctatattctcaattacattttggattttactcttaaaaaatgtatataaaaattaggtaaatagcggcaaaatctttgatagttttattttacttacaattaattctcaaaagttaaatttaggaggtaaaatctcaaaattacgataccgttagcaaattacaattttatctaaatttagctgttaactgtcaggttagattatccacgtagacacagtatacacgtgacacaattttattggcccacgtaaataattatatt

SEQ ID NO: 308362 - DNA, 2846 bp, Cannabis indica
ctaaatattggggtccacaattaaattaattcacatataataataaaataataaaaattagtgctaattgcccttactaatccaaattactagagcggtcattacaggcctagcctgccaaagccaaatgccactccacccaccatccatccagagatgaagaaggctaaagaaatgcttggcttctaccaagatcgcttgatggtcgatgtcaacgagcaggttacaagggcagaagatatgcttttagaactcctggttgggggagttttgaaagagattactagggtaaaattttattttagagttctttttatgaatttttccaccttgataatttaacttgcttgtttctctttgtaggattacttgaaactggcctatacttattaccaagccaaatttgccgctctcaaagccaatacaaccactgaagatttgaagaaggctttggaggaggccaagaaagaggttgatctgaaggaccaatagatgggcaaagtaaacaaataactagttgctgagaaaaagtctattaatgacttaaaccagcaaatagaagacatgtcatccactgccaaggtcgaagcagacctcgaactggaatccaagagggtgagggatctaactgatgaaagggaatgactctgcacactccttcaaaatcgagagtccaaagtcaaagaatttactgagattcttcaacaaaatgatgaaactttactgaaggagaaaactttcttggaggaaacttttgctgctgagcaggagtcgtatcaaaaggatgtcgaacaactaccgtggaggtaatctatgagttctgaaaggcgaatccagacgccaactttggttatttaaaggacaacatttgtgcagacttcttctgttactatgaaatgagaaaggctgaagatgaagcgaagaaatccaatgagagttcttcagccgcttagaactaagaagacccaaccactcaagatcaagtccctgggaccccactgaagtaactttttttcttttgctttttttcgacctatgggccttttatctacatcaatatggccgatcaggcggcttttaaacttggatttatatttacatgttgcttaagacaaacagctggtcgggtagcttttaatcttgaacgtactctacttctatatcttgataaaatattttcctttagctttttcaattttggttttcgctagcttattttcaaccaatgcttgtacggcttttttgtttaggcaaaccctttgtacatgtttagatagttaattaacttgctatagtttgcaaaaattcataaaattaacacaattcaacttataattgatatctttattcatttattggtcggtatgtgttgttaccatggtaacgtatatttattcaattaaaaaaactattacatgatctagccaatcttttactaattaaaacataacacttttgaacggtatatttaacccaatagacatcactcaagagccatgatttttaaactaattgtactttgaaagtggtcatatgaccttaacaccaattattctctgaacctttgagcgaggtctactcaaaaggccaccactttagagtgatttttagcattataaaatttatgtggtccctagaccttttgcatttattggtattattttcttaaatatttgtcattccaatactgtggtactagaactagctccatgttttcatcataccaaccaagtttttacgctcctgattttgtaacttcaatttcttcgtatgactcttcccaattaggctcgatcacacctgttgcactatcattagtattaaagaacactcttctgagtatcatgtctcccacacaaaatttcattgccttcactagcttattgaaataccaagctactttttgatgatgagcttttagtttcagattttccaaatttcttttttcatcaatgattaatggtgaaaaatgcacaattattggtcttaaagtttaaaataaattaagtttaaattaatattttcataaaattaatgaaatatatttttatattgaaaatattttatttgaatttaatttattgtcattttgtaggaattaaagtgttgttattgaaggaaaaggagaaaaagatgagaaagcaagtggcaaaattgaaaagaaagaaagagaataaagtaaaaagaagaagaaaaagaggaagcccatttacaaaagaagaaaaagaaaagggcccaatagaagagcctaaattaggactgccttctcttccaccagcccaacaatgcgggcaatgcgggtcccacggtgccacgtcagcgccaaatggcgccgctcaagctctcccagtcgccccgtcagcacccatgtggtgcttgtttcttctccagccgtgcgccacatggcgccatgggattagttcctccattctctcctttctcttcagcccatgtgggcctgccatgcagctgctcctctattccttccacgccaaagcccatactctatctgcattgaaacatcaatcacaaaattaaatctttcaaagatttatcaattaacaacaaagacaacaacaataataataataatatataataatagtcaatcaatgttaacttcaaaaactatcagattttattattattattattattattatttcttttgtaacccaaaattattagtattttgcattttagtccattttaaaactctataaatatgagttcacttttattgttttagagtgtaatttttagtgtagaaaaactatagcaaaattctctcaacttttcttctcatcttttctctttagaaatttaatgagaatgattagcataat

SEQ ID NO: 308363 - DNA, 987 bp, Cannabis indica
tttatttatttatttatttgagggaaatagtctatgattgaagaacaccacctccatgcaaatcacaaggaaggtccaaggactaggaaaacttcattgatcaaatggcattagccatgatatacaggataaccaaagctagaacaatacaaaaaattcatactacaaaactcatgtcaaagcagataatatatcatttagaataaagcatagagaaattattgagtttgaggaccacactctgataatttgtctcaaattgcaccccgcttaaagccaaacaacttgcattagacttcatatgatttgatcaccaagtttttctttctatttttttttctttaaccttcatattgttatcgcaattgtgagattattgtttatcatttttatgaagtaaatttttatttagaaatctgaatatagattcaatagtagtcggttcaagacccaaaaattttattttgaggggacttatttattattaaaaaatatttatacatatattataattactcttactaaatttatttaattttgttggagtttttttattattttaatctataattatcaaattaaaaaaaaattaatttaattttttaaaatacaatatttttattaatggagctatagcccccacaataactcaagtgggtccgttcctgactgatagagttgaaaaattgcacaaaaaaatattaaatttaatgcatcaaataattggttaatgaagaaaaatgtaattaagagatatgtcttgctatgctagatttggcacaaaattataattttaacacgtgttaaagaattaattttaaaaatactaaattatagcactatattactaatttgacacttttcaaaaatgtttttcccttttcatacaatggaaaaataacacatttagagcttgtttgatatacgtattgtattaaataataatattatatttgaataaagcaatgtattgtatcaattattacg

SEQ ID NO: 308364 - DNA, 1588 bp, Cannabis indica
aaaaaccctcgtctcagcgagcgaagagatttcagtgccaaattcctctgttttcccaaatcaatggcgtcccaatcccgaaaaggtggaatttcactcccgagagacgaaaccccaagaaagacgagagcaaaagcataatcctgagaatttctcagtcagaaatcgtggctcggggaaagcaggcagcgacggacgcggcattcgtaacgaagaagcttttgaagagcactagcaaggctgcctggatcgccggcacaactttccttattctcgtcgtacctttgatcatcgagatggaccgtgagcagcagatgaacgatctcgagcttcagcaggccagtctcctcggcacgccttcctcatctcaaaagtgatctcgtaaatcttcgatactctatactcctagggtttatgattctttttgaattttggagtaaattgaaattgaacttacgtgaatttgaatttcgtttttctgagctatgtgtttgatttcgggggtagattagttacaataacactgctggtttttggttgtagtaatggttaataacttaatatctttgaattgaaggaatatttctgaactgaaccttttgatattgattttgtggtgtaattatagatagtttactgaattttcaggcgtttatataagtgaaatttgagctttatttatgaatttatcttcatattcatgtgaatgagagtaatctcataatttgcttccccatgaggtctgggtacgatttttcacatacattccaagctaatcaaatggaatgggaaaaaaaaataattcaatttcaatttttttagtttgattgtattttaaattattggaatgttatctaaaagaataattttttcacaaatttgtgaaataattattttattttaaaataggcataaagttcattccaatgcaaggtgaattttttttttttatatgtttattaaattcaattctattcttgttgtgttttcatttcgtaggtagtatttggttggaatgaattaaaaaaaaagaaatagtaatgagtataagaatgaaatagaatcaaatttaaaattcataaaaaatatggaatagtcattatattggtatgtgattgtttctttaatatgcaatcataacaaaagaatgaaataaaaattgtttcttttctattttattacctccaaccaagtgccacttaattttctctatagctaaaattttcttatgcattggacttggtatgtgatagaggagttttgaactttttaggagtttatatcatttggtaactataattggtatagagaaacttgttcattctgattcttattgtgtgttgagacttgtttgttctagtcaatatagtaattttccattagagcatttgtgtttctgtggactgtgtgtggtgttgtgtttcaagctgctgcaattaattgcttattagctgctcttttataggttgctaagattaatgggtttagatattgtggatggttggggtgttttggtttttgtttatacatacttaaatactctaatgaataattatataccttattatgtcatgtggttaagtgtaat

SEQ ID NO: 308365 - DNA, 1147 bp, Cannabis indica
cttctccctcctaccaaacacagtgtaaagggctatgagcaaaggggaagaagttttaagttataaaatagggggaaatttgggccgacatatgtcatacctattttttcaaatgacacgacacaatagagcaataggcacgacaggtgttggccccaataatgagctcgggaaaattcttgcccaatcctaacgaatccttttcaaagtaaaaaaagggtttgggcacgacagctgacgtgcctaatgggcctttgtcatgccaaatgtcggccttgattctctagacagagggaacgattaaatgtcggtccaaagtacatcgtgcatgtagagttttttttttcttgtagtgtatttagagattttttgtcactatatattttttgtttttttgcagcttataaccaatgataaattcaaaagtgttgagcatagagtattagcaagtagaaaaggtccaagaatatcagtggcatgctttttcagtactcatatgttgccaacttcaaaagtgtttggacccatcaaagaattattatcagaaaacaatcctccaaaatacaaggcaaccaaagttaaggattttgctacccaataccatgcacaaggcattggtgggatcaccaaattattggatcatttcaaaattgatcatatgcagcaaaattatccatagcaaatcacaaaatttttgtgattttctcaacctaatcaataggcagggttgaccttgcgtaataatgggccaaagatttctttttttgtgtgtattatatctcaagtaaagtattattaaatttatgttcacaaaaggttcaaaattattatttttttaaatacaaaaaaagtatactacataaaaattttgagttataggtttgggtgggctatagacacaagcctagcccgtcttaactcagggccgagccaataaggagtatgttttgaaattgtttgcctggctataatctaccaaacaaaataattatttgttatgactaataatgcatagattgcttattaatatttattaaataatatttttaaaatacaaatggtgtatttattgtgacagtagtgtgacagtcagtagtcccgtgatccgtaaggggaaatactgggtaagctgtgtaatcccacaccg

SEQ ID NO: 308366 - DNA, 2190 bp, Cannabis indica
ttctttgcatgaacttggaacactgagatttggagctgaagctttccagatctggaaatctgggttcgagttttctggtatctctcaactgagagatctggtatggctctagtgctcttttatacttgtagattagggtttgatcacagatctggaagttagttacaatttcggttgtaactaacaaccagatcttgatccactagaggcaaagccacataggatctgtttttgtattctgttgtgttttatttgtattttcacttcatcttgtaaaactgtaataataaatattacagtgagatctaatttaacaaattccttcaatgttcttcaagaacagtcaaggggggaggaattggagctcattcaacaacaagtttgtgatggacacactagttagttggaacattcatggattgaataaaagagaccagcaagttgaagtgcttagtctcctgagattgaataaagtgggtatgggtgctcttttggagaataaattgaaagaggacaaagttagtgatatgatgaactttgtgtttcatggctaggaattttattgcagtagtgttactgaaggaagaattttaattatctggaaaaaatcttttgtcaaggttaacattcttcaagagaaccaacaatttgtctattgtttggtcaggattgtggggttgcaaattgaattttgcttgacttttgtttatggattcaatacagttgaggagcgtgttaatctttggaagggtcttacgaatactatgttgtcggtgaagccttggcttgtacttgaagatttcaatgcattgtttcattatgatgacaaaatgggaggtaaagctatatttgctttagctttaaatcaggttgatcatctgaaaagtttgggttccaaatatacttggacaaataaacaagatgggagtgatagggtctattcaaaaattgaccatgtttttgaaaatgaagattggcttgatactatgccaaacactataattgtttatgaatggagaattgtatctgaccattgcctttgtctcattaaaactcaaaaataaggtaacatgcgaagaaaaccttttaggttctacaatttatagacaactcatagtaattttaaagcggtggtcaagagtaactaggaagaacctatgaatagaagaggtctgaattgtattattaggaagttgctaagactcgggttcttattaaggtgttcaacagagaagaaattggagatgtggaataagtctatcatgaagcaaaaggaaagtaccaacaagccatttcaaaggctcatgcctctatgggtgatacctctcttcaggatgttgcaattaattttcaatatcatgataagttgtacaggagcttctttgtccaacggagcaagatcacctggttacaaaagagtgatgataataatgcttactaggagtgttcaaaaaaatttacaaaccacccaacttaaataaattgcccaaaccaaatcaaaaaaatcgacaaaaaatacaactcaaaataatacaatgaaaatccaaactatccaataaatatattggatagtttataaattattctaaaccgcccaattaatccgaataaatccaattaaatcgatttatatagtttttaataaaagtgtatatattatattacataaattacatttattagttaaactattttgtatttaaaatttggacattagtgtttaacttaaaacttagattttatggttaataatttttattctatttggatattgaagttgaaatttacaatctatatcatattattacttttttattattattttattcaattattttatgtttactcaattatatttatcttatattaaagttcttaaaattaattgaaactataacatttttaacttaaaatataaataatatatatatttaaaatctaattatttgaatagtacaaactaacaataataatcataaaaaaaaaagtgaacggttttgacgggttaatccgaccaaaccgacaaaatcattgggcgagttgaaatttttctaacttttgattgggcgagttacgattaaatatttgcaacccaatatttataggggctttttcatttgtacacttctaaataattttattttattttttgcatttttacgaaattctacataaaaaccctattgcaac

SEQ ID NO: 308367 - DNA, 2388 bp, Cannabis indica
tcgttattatgtgatatgttatatgcttttcctactgagtctgtcgactcacaattctacattcatgtgtaggtaaaggattggcgaaggctgaacaggagtgagcttgagctaggatgaagttgtacatgtcatggcagcacaacctggagtgttcggtctcaggacatctggggttatcttttcgtactcgttgtgcgacttgacttttgtattctaactattttgtaaaaaatttattaacgggatcccagcagtcgtaaatatttttataaagtttataaattttgatagttaatactaaaagtttaaattagacatgattttcaagaaaattatatgattagtaaagatagcacttcaattgaaaaatcactgtagcgtgtcttagcattagggcgttacattgttgttgtttttgatgggttttgatggttctggctcaaaagtggaactttttgtttcaaagctttgataatgcaatttttgatgaattatgtttatgatgatgttattaggtatactcaaaggttttatgagttttggggtagaattgtgtgagtaatggttagtttttaaatttctgctggaaacagctaactatttggtttggcaggacaccaatgaatggtgaactagatggggtgtttctcgggtgcctaagtttgtgtgtttcctcaatatttacgtatttctacgctatttatcgaaaagaaaactacccgtttcaagtttaagtccctaaaggtattttagcaagaaacttacctatttaatgtaaatgtgacatagagtcttcgatcattcagtagcacattccactcaagttgattggcactgtaatgaccgcatgttagaatatggattagtaaaggcaattagcattaattggtgacatttttataattatgcttgattttattatgttgtgggtcccattattaaaaatagacattagagttataatttctcaatcctagagattttattaaattttaagagtattatttatattaaatatgaattatgtattttttatgattttgctcggtgttgacaaaaaatgcaataattaaccgttagagtcacatgagtaagtttagaacctatttcttagcgggaacaaacttacaagatatttaaaatacctagtttgagcggggttcttttgactattttacccctaggttttataattgtttaacttaagaggttaagggcatttttaaaatttcatatttaaggattaggtggctgctggggacagtggcaggtggccattttgatttatttcagcctattatccttgattttatttaattttggtcaattaagaaaagaacccatttagaataaacaaaccaagtcttgaaccctctcttcctctctcttcaaaccttgcttgaaccagcaagaatctcagcttgttggtgtgttttggaggaggagttagctgaaatcaagtgaacttaatcaaaggtaaccctagaaatccttgctctttgaagatttgaatttactagttgagttgttgaatgtgaaatgttaaatttggctctgtttgaacctatgatagttaggttttgttttctagatttagattaggttgtttagagctaaattgaggtggttttggtccttaattcttgggttgagcaagtttgagttggctcaacaatggcatattgaatttttgtgctttttggctattgtttttagttggattctgttattggatgttggtacaggtattctagaaagtttgatgaattttgggattgtgtggagggagtttcagccttgtttgttgagcctagtatgaaccggttaatcggttctacatgtagtgtaaaactggttaactggatcaaaggtaggtttcccgaattttttgctttgtcgatccatgttattttcagtgccttagatggtcattttcttgatatccggggtatcgttataagatttaccaatagcaaaacccttaatagtgatgtttggctttcccgaattagggttttagcgtattatttactcgtttacatatatgtgactagggcatccatccagcataagattttccatttaggtcacccaactcacttgaattcagagacgaggtaagactagcatagaacatattatatatgcatgctgtgtttgtgattgtatatgttttgggtgatgtcatagcggtacaaccattgtgccatacctccagtgatatttctttcacgaaaaataacgtgcatgcgagagtcatgttgaagttttatgaagcaagtttcgacttccatgaaggaaggcttaagttgtataaaaattcaagcgatgacttcgctcaaaaggatcaaagggtgaaagcatcacggggagtaagacagactt

SEQ ID NO: 308368 - DNA, 1674 bp, Cannabis indica
aaaaaaaaaaattcattatttagaccaattaatattattgtagtgaaaaattaatttaaatatttatttataaggatagaatttatttatttattataggggaagttaatttatgtggcaaaattagtgtgtataataaataataagtgagagtagagtatagatgataaactaacttggcaccagtcttggcaacatgcttaaaaatcctcttggccgagttacgagcctcccactcactggtaatttcggactcagtggtcccaaaatcatcaaccatggtcgatatagtggaaagccccgaagacatcacgtgagtcacaagcctcctcacgctccaagccgtggcacgacgctgcctgctcagcttcctcagcatatccatatcaatcctcctcctcccagacccatcttgctgcctcatcagccgagccggcatcgacttagaagccttaagccgccgaagccgcgtctcctcgatctgatcctcttcttcatccgcgggcggacccgagagcgcgtccaaaatgtaatggtggaaaacgctctccttcatccgatcgaagaaggtggccacgtggaacgaggatgcaagaactttgacgaacacgatcttcagtagccaaatcgttgcgccgactaagattgcgattaggaatcggaagatctttttgaggaatttgtggtgtttgtgaacgtccgggaacatgatcatccacgcaattaggacgagtgctaaccacgcgcagttctggaagcttttccggagaccgtgaacgaaatagactactttctctttgagcatgaaattcttctctattaggaagacggagaaaccgacgacccagcccgagagtaggcggccgcagaagacgaccatgatcatcaggcaccatttccagatctccaaactccattgcctcttgtgtttgagtggttgaagagtgagggaacagattaagcaagtcattatgatgagaaacagagaacattccatcactgctcttttgttcatctttttctggcgtcttcgttgttgttttctgtagcggtcgtggtcttcgtcgttgtagacttcaccgtaccactcggcgtcgtcgttctcatcatcatcatcatcatcatcatcatcggaggatgaagttgtggttgggtggagttcatgggagaattcggggactctgttgggagggattaagggatgagtgaactcctcgaatcgagaccttggttttgaatagttgagacgtctcaagattttgtgattattactgataatattatgatctggtagtggtggtggtggtgggtcgatggttaaaaccacctgctctttattattgcttttctccgctacttccatgcctctggccaccactaattcttactatactatagaatgggatgaaattacaaatattgatttacatcttatatatataaacgcatagtatcaaaaaagaaatgaaaaataaaatacataaaaaacgaattagctttttgtttccacttccttacttccaaaattacttctttttcttttgaggattattattaatttagtgggtatctatctacctctccccccacttaggggtgttcatccgatccaatccgcactttttggtcaaacaacatccaatccgcactaagtgcggatttcatattttggat

SEQ ID NO: 308369 - DNA, 1243 bp, Cannabis indica
taatcttttaaaaaatctactacattaactttcgtttttttttttttgtttatttctatatacagtagaacctctatccaagaatacacttgggaccaagaaaataatattctaattgagaggttataactaaatagagttacattagaaaaaaaaaaatcaaaatatcaaaaaatatccaatgtaacaaaaataccaataaacaattcttaatactatattatattaaaattattttcaagaacatataatatttatacatgtactataatttgaaataaaattattaattctacataaataaatttataaaatatatgtacatatttatttaagatctaagtattcttatatagaggtatattttattaatacgggaattaaaaaatgtataactaattacaatatagaggttattattatttataactggcccaaattgggacttcatttttttataacaaattagaggttattcttgaatagagtattcttaaatagaggttctacggtatatataatatcaactttttcataatcatcaaaacttaaataacttttttataaaaaaaaataattttcataacttgttaatttcacacatcttctcaaaagttgaaattatcctcataaaatcaaaatatatgtactcaaaataatgacaatgtataatttagtgctcaaattggctaattacttgtctaattagttattgattaacggcctctttatttcgtacaaatttttaattgattaattgtattatttgactaatctaataagaacttaaatgaagattatgacatgtatatatagttataagttgagtcaaattaagatagttaatcaatatttatcagaataaattggtgttatatatatatattatatctataaattaaattttaagtatgataagctataacatgcatacaacaaataaaactttctagtttctataataccaaaaaaaggtattatataaaaatcttaatcttaccataatacttttttgaactattaagaaaagttgtgtcatcatagggcatgacttttcctataatatatttttccgactataatacttttttagttattattgtaatattgtcatatatttaaatgaccattatttatattagtcttttattaataattgttttcactttgtagaatatttatttttaatttttttttttttttttgtttaaactagtaattctatttaattaaaaactattac

SEQ ID NO: 308370 - DNA, 1619 bp, Cannabis indica
ttattttttggaaaaccgtaaaaatgtaaaaaaaaacattctttgaacataaaaatgtaaatattttacaaaaaatagtgacttatataattattccttacaattaagtgtagcaaaacgaagtataagacatactccaatcactcgtacgtattagtgctaatatagttattcttataagttatatgtgataaatgaatacaaatgttcaagacgagacatgcacaaactaaagctaattaaatagatggaagcataggaatttttgtagggatgggaggataaattggagcaaaaacatagggtaagttccaaaggaacgttaaatcaaaatcaaatggaaatatcttggggtgatgttgttgaaatccaagtcttccaatcttgtaatggtaaagagcgaattggtaagaagtagtgctagtgcctagaaaaaggaactcatcacgttctggattaggacagagaccaataatcctataattgtccatactaacattccctttcactctaacattatacaccaatacccaattctctacctcattattaatatcatcattcactagttcccaaactttcaaaatggtgtagatggagaagttggtaagtggatatgatctagccaaacacagccgcccattaaccactccaatgcgagcagttgaaaaacccaattgcaagaattgctcaacctcgtatttattgcttccaaccacataaggcaatttcataaaacaaaattctatctttaaaggatcaaaagcaacaactcctctaacgcctctgggcattccaaacaatgtccactacaatcttccattaacagctaccggggggttcatctaataaccttctggcagtaaaaatcgtagaggttataggacatagaaacatttctatccgatttaactctggaaatgttttagcgatatatagaaaccatctctttctgttttgattagtaagagatcatcaaaagttgactcaatttcatggtgtggtccatttttgtagagaatgcctaacgttttttttgttgtttctatgagagaatcatccttatagaattttatcagaagcgaatgtgggagtagtcgttggtggatatgatgatgagttacgatgcgcttgaaatgttgacagtgaatcaaatcccaccaacgctacaaaccaacccacacctggctatgcttttcgaatctgggagacgaatcagtatttcatttaccaagtcatccgtcattatttgaataaaccgtgatgtcttcctcttctttctagacctagtttgcatcaccattattataatcatcaatagtagtaccaatgaattcacctaatctgcgtctcttaggtgaatgtacgtgccgagccacgtattgctagttttatttaagattttggtctttttaaaattttgaatgtattttatttttaaaggttacaaattttttgtttgaaaaaattaaatatttatatttgaaatattatttaataatgtattaaaaataatattagtgtaattataaaattgtaaaaaatttattattggagtagtagattattctatttagttctttttttaactattcttcccaagataggtttgttagaga

SEQ ID NO: 308371 - DNA, 1665 bp, Cannabis indica
aaaaagaaataaaatttccataccagaatcgagtgacagtctgaagagatagctggagttgaagaagacgatggatcctgaagtggaaaggaaaatttgagaaagaagaaagaaaaagtggagagaatggagatttggatggagagaaagacggtaacagcttcggtatgaatagtattttacagcttctctttccttcactttctaattataccaaaccgtacttttttttctttaattttttcatttattacggcgttaaaggcaatttctttgtatttttttttttgttgttacgggataggtaaatgaattctacttttgtatttaaataccattctattttagttaaaaaatatatatatatataccattttattttattattattatttttttgtcatacataaatatattaaatttaattaatttaatttgttttgaaaatacataataattattttcttgatatatatggatgattataataaaaaatcaattaattatctaaaaataaaaattatcattaatgcatgattgtataattttaattagttgatttcttaagttttattttattgtataaataactataaaaataaagtaaaaattagtgatgctcattagaccacatctaatattttttaaatctatttagatcggtccaatccaattatatattagatgttggatttctccaacaaatccaatctaatgctatatactcaaccaaaccaatctaataaatcatttgattgtattggttctatcaaatggatatgaattcttgtattgaatcggattcatctaatatttttgattcaatatttattggatcggattacatccatccaatattaattggattaatcggctaaaaggttgtggattctaaaaggttgtggattctttcttcgttttcaagtactaatatacatcatcaaatatacaactaaatactaatatacatcctcaaatattaaaacaaatagttaagataaggcacacaataataagctacacaatgtaaaacaatatattgactatattcataactcttgtgcagatcatcatgcttctattttccttaatcctgctccgggtttggtggaagtttggcaccctcctctccagaattagctcaaactaaactgtgatgtttaagtaggtctggatagcatgtgtactaaagtggtagctagaaaccatctcaatgaggtagtttgggttcaaacggatcgactagagtttttttatgctttatgtggagaagcaactgcctgccacttggctctggaagcagctaatgtaatgattgtaatttcattattgtggactttagggtggttattaatactctcaatgggaaggagtttcgttgggtgcttgaggactactcttcttttttgtaataggatccttctctcttttgttagttgtattttttctaatattaggagagcttgtaatttcgtagcccataatgtggcaaaatgggcttttacccataagtagtatgattattttttgactacttccattcttaccaacttgttttgtaatgatcgtgtgattcaaacattttctatctatgcacgcttttattcaaaaaaaaaaaaacaactaaaaattttactctcttttttctttatcttcctcgtagtt

SEQ ID NO: 308372 - DNA, 2246 bp, Cannabis indica
tgtgtttggccaatggatttcaacttatccttgaattcaccatattgtgtaaatttaatgtatgtacgccagacaatgtatttgaaaaaaaaacacaaaacataaaacaaaacaaaaaaaaaagtttaggcattacgcgtgacaatgagtactttcttgaaatttacataagtataagcaagtcatatccatagacatttgaaacaacattagttgactattctcataacataagacaagctccattgactccaaagtctttcccccaaagaaaaaatgtatatgtattctcatatattactcattcaataatggtatgcttgtataactgtggtttgggtatgcaggggtttggggccgtgtccaggtcggtgtccaggttaaaagtcgagaccaagagccgaggctaatttttgggttggggctaggattcaagttggggttcgggctcgaggtagggttcggggtctgggtcaggacaagggctaggactacagtagttgacatgcaatttagaacttttacgatcttaaaagaatttagagtaatttataatctaccattatatagaagaaaatgaatagttaattagtattaataattaagaatcaaaataattaaaattatattcataatttcatatttagatcgggtatgaggtccggattataataataaaaaatagtaataagtaacttgtttttgttttcaaaattttaattcactcaatttttttagagcattattattaaacactataattaatgtgtacgacaatactatattgatgtggcgcgttataagtgttattatttattaaattagatttgtggggggaattgcactactaagaatatgagatcgcattaatgtgaatatgatcattttttcaagtaaaatttctcctttaaaagattcagttgattattcccataaaaagaaatttcatcaacccaaaagtctttcaagtctttccaaaatactataaaatggaaagtctttaaacgattcatttgaatattccaaataagaaaaattccattgaccccaaaagcctttccaacaaactatagaaggaaaaagaattctcataaaatactactatagcaaaaatggcaatgttttctgagctttgttttcctctttttcttcttattcttctaccaaacacagccttatcacaaacaaccaacaacataacagtaggcacaacactcacagcaacagacaactcatcaccatggctctctccctcaaccgaattcgcattcggttttcaaaagatcaaaaaccaaaacgatcacttcttgctctctatatggtatgcaaacataccagacaaaacaattgtctggtatgcttttaaaacaaactcctcggctgtagtaccgagggggtcccaggtcaacctgacagctgaccggggacttgtattggttgatcctcaaggaaaagaggtatggagttcggagatagtaagcggagaagcttctcacgctgttatgcaagacgaaggaaactttgtgatcttcgggtctgaaaagctttgggagagctttgatcacccgagtgatacgcttttgcccggtcagagtttgagccgcggagaggggcttttgagtcgttggagggagaatgtgttttcgaaagggagatttgagttgaagttgcagcaagatggaaatttggtgttgtattctgtgaatttacctactcggaatgataataacccttattatgctagtgatacagatgaaaggagtggctcttccactgctggaaaccagttggtattcaatgagacaggtaataaagtataattttttttcttaattttaagataggataggcacaatattacaaatattatacatttaagctataaaatacatattaaacaacttattttatacaccaattaaacatactagttctcctaaatataataccttgaagaatacaagcttggccaccaatacaatcatcaagaaaggtgacaatataaatgcacatttgacctttcctcagtttgaacttgagacccttattccaaagcgggttttgttggtttgaacctaagacccctgtcgagcatgggtaaccatggtcttactaggtgttctactataaaaaaaaatattactttaagtcacgataaaacttgtgactaaaagtaaaaaagttgtgattaattataaattactatttttatgttatgactaaaaggtctgtggttaaaagtatta

SEQ ID NO: 308373 - DNA, 3011 bp, Cannabis indica
agcgtggtggatcacgtgatttgtgcttcggccgtgctcaaagggcctgctccggagcccgatgacgtggctgaggctgccttgtacttagccagtcatgagtctaagtacgttaatggtcttaatcttgttgttgatggaggttacagcaccactaatcggtcgtttagtatggctttgaaaagtttgatgaatgaaaacaataattaattttaggtagttttgtttattgttattatgagccaaatatattaaagttttattttttcccttctccttttgtctatttgttttctttacctagtaataaaataaagtgtaatttaccaattgctctcttcatcatctaaatatctaatgatctaataatattagttagtttttttttttttttcctaaattccacccaactattattacacttaatcctccaatattaatttttagtggttatactttccacaataccaagctgttagtgaatttaaagcaatctatttaccacagttaattgccaagcatatggatgacttatacgtactcttaagtacttgtgggttatgcctactcgtatctctcatattttaaggtctaaaattgatttaccaattttaccacaaataaaatttattatttatttgtcaataaataataatggattaatttaactaatatcttatttcactaagattaaaataaatattattttcactaaaataatatatttttctgtttaatattatttaagaataaaattatattttaactaattaatataattttctcaaataaaactaaataattaaatactatttaatttcataattcataattgttataattattcaaaataataactttcacaaattaatatttttttccttaagaattatttctcatagaaattagttctcataaaaattttctcgtcaaattaaattttcctttgtacagtgttgtatgtatggaggtgacttaggcaccatgaacttatattttgaaactccaataaacacttaattattattgatctcatcaatagaataatttggtttattaattccattattactccactataaatatggaatttcactctttgacaatataaaattatatttacaaaattcttactagtcgtccacatgatataattaatataagtaatttacccaccaattattagttcatagagttggtcaaaattacccttttacgcttctaattatctcctaattccttatttaccattaattcaatgtgaacagttaatctataacttattatagatttaaatccaattgtttatactcctagaaagcttggattcaattattgtataacatgttctcagccactcaattaagctcccaaaacaaaagttacaaagcagacctccaactctgcatcctcattcaaaggcttcaaatccctcgtcgcccattcctctagtgaatgattgtcttttttgatgaccaacttcacttcatctataacaattttagcaatggccttcttgacgttggttgggtcaaaatgtattccacgaagattgaaggagtttacacagtggtgcggagcaattaggctggattgcctaaggttatttgtattcaccgattcccacacttcacgagatttggggtctgttcacctttttgttcaagaagactgtcaagttagggtgaggaatgtcatcgaaaaaataaaaaagagaggccaagattagattacgctgaactcggaaaaatgtttaaagaaaagataggcgggaaagttcattacgtacccgcaacatagaagtccaacgagagagtttgatatagtcttagaagtcatgtgcatgcttggatgagctagctggacagaccaccttgagtcgcttctttaatgagtagaagccaatcttcgtcctattcttcctcattgaattaggatacaacttatagaagtatagagtttcgttaggagaaagaatctctacttgatggtccttatagaaaatataccatcctaatagcaacttatatgcctgcgggatgagttggaattgagctacacccactgtcgtaaaaaagtgtgaaaagtaactctaaagcgggagatagtctccagattcaatagggccctagcttcagatgtcgaagccatccatgcaagaagaagacgactcatccttcagcactagtctattccagaacaagttgggaatgttcttaaggccccacttctcctcataaaactaaaaactagataattgtggaatttatttttatattgatcaatctcccactaagatggtttggttgctacttccaactccgtcccgcaagcttctcgagccatcttcactttgtggtccatgatcatttcttttgtcaacttattcgcttcaaccagcgctaaaactgaaaggaaaaagaaggcaaaactaagtaattaataccctacactaaaaaatatatattaagggtacaagttagtcctctcccaaaactttttggagaggtctctgtcggatccagcatctagaagcaagttctccagggaacattactccaggatagcaagatcaaaaaaatgagaatacaaagcgaaagattacaaaatattttattctgcacgagaataaagtgcagtgtgtttatgtattctatatcactacttcagtgcaaaattttaagccaatccaccctaatcgaattaaaagattaaccaccaagatgggtattgtaaagaccgcttagtttaatttagaaattagcagttaattaagatttaattatgataattatttatagctatttaaataattatttatgttgttatatttaaattctgaatgcatttttatgtcatatagtgaaatttcataattttgcattttcggtgcccggcaacatggaacgctgtgtatggctcagtagaatcacaaattagtatgttagtttagcggggcattttatttagacattgggaatgtcgggattggtcggaaatttagaatttcc

SEQ ID NO: 308374 - DNA, 1883 bp, Cannabis indica
agaggcaaccgtgacaagaaggaccagaaaattattgtaagtatcgtaaagatatcggtcacactacccttgagtgttgatttatataggatgaaatcaaagaattggttcgacgggggcattttggccaatacaaaaagagaaatggagaagccaatccgtaagcgatggggcaaataatgtagaagaagcaagtggctctagagctccttataatattttgactatcattggtaggcctcatattggtggagattaaaagaaagcataggagtgatacacgaaggaggccaaggagaaaccactaaccaatgtgaaaaaatctgagcaaaagacaagcaaaattattctagaaagagtgtgatgatatcattttcatgggaagtgacgcaagatgggtacacccgctctacgtagacacattggtcatagtcgctaacattggaggtgacaatgtatttcctacactcgtggataatggtagttctattaagcttttgaacttgcaggctttcaaataaatggaactacacaagaaagatttgaagcaagtaaatttgaacatttatatatttactagagacacatcgagttgaaaggaatgatcaaactaccaataacacttggtacaacacctatcacaacaaaatccatggcagatttgtagtaattgaccaatattctgcatacaatgtggtagcaggctacccaacctgaaggagatgaagatcgtaacttcgatctatcacctcaccatgaagttccctacaaccgcaagtataagatcgataagaggagtctagtgagactcaagagaatgttatgacactgcggtggagatcacaaagaagaaaaagtcgtgtaacatgatatatatgctcaaggcgctgccgcctcagcatgagtcattcagaattgagaaaatcccacatgtggaaaagcccgacttagaccccagagtcctcgattacacgaatacaacacaagtcgttgagacaatagaggtaccaactaatctcattgattattttaaaagttttaaaagttggttctaaactaaatttgcaatagcaagaaaggttggaataccgcccgagatgatgtttcatcgattgaacattgaccctaatgtttgcagagtacgacaaaagtgtcgcaaaatggactctatgataccaagcgctgaaagaggaagtagattgcttactcgcatgcaacttcatcaaggagtcattctacccaaactggttagctaattccatcatagctccaagcttatccaaaagataagtttcttttacctagcattgaccaactggtcgatgcaaccacatgtcatgagcttcttagtttcatggacgcgtactcggggtacaatcaaatctcgatgtatgagccaaaccaggagcatacgtccttcttaacagattgaggtttgtattgttataaagtaatgccctttggccttataaatgcaagtgcaacatatcaatgattagttaacatgatgtttccagatctacttggaaaaattatggaagtatatattgacgatatgctcgtcaaatctcaacacgcgattgaccatgtcactcatctgaacttgatgttcaaaatcctactacagtataagatgcgactcaatccgcttaaatgcttctttggcataacatctggaaaatttcttggcttcatggtaaacaaataaggaattgaagccaactcctcaaaaatgaaagccttagtagagatgcaatctctaactaagcctaaggaagtacaaagtctcactggtgaggtccctgcattgaatcattttgtttcacgttcttttgataagtgtaaagagttttttaaattttaaaaggtaataaaaagtttca

SEQ ID NO: 308375 - DNA, 1062 bp, Cannabis indica
acaataaaattaagttttatttaatgaataaaatctcaaaccgaggtcgtggaacaatgagaaaaagaacaaaagaagataaatctcgaaagtaagagaaggaaaaaagaaggaagagtagctctaatttccaatccacttgacaaaaattccccatcgagaattggtgaaaaatgttcaaaaatgagatttgggcaagattaaagaggacatatggacaaaaggccaagaatagagcctgaatttgaggtcgagctcaatataaaacatgcttagatctacttgtataacaaagaaaaacctatttggaaagatccttacaatatgatggcatcgcacaaaactttgtgccttccacattgatgtagggcattatacagataacgatagatttctgatgaggaaaatacaaatgataatttaggagggaggctttcagcattatgtaaagaaaaattaagaaaggagaaatacatatagatacacagaggaaaaaatatggggaaacataagacaacagacctgggaagaggggaccttctccaaaggaaaaatgatagtattgaagcaaattcccattattctgagaagcacagagtcaatgattcatcaataaaatataactcgtcaggagaaacaaaccatcgaaaaagtaaaaagggtgggagctcagcaacataaagtcaattacattctttctgaagagagatattttccagcggcaacaatcaccttcaccaaaggagacatgtggggagtaaagttgcctcatgatgacgctcttatcatctatctacagatttaagattgtctcttaggcaaaatcttagtagatagagggagcagtgcatacattttgttttatgaggcattgatcaatatggggcttgacaaaaaaaaataagaagttagaccttgtcagtgctttcctttgacaacaatcaggtctatcctatgggaaaagttgagctcgatgtcatgactgttgaaaaaatcctaaaagtaaatttcatcgttgttgccttggatttttctcaaaatacgtggcagcggctgcgtgtg

SEQ ID NO: 308376 - DNA, 1101 bp, Cannabis indica
accttcccctggcggtgtgggataatttaaaattgtaatttttctccaattttgtcaatacaaaactctattttgaattttttaaaagaatatttgaaagtaattgatactatatatttttgtctagatccaatgatctagaatctgaactttatatgtgtcttgtttaagacaataatatagtctatacatactgacaaaattagagaaaaattacacatgccgctatacaaataaacatttagtttataacactaaacttaaaattttaggttataccaccattaaacctaatattaagaatgaataagtaagtctcccaaaaaaacaaaagttataataagtaggtcgaagagtagattccatctacatagactacacatattattgtagtagataaccatattattattcttaaaagagaaattaattaaattaaatattgacatgtcacatgtgttaattaattagctggtaacccaactaggtgtgttactaatcccaatttagaaatcaataaaataaatatatttttaaattataaattctaaattaagactgaaatgatacgtgcaaaaaagataaatatactattttaatactttgttatttttgtcttaattatatccaacttattcattaaaaacattaataaaaattataacaaacttatttgtacgtttaattaatgcaccatttataatatggtaaatcagtccaaaattatatatttttattccattagtttttataaacaaaaatttgtaaacatgttttaattaaattatttcatttataattttttaacaaatataaaataaaatatagaataggtggaaaggtacaactttaatcttatttactgtgcatatatacatggtattaaaatagtatatattaactatgctacaaattaacaatagtactatagaggatactatactttgtgaaaaaattaaaaactatggagaatacaataatgaataatgtattaaaatatcatagggtactatgcaactctcttaaaaggatacactgatgtactttttatttatttaatttttaatttatttttttctgtatacgttatagttaagacat

SEQ ID NO: 308377 - DNA, 2057 bp, Cannabis indica
ttttttaaaaaaaaaaatctctaccacccacgaatggagagaccaccacgagccataaccctaaaaatccgaacaatgtcgaaggtatgatttcttataaaaaaaaaattattgattatgagttatttttgtgtaaaatcatagttaaaaatagtattgtgctatgtgcaatgtttgatcaggtaatttgtttggcaaaattggttgtaaaatatgataatatgggtaagagctatctctttaaaactcgtgttttaaatttattaaaagaacatttggaagtaactgatactacatatttctatctagacctaatgatttagaatttagattttatatgtactctgtttaagacaataacagagtctgtattgacaaaatcagaaaaaaattacagttttataaatattgggtacttataccgcttacaaacttaaaattttgggtacttatgccgttatttaccctatataatatagtcatgtttggagtattggactactgaatactaatctatgtttggcattttattttatggttgaatgattggataaaattctaatggtctagtccatttatattttatatatcattaccttgaaatgttaactaataaattaaattataaaaatgacattatttttaattttaaaaattataaatatgttttgtgtaatttttttttaaatattctttttgagttgaattttataacatacaatatatacatgaattaaagtttgataaatgctgtgtatcattatattatttaatttctattttttattatatattaatcaatttatttagttataaatattttatttttattaaatatcttatattagtatatattattttttattagtatatatattcttttatatttaattcttttatctataatattaacataattcaatctaatcttaacaaatagttcaatccaatctaattgggtcctgtatactaaagaaattgtcttatatatttataaatatttatatagaaattgtgataagatccaaatttggagagtgaggaagtttctcaatgtattgactgtcgaccaacttatatatacatgcatgcatttgctcaaactatacaagccatttttaaagttggggaatctttactatttaaaaatgggtgtgtatttattgggtactctatattttattaaactatatataaatttcatatttatatatattttttaataatacttatttgaaattttatatataaattttatatatttttttttttgaaaaaaaaaactgttattataacttaaagagagtcatttgcaataatagaaaaaaatagtaggaagagtttcttctaattaaatacaattattatccaatactaaaatttgtttaactaattcatgagccacttcgaagcacaatgtacataagaaatttgattaataaaattcaattaacactaaaaaaaattttactttcacaacaaaagttgtgactaaaagaaaaaattgtgactaattataaattattattcttatgctgtgactaaagggtctgtgactaaatgtattaatcacaaaaattacaatttattgtgactaaatgtgttttaagtcacaatacttgttctgactaaaactaaattaatgacaacttgtaactaaatactaagttttagtcacaagtaaatttttgttgtgattaaaaaaaaaaaatcatatttaatcacaaaaaatttatgttgtgactaaaaaattgtcactaaaagtaacagttttttatagtataatttaattactaaataattacatgtaaatggaagagtttagttaaattgataaaattttattaatcaaacataaatttaatactaaatatatatagtttcaaaatatatatacagatgatattatagataagcattcttgaaaatacataagataaatttattttttatacaaaatacgaggcattagataaggatctttactggcggacccaatgaaggactagtgtgggcttaagcccatgctgaaaaaaaatatttcttttacttcttaa

SEQ ID NO: 308378 - DNA, 2164 bp, Cannabis indica
aaaaatttaaaacttaatttttttaaaaaaaaatgaagctctgttatcgtgaattaaacggacggtttttttacatttgtataatggtcggtcggtttcggattataaccatgaaaactgaaaaccgaattcaaaattttttgtataaaaaaccgaccaaactgaccgttactcacccctactttggcatgtgcaagtaaccaggtaatttcgagtatgaatcttcaagtgttctccgagctagatgtagtgtcttctctctacacctccatacattttcataacttattcgtatcccgtaatctttgtgcatatttttccttatatctcatttggaacccgtaatcctttagaatgtgaaaattgcatatttttccttatatcatttggaataaaccaaacatttacctccaattttcattccggccactagagtttaattaataagatacaacagctctctcataagttgatagcccacctccattgttctttatttctttacttggtttcagtattttggatattgttggttggctcctctgtctgatctgatggctcaacgaaactcggtgggcgttcttcgtaggattcaagtactgttgcggtcttcagattttgaagaggttgcagctacagctacaatattcaagctcaggagctttcgccgtaagttgtcgtggataaaggaagagttaaagaaggttcaaaatttatttgataaagctgatttgatgaagcagattgatgatagtgatgagttagacatggcacttcgtgttgttgatgatttactgagagaaatgttggtagtgagtttgagaagacgccatagtttccgtacttttttctacatggcctccaaaatggaccaagtcattgataaggtgaaactactgacttcaggttcattatcattaccatcacttcatgatcttccaattccgagtgtcggaaaagataccagagatgcagttaggatgggaagtagctcttatgtatttgatgaaattgttgtggggagggttcatgaaaaacgacaggtgaaagactttttgttgaagaaagatgatgtaaataatatattggtaatttcgattgtgggtttgggaggaatagggaaaacaacatttgctcaaatcatttacaacgatgagatggttgcaaagcattttcatctgagaatctgggtgtatgtgggtgaggtgtttgatgtgataacaattatgcaaacgattgttggatctataaaaaactcaggagcaaactcttaccgagatgtctaccaacttgaggtactgcaaatcttatttttcaagaaataatacacaagcgatttctccttattcttgatgatgtgtggaatcaggattctgacaaatgggatgagttaagaagcatattatttgttggggaaatgggagcagagttattgtaactactcgtaatagaagtgttgcatggattacaggtgaaaaagaccaaatttttgatttgggggagctagagtacataaattcttctttactattctgccaagtgactacagtagtagaaagaaattatgtaactgaccccaaaatgatcaaacttcgagaagagattgtgaaacgctgcagtggaaaccctcttgtcataaaagtagtaggaagcttgttgcgtttaaaaagtacaaaggaagagtggcagtcattctatgataaggagttttcagatattatagaaattgaagatcgtgttttagcagcggttcgggtgagttatgatcacttgtcatttgctttgaaagattgttttgcttattgtgctcttttcccaaaagattacgaatttgacgtagacacactcgtaagtttgtggatgtcgcaggggtttattatagggtcagatgacaaggaacaatatcttgagaagttaggctatgagtatgtggtggaattacttgaaagatctttctttcgtaaaattaagagtgatgagttgggttatataacaaaatgcaaaatgcacaatttaatgcatgatcttgccaaaaacatagctgggaaagcttatgctactttaagcttaaaccaagcccaatttgaaggagaacctcttcatgtatcagtggattttcattttgattcatcatggcagatttcaatcccatcatccaatttga

SEQ ID NO: 308379 - DNA, 646 bp, Cannabis indica
tattattattattatactattattggttatgggtctgattgctatagttactgaaacaactaattcatagaaagaatgaataattaataataaaagaaatgtgtttcagcatatatagttaagaaaagtcttaaatggacctggaggcttatgttttaaataatatatagagaattatgtctcatgtgaactgaatataataataaaatgtgataactatgactatatgtataattattggtaacttaattaattaatggtggatgcattgggattgttagctggcagaggtaaaatatgagtgagagagagagagagagaagagaggggaagaaaatgagaaataaataagcagaatggtcgccgtatctatcgccaaacccacgtcttagagaattgagagattcctctaattgaacattcataaatagattaggcaatttccttgcttctttccttctcagttgggcacgtggacttgtccctttataaaatactactattttcattccttgaataatgcatgcatgtaaattataattgttatgaaatattagtattatgtaatattataatatagagaaagaaaatagagaagagatgagaattttctgagtggtttattccaataggtgatctcctattt

SEQ ID NO: 308380 - DNA, 1683 bp, Cannabis indica
ctctctctctctctctcataattaacatctaaaacttgtctcaaatcccatatgcctcgcccttgtaggcattctcttcatcatcctcatcaccatggccttaaaactttctaaactcctcctcttcttcttcctatggctatctctttccttattactctttcgtgaatttcgaaacttcaagtccaaatccaccaataatattgccaataaacaaacaatgaataataacaataataaaatcatcaccactcctacatattcttattcttccacctccaaaaatattaatgttaataactacccaaatttgatgagcagaaaagtacttctagcaagcagttttgacttcaccccatttatagaaggagggggaggacgacgccaccataataacaacaaacgccgtcgttccacaccagacacggcggcccacgatgatgatcaagatcaagatcaagcttcttcaagttcaacttcgagtagtagtagtggtaataataataataataataatgaaaatcatgatcatgagattgatccaagatatggcgttgaaaagcgacgtgtcccgactggtcccaatccattgcatcattgagaataataatggaaattttctcagtatcatatatatgatatatgatatgatatgatcatggaaattaagtgtgcttcaaaagaaaagagaaagaaaaagaaaaggttagtggtgggaacttttataattacttgtatcataatattattgttctttccaaatctttttacatcttttctcagatatataaatccattattgactcgatcagattagctacatacattattatttctatttgtaataatttatacttatatatattaattcttttaatggatcgcagtccaatatgaaattgaaccaagatcaaatgtgaagagttatacaagtattgatggctctacaagtatactgaggtcatatatatatgttgtacatatgtgtattgttgttttattttagtccttttacacgcaaatctttctttgagttcatgattgcttctgaattattttcataaaaaatgactaaaatatctctaatatattcgtttgtagtgaagtaaactacttttgactatacatgcatatatttccttggtaaaattttctttataaaattgtaattaatttggaggaaacatgagtagctgtgacggcacgggatataaatatatatatgaagagattttcatacgcaccataatgacacatatatatatatatatatatatatatttatatattaatttgaggtgggttactggttagtgtaaaaagctttgccttcattgaagattaataccaaagcattgtgcaatacacgtgatgagtttggtgccaaatgacactttccattagatacaccgacacattcaaaatacattgttaataattaagtgtactaacaataaatgcaattttcaaatcttgtgtgagtgatctattgtaattttttatctcatgtaagaaaatattatataacaagggaaaaagttgttagatatatagagcattgttattaggtttcaattctgcttagtatctaaagtacatatgttgtattgtgattaactagtgatattctctaaaagttattatattaaacgaaattcaatatttaattggaccaataacaat

SEQ ID NO: 308381 - DNA, 1376 bp, Cannabis indica
ctttcttcgtttttttttttttttttttgagtcacatttttgtatacttgttcgtcttgtgggatttagtgacaaccacataatatttatagcttcatgcattgttatatctcatcattgtcacattttaccaatcaccattgttttttcatttgtttggtataagtgtaggagatcatttttgaatttttacaagaagtccctaaaatataaaatggttaatagtcaccaatatttacacaattgtactctatatggttactattctcaaaaaactttcttaactctcctaaacaacctagatatagaaatcagtatgtttgttcatcaaattgcacaaattgctcacactataaaaaatgcaatttgattttttttgtctaactgacaccatataagtgtagaagatcatttttgatcatttttttttgttaaaattttattaaattgatttttttttttcattattatatttgataatgatggttaatcgcttaaattgtattgtattacatcgtatttttatagttttaagattttgtagtacgattacaatttgaaaattacaaaaattgcatatggatctagaacactcttaaaaatgagtagggagaatgtagtcttagcagaaaaattgtataataataataaaaaactaattttttttatagatttatttaagaaatctaggtcaattaactgcgactttaaaattttattactcaaaataaatcacaaaaatttgttattatacttattacttaaaaagttcttatataaacacaaaattatttactttgtgtttaatccaacattttgcaaaacacactatcaatagtaccatttcatgtaatacacttatttttgtgcataagccttttgaatttagcctttttgttcaagattttagaatgcaacttaatctttttaatattttattttattttgttgaacgatctactaacaaaactaattattgtattattgtattgtgtgtaactcttgtttttcaccaaattatgtaatttgtgaacatgatttgtggtgttggcaatgtaccaaataacatcacaccaattttatcatttgtctttgcacctgaaatgttacttgagatttcaaatccaaatgtttgagcacattatctagaatgcatttatagcattcaaatcccaaactcataaaataatgattccgtattgttgtaactgtcatctatccacatccacatatgtggtttaacatataaaccataatcatatagttacacaatttaatagggaaatttaattttctatacttaaaaaaccttaatattttattcttaaaccaatacatttcaaactaaaaaaaatatatgacacttttatctaaaa

SEQ ID NO: 308382 - DNA, 1407 bp, Cannabis indica
aaaaagaaaaaaaagaaagaaattaaaccactcgtattataataagtcacaacttaattaaggtattatgttatattgatagttaaagtcaataattggtgctaaaattgaaacatgatatatatataaagtgatgaataatcgatcttatctaatttcgattacagcaccatcaaaattttctcacgtgactctgtttccagtggtccagccaatacaaattaaagataaactttttaaatatatattttctcagcatccaaacaaaagactttctttgtgtttaatttgtacctttcgaagggtcacatatatatttactgttctacttttgataatttcttgtctgatcttctgatcatagaaaagcatgcattaattctggcataaattttggtaattctctctccaaaaaatgttgaaataaatcccaaccacaaatttttatgaattcaaattattaattaattacaaatttcggctgatcttataaaaaaacaatcaacttgagaatttatttgtttgacattcaacataaaattttttactcatcatcacgaaaaaaattctggttaagaaaatattattagaatttacgactaaaaatataataagttgtaactaattaaatacaatttataataataaataattttttgttatactaaacaaattttagtgatttattaaataataatatagaaaattaaatttaaaacaataatgaaaataaattcagagtgtgtatgaaaatacattaaaaaaaatattgaaataaagactcgattatttgaatttattttatgttcccatttcaaaaaataaaataaaattatgtttaaggttgattaataattaatgtcattgatttttagtttatttttttttaaagttggaaaactcatataatggaatcccactcatatttgcataccttcacatgcagtacgcagagaaccctaaccaatatttcaagttcaatttataaaataaataaataataataataataataataataataataataataataacaataattacaagttgaggtatacataattgtctcttttttcttgatcttataacaaataataattttatatcaccatgcacgtgacaacgttactaaaacaaaataattaatatgtaatattatcatgtcaatccactatttttgtttttcttttttaattataatgtcttactcttacttagactatatgtttatatagaaacctgcgtttttgttgtcgtcaatgcttatagcagctcttcatccaaagttaaattaaactaattaaaatttttgtctcttaaattttaacatgtatctcaaatctttttaaatttttaaggtcgttaatttttttttttcataaattattgagatttttaaattta

SEQ ID NO: 308383 - DNA, 3993 bp, Cannabis indica
atcaacgaataatgttatatatggctatttatattgaagatcaacattgttaattgttccccaaacagtcaatgtgttactgttctattaaaaagaaagggatctattgcttaaacttgtggttttattctgcacgaggacttagacaaggtgatctcatgtctctaattttatttatgtttggtatggaatatttatctataatccttgctaaagtgtcaaaaaaagatacatgaattcatattttatcataggtgttggggtttgaagctcacacatttgtgttttgcggatgatttatgagcttcaaacttttcaatatgtcatccggtttagagggccaaaacaactgtttattgctctggaatggaaaaccaagaggtgcaacaagtcttgaatgctttcggctttgtgcaaagtaagacgccttttaaatacttggtattcctatatgctctaagaggctttctagtgcaaattgtgaaaacctaacagaaaagatgattgctagaattcgtgcatgaagttctcggaatctttcttgctcggcgagcagtgttaattaattggtttctactggcgatccaatcatattgggctcagataatgattctttccaagaaaatcttaaaaacaatagaacaaatttacaaagatcatctttggagtggagtccctgattcgaaaaaatctagtttaattgcttggaatgttgtttgtaaagagaagaaatatggtggtttaggctttaaaagcttggacaagtggattaggtttgtggaattacgctgtccaataatgaggaacaaaagtggtacgcctctaccatttggaagaggtatagcgttccaaaacataggtacattgtttggctagctgcttggatcagtcgattgaagaaaaaggatagattgttgaggcaagagattcaaatagataatcaatgcttaatttttggcttggaggttgagtcacatgatcattgattatgtgtctacaacatgaaaggtttccatgaaattctagtttgggtgggttttgggatataccaatccaagttcaaaagtgtgctaaattggataagaatgtgctaaggtagtaagtgtatatttttaccatcaatgcttgtgttcactttgtttggaagaaaaagaatcggtgcacactattatgaactttgtcaattgtgtaaaaaactagatttgattggatagcctacaagttaagaagataggagataatagataaatattggttttggggaattttaactaattatatccaagtcaaatcttataattagttaaagattcccgtattaaattaaaatatgtaaaatttgatattgaaatgcattaataataacatatcatcttttatgatacctggcagcttaaagtgtctattagcattttttgactcaattaggatctataattttatatattgcaatattgtactcatttttagaaacttaaattttagtgatgagtgcattattatgttcttataaataattcactattttacctatgttcttatgtacatgactcactattcttacatatatttcatgtagaatactatactctaatatactttttaaaatggtggagatattttgctcactaatcttgaatcaagtgtcatatgcactatgtgaatctactgccgtttatttttggcacactatctaaataagtgtgaatctaatccctgcaaaagatatgactcataatgtttaagaaaaattataaagttttatctcaaaattaatgggcgatcagtaaagttacccctattttttataaattgctcaatatttttatactccaataacctataatatttttcttcttttttctttctttttggttaatttaaccttttgaaaaaagagtgtattaactaatagtaaaatcttatttaaaaataataaataaataaatcaaaagttagaagccacaactagcttgtttttttctttttgaattgaaatgaatatttcagaaaaaggctataaaacacagaaaacattacaaactagcaactgaaagttacctaagacaaagttagcctttgtttaataaatagtttattttgattagaagataagtattaaataataaaaaatgttttaattacaaactaaatatgtagatgagagcgtctaattaaattagtaataataaaatagtctttggggatttgtctccaaagacggaatttgagaacaaactaattacagtttgttttttttttttaattatttcggataattaaaatattattattattatattagtaatttattcatatcaaatctctccaaaaacaattctgttaaaaaatcaaggacaattatttccgtactaaaaaaatatataaaatatgatcgatcggtactaaaaaaaaccaaatgtctcttcaaaaaaacaatatcaagaaaatacacagttcatcacatcatcatcatcatcaacatactcctgattcttatcagatctaatatacatattcatatataaaattccagtatatatataatcatatataaaagatggaaaggtatgtaaatgatgagatctaatgtatgtaatatatatatatatatattagtacctagggctgctacagaactcatagagcttgccacggttggagaagatgataagagcaacctcagcatcacagagaacagagagctcataagctttcttcaaaagcccatttcttctctttgcaaaagtcacttgtctgtttatcttgttctctatcctcttcagctccactcttcctctccccatgatatattatatataatatataacactaaatttatatatattattccacactgaatcagtaccctagcaaaaaaacctcccctttttattttccttaattttaattacttttattttatcttaaaaaacaataatatattacttgttttcttttttccttttttttttatatatatataattataataaataaaaaaaaaactcaaatccgatctgataaatcttaaagtattttgcttgttttgtttttctggggtcagtaccaaactgtccccaaatttgtgaaaacacaacacaattgggtacactcttataaacacaattcactactggttgaaaccctagaaagaaagaaagagaaaggaatggaatagtggaaatagagagagaaaaatgtatatatatatatatacgtgtttgatggttgtggtgatatgatttctgatatttaatttggttggattctctctatatctctatctaccactctttggtttataaccttaggattattcgccaatctacacacagtattcaagaaaattaaaacaaaaagtaatgaatgaaaaagaaaaaattattgatgctttttttaaatttttagggtggaattttctactacttcttcaccttcatataaaaccacttttcccacggtaagatatttgctactctatcttttgtcaaacaaattttattcacgcgcactgctggcgcgtctgtttacttttcagtgtttattttttctttaggagccaaaaaaggagagatagtcaaatttgtgggacaaaaatgccctttccagttagcattaaattacattaacgtcttcattttttgtacgtacttgttgtagatttaatattgcgatggcttagctcacctcagctcagcccacagtgatccctataaattaataattttagctaggttatcatatttgggaagtacattgtaataaatttggtaatggaagaagaaaaaatcgtcaaagaagctcttcaattaaattttcaagaatattggcagaggatgcaaggaaagatatagaaaaggtattgtacgagcttgtttttacaatatggccatgagtaattgcatacgatagtttatttatctcacttaatctagtccttttttttttttttgatagaaagtgtttataacatagattcctaaagagtta

SEQ ID NO: 308384 - DNA, 1036 bp, Cannabis indica
caaacaggcaagtttaaagcttttgatggtgagaaaaatgacattacaagaaacgagactattgctagcgcatttttgcactgtcaaaactttcttattgcgctaaaaaaataaaatcctcttttggttgacaaattggtctcgatacaagaacttttgttggggcaaaatgaaaagcgtcggcaaaaccaactattactagcatattagcgtgtctagaaaaatcttactaaaaataattttaaattattcttattatacatgcataatatagttataattgtctaagagttagttaataaatatatgtttaatatacaaacaaatgtataattttttcaactaaaataaaataaataatactacaaatcggtagcatcatcgtcaatattatcatttccatggccatcattatcttctacctcttcccggctagatccaacatcatcaaattgcagtggcaggaggtctatcttaaatcccgaaacaatggcactcaatttttgcacatgctcgtattatttggtcttgattgacctggtttgtcttgagagctcaatttttcgttataattgccttatcttcctgcataatggcctccacatcgatcgactaggaccctgacatggaagatgaagatgccagtgcacactttcctccaatttccttaagcataggaaatgacccaattcttttcacataacatgaacgtggtcgacaaaaaacttctacaataatatgtgtttacccaaattttaatgagtagtgaaatggcaagcgtgataacacgtggtatgtgtttattttaacggttcatatcagaatcacaatagaagtgtaaattgattctaagtttttttaaaaaagtaattttgtaatatgatatgaaccttaaactctaaatctcaacacaatattatataatctaaatataataagttatattaggaaattgcctcttttttctaataagggtttccttgtattttttcgaatgaactttcaatcaaccaatctagtaatgaactttctatac

SEQ ID NO: 308385 - DNA, 699 bp, Cannabis indica
agttagttgccattgctttggctgatttctcagtttaatgaatactgaaatttttattcaaaatatatatatatgaaaattaaaattagttatttaaattatatgttgaaaagtcccacatgaaaagtggatggagaactatctccatgaaaatagtacataaatcttttgtgggtaaagagcatggtattaagttttgaataaaaatattttcttataatttcgctcatgtttaattactgtaaccccattttatttaggggtaagttgaaataaacctgtaccccttttataagtccattaccgattatatcctcacataaggatattgttaggggggtgaggaatgtttttttttcattacataagagtataatcgggatataactaataaaagagactataaattaaatatatagaaaaaaaggtaaaaataaaatggattaacaaaaaaaagtatacggtgtaatttccacttttatttaaaaataagtaattttagttttgtagttttgacaaacgagagagaactataaattctcacacacacaagtggcaaagagataaagactttactctacaaataattcattttgttgttgttgtttattacttaataatatttataaggagtgtttatctaattaaatttatattttttttttgtttaaggtgcatttgattgtgagtgtggatttt

SEQ ID NO: 308386 - DNA, 3154 bp, Cannabis indica
ttgagtatcaacccacactatttaaggtgctactcaggccattgtggaagactcatgaacacaattgaagaaaaagaaaaatccaagacaattcagttcttgattatactctgcaacataaatgatcaaaggctagagaactgaacagaatgagaaattatattctactgcaaccaatgtgagtattttttttttttttaacttttatgtgtttatttattgttttaagtttattcatatataggttgttggattataaatttataatcaacatacatgttagtaaatataaattttggtgaataagttctaacatatagttctatggatgctcttagagtttttataataattttttttcttttgttctatacatattgacggtatttgttattatatctgattagatgtaaataagatgacacattcaaattgacaagaaagataaatgacgagaaaactttatgtggttgttctcttttatgtatattgtgagaaaaataagactaatggtgcaaaatcaaatcaataaaattttaaacaatcaaacaattagcaatgacaagattaataacaagaacaataatcagagataaaacaagggcaaacagagtgttaaaactagaaaacattaaatataaaaaataaagaaatcaacaccaaaatatatactggttcaagtccgataaatcgatgtgatctattctggaacaccactgtaatccttctttattgattgagcaagaataggtacaatacagtcgagacgagattctttaatgagttttcacaaagtgtttcaactcttacactttacacccaaaaattttcttcatctacagaagattcttcttacaaaacccaaactcaatctctctctcttttctttgtacctcactctctacctttcaatcttttatctctcaaactctcaatctcatatgaacagagtactcaaactcgtatctcaatcgtgtcttcaagtgttgagtctaggtggtatttatagccttaggatcaagatcctaaagtcggtgactgcaagaaacgagattgttaagttagttagaaaataactaacttaatcatcctcatttagcgaagtctccacgtcagcatgagcactaaggcctccgggaacatgaatgagcttccgggctcgaggatcacagaccctagctgaagacgctttcggataggatataagtctactgaagtcaactatatatctagaactatcaatctaggaggaataactagccagctggaactcctttccaggaaagggctagctgccatgaagactaatcttggagagggcatgatagtcatctgggaacatctttccggactcgactatcattccacaagacaccttcttggattgatgacagtgagtaaacaagttctcaaagataacgattgcggaaacctttttatttgaaggaactatatcacatatatatttttatggataaaaatccaaaaagatgaagaaatattttatagtgtaattgttgacccttttgttttaattaaattaagaaatcaagagctataaatttgtctacaaaaggaaaaggtaggtcgtacaactacaaattcattgatcccaaggaatgttctgagctcttattactagttgagctacctctccaagtgcttcctcctttctcccaataaaatcttatttaaacgcaatgtgacagcctaggtgaatgtttgtattgtagctaatgataggaattttattattattattatcataagtcagtagtagttagtccctgacacttttttgggttcaacaatgaagacacccattttagtagctggctaagaattcatttcttgttccttagctggatcatcaattaagttaggtgatcactaactcactcaacttaacttgatgaataatcattgttcatatcaaatatgaatcccaataatgcaatatagttatagatactcgtacactatttttttttttccttgtagacacttaaaatttataattacactacaaaataacacaatagatataaacatatactcatgtgttatttaaaaaatatatatgggaaggaaaaacaaaaaggtggaacatgttgaaatgatgaatgagatgtacgtatatatatattacatatatatatagggcatgagtgtataattatatgttccagctccacttccctgaataaattaattctgtacaatttcatttcctatagaattacaacattttatataatcattttttcatgctgtctggacaagttcactttctttcttctgttcaacttttggagaagacgcaattaccttcactcgaaatgaagcctgctcataaaacattttatttatttttaatttatgtttagaataattaatgctgtctgtatcaattatatatgatcaaataagctaatagatactcaaagatcagttcttttttctaattattatatattttttttaagttcacaatatatggtatgtgaaacaaatttcaatttaaataaatgtgattaattagctgaaaaaaagtatattgtttcgatgcaaaaaatgttataatagaattatgtactaactactcaccttcttgtctgaaccaaactcaataacatcagagggtcgaatacgagttgggaaatttggaggtattctgtaacgtctcccctcattactgcaaattattttgaaaattattgtaaataaatatattaatttgtaaagataagttcaaaaatggattcacaaatttaataataataatcaaactgaaataaagtctttttagaatacttactctgagacccatgtcccatgttcacttctcaaatcggtcaagaaaaatgcaccatttttgtaattgattcgtgcatgtgtttttgaaacctgagataaaattaatctctccaattaatgttatttttaatataaaaataaaaatttgacacaagattttttaatttagagtacatattattttgagaattgtttttaaatttacggtttggattactccgtttccaagtgggttgctacgtgaattttgattgtaatttaaattgatttattggttgctatgagagtttttatgtgaattttcgtaaaaaaaaaaaaattgttttgaaatataaaa

SEQ ID NO: 308387 - DNA, 2214 bp, Cannabis indica
ataataataataataagactaataaagacttgcttcgtctttgattcaagatttcagagcagggcaattaactccactttactttactattctcatataaccattttgaccaatggtgttgagaggatgacacccatttcagcacaacgttattcgacaacgacttctctctcgatattcaaagccattaattcaacacccattcattggtttccacttggattaatttcatttcattcattcactgttttagtgttttttactcgtatcataataagcaaagtaggctgtacccgttactatttgtgccctattattggaccactgcagaaactttcataaacaaattacaccccattcaattaaataaaatactccaaactgcaaattaacacatcaacttccgcatgatcacgtggtttcaacaaaataatttgaaaaataaaaatttatataaagctactatactatatagcttttaaaagttggtcaaaattttgtttagaaaaaaatctcatcctcattatgctattgtagtaccaaccaaacctatgtgaaaaatgtaaggcaatggttctatacaaaatggattaacattgacatattgaatacctagtgtttaatacataatatcttgttaatgaatagaatattatacagaaattacaacaaatcaccacaacagcattttgtctggcttataatcttggctcagttcatgacatatgacattcaatgcgacttctgttagatttattaaatgtaaaaatcttatgttacatcaaacaaaaaatcatacactaaggaggcgtttaataataagagcattgatattaggcacagtagttacattaaactatatgtgacctaatacttaattggaccaatagcaatatgaacttcatattaatggagaaggtggaacacttatattcaagacaacttttgtatattcttccaatgtgggacttgggtagataccccaatattagtcaatagaatttttgctattcaatcaccatgcatccaagcattgaacacttattgaaattgtggtattgcaacataatgatgactagcacagccaactttaatctaatcaaacataactccatgaaaatgtatcataaaataattgaatctgagctacacaacttactaattttacaattacagttaaacaaagcataattagattgggctagctcaatgatttagacttcgagaagatggacaaaagggtgaaaatttgttggagtttacaaggaagcaagctgagaaatagtaaagttagaatgccatgcaaggaaaactcataagcataatgtatttgtgagtaagcatatataggaatgcaggttccacattcttgcttactttctttttattcttcatgtaaaattatagacttttatagcttcaaaatagacaaatactaacccaagacaaaaccagcaattggaatgttgactagatgctgcagaggatgggacttaggtaaaaggcgaacccattttcaaaaaccaggatattaacagcataaaatttagcttataaatgtaaccgcattagcctgcaataaggttgttgaaccaactttgaaatcagagtagaggtaaaaccagaaaccaaacccaaaaatgaagtgtccatggagttaaaacaactcatttctggaacaagagcaagacacattacaaagacataaagaaaagctataattaaaccttgtataggttgcaatgagtttctatactttgaaagaatacatacaatatcacacaactcaaagcacaatgagattacctaccccaattgcgtctacaccaggcccaagaccaggaggaagaacatgtttgctcaatgaaccaactatcttcacctcttcgattaagaaaatccaaagagatgatgcattgagtaaacaagaattatctaatggaggacagcttggtaagttacaaaaaatttgacactgctgacattgtcagaatctttaacactatagaaagaatcttctctgaaaaaccgtgtttttgcaaatgtcagttgtatataagaaaatataaaaactgtaagtgtttgcagcagcagaaagtaattctgctacagcaaaactgaacaggcagaatataaaatatttgcagaaaaataaataacttgacacaagagatttatacgtggtatcagtattctcacgaacactcctagtcc

SEQ ID NO: 308388 - DNA, 769 bp, Cannabis indica
cttgtttgaattgttgccccactcataattatatagagagtcttgtttaatttgtaaacttaatttactcctatacataaaatacaactgtgataggtatagttaggtgcatcgacctgtgcgtttgctttgaggttatctaatgaatcttcttttcttatctgatgtgttgccagtctgaagtgaaagatcattcacataaaactacagtcttttcttcatttaaataacaatgtagtttacattttttatttgaattattgtgtgaccaataccttaaagccatgttataatttttctccttagcaaacaaaaaatgttatatgtttcctaatggataaataaaagatcttctaaaacatgttggtggattcaaagggactctgttcaacatgttagtctgcctttagctttatatatatacacacatatgttatggtggaagtgctatagatctcaaggccagttataattggctaatggtcctttaagtccttacctagctaaaatgttaaggagtgaactgtttgaaattatatctcatatgaaggttggtagataaccaaagtcttaatctctgatttttttgtattcctcatgtatttgctaaacaaaacagagaatcagcttatcggttgttaatttgtaagaacacaagtggaaatgtgttatcattaatatgaagtctcttttaacgttctaagtgtaacatgttttaatcataatcataagtacagttcataagtacttctaatattactaatttttt

SEQ ID NO: 308389 - DNA, 2548 bp, Cannabis indica
atcatcatccatgaactgtgaacatatgtatataataaaaaaaacgtaactcatataaatataaatatatatatatgttatatcattatcaacatgaagaccaatctataaaaaatataaataaataaattgtacttcttaccttggttctcacacaataggatccccttgcaaaaatgatggtgggagtaatttcttctttggtttcataagtgtaagcctctgattgagggctgaaggttcccaacattgttttggaattatccactgtcatacataacaaaatcattttaaatttatttgttttttccaaatattaatttataacatatatataggtatatttatatattacctctgactccagatttccaaacacagtttgtgtacttgaggcctgaaacaatgttgttagagacagtaaaagtgaatttgagacggtaaaggttgccttgcttgagagtgaagagacttttcttggagttgttagtgaatggaattggtaacacaagatctggccgaccctgtcgttgaattgtcaggcttatgattttcacttctggctctttgctctctgattagtcatcaattcaaccaaatcaataaagttgaccttatacatgtataactagaatccattacaacaaccctttatatatttattagttactgattgatttcatttcttctaacaactcaaactttattagctagttagattgcgacaacccaaatagctctcctatagatatgcccaaaataagtcttgaaaaaggtttagttgtttttattttttgttttattttagtgcaattactataattttacaaagagttaaaagtacctccaacagcagagagatcaactcttccaagaagttgttccttccatttcctcaaactttcatcatcctttagaaagaagggaaaattgaaaattatttatataatgaatatatgcagaaaacatgtataaaaactaatgaaagtggtatatatactttatctttctcaagttgatccttgagagaaaacagaggaccaggatttaagtctttgtcagattggagcttggttagatcaccctcttcttcaatctcctcctcatcagtttcattgtcgttttcttcatgctcacactcatttttgggtagctgatgattatggtggtggtgatgattaagtagctcgtcactacatttggtgctgatgatgtcgtttttctgacccttcattccttcttcctccttctggctcggattgaaggccaaatcccttgcggcagaaatggctcgtaatacagcagacatttttgttcaactaaattaacgcacaagatttataaaactttggagatgaaaaaaaaacgatgattaatgaaatttcggtgaaattaattaggggtgactcgtgacctgagagagagagagagaaagagagaaattaaagatttgagagtactataattgtactagttgagaagaattatggttgaacttgaagtttttggaagataggagaagaggacgaagaaggtgtaatgaaggcagtagttgagacttgttacatatatatacacatataaaaggcgaagtgaaggacataggtgttgggataatttttaattacggtaacaactgcaaatgttttatttgatttgatgtataggataatttttaaagaaatattgaaggacactcatagtacttattggtataatttaatattgagtttgagttattttattttaataaatattataaagaatcgttaactaattataagacaacattttattttagtgttaaatattatgagtcccttttatgggtaacaaatcagagagtttatttgatttaatttataaaatataataattagttatatttcaattaagtttttgaaaaaactatttcaattaataataaatattctaattatagtgagatttaataaacaaatatttcgatctattttattctacatatctaggttcatgtatgatttagtttttattttactttcactataagagcattcaagtttggtgatagtaaaattggtttctttcctactttgctaattggtccatttagttttagtttattacaaatttcacccattacatattgtccggcccatattagttagaccttgttatatgggacattatgtagtaattagagtttgattggtacaccatattatatcgtacggtattatattgtattatattgaattgaatgttatgcaatatttttattataaaaaactatgtatagtgttaacttttataggtacctaaatatataatgtttagtatatattaaaatttaacttattatataatatagggtaaatactattttgaaccttgtattttgtaaaagttatcgattggaaccctctgttttattaaatgataaaatggaccctgtatttactaaaatggtaaaaataggactctgaactgattttttgtcaaaaaaaaatttaataataatccgatctaaaagtgttatgacaaaactgtttacattttttgtatc

SEQ ID NO: 308390 - DNA, 531 bp, Cannabis indica
tttttttttttttttggatgttgccattatatgattcgtatgtatcgaacagatcatgatttagtattatcatattaatattgtggggttaccaggttcaacctaacttaacatttgaaagcttgcccattttttccaacgtgacttgttggctgttttagaggcataaaatagaggttctgatcatgaattggatagagattaattatggtcaaatatatagttggcctatatcccctagctaaaattaaaccctacttacttcttctctctctctcttccccttttcctttcaataccttttcatttactagaggaagaattttggtcattgtcgtccactttccatttcaacaaattaagtgtgataattgatttggactcatagagtttccctttaattttctctatatatactatcgtagaaaaggatacttttcaggtaatatgatttgaagatagagaataaagagcctagtatattatataaatatatatatgttataaatattattaattatgtggatgtcc

SEQ ID NO: 308391 - DNA, 1900 bp, Cannabis indica
aagggctagagatcttgaacggaaggagtcatattattctactgcaatcaatgtaaggttttcttaacccttatgtgtttattttattattttagagaattcatatttaggatgttaattaaatatacttgttagtaaatctagatcctggtaaaatattcccaacacaaagtccatgacacatgttcgcaataagtcctctaataatcgtatcttaccatgctatgtggtacggatgcactttttttttaccttgagtttagatttaggtgtgttggcgacctaaatggagaatgatcaacgatcctgggcccttaagcttccttcaaatcctggtttcacctagttgtccttctatggtgttgaggagttgaatcttggactaaagaaatcaaaaaatttggtgttgtggtggtggttcttgcttgctcgagagaaagaagagaaggagagtgtgatgccctaatctatagggacaccacatatgtggttttagaaattagtttaataatactagattagttatttattaaaatttgtgataatattgaaaattttactcaaataatatcctagtaatgaacaaaataacgacgctaaatttgttctggagatcttctattacaaaagttttacaaaaagactatatacaatgataagtcaaaatacacaatagatatagtctaaaacaaattctggcaacttgaccatacaagccaaaaaagacaatatctacattcaccgtagaagatcgtcgtctcatggctgctctaaatttttcttgctcttacctcatgttttagtttaggtgtgttggttgacctgtatagagaacgaccaataatcttgggtcctcaagcatttgccctttcaaggattaccacctagctactaccagggctttaaacacatgtttttgggctgagaattaaagaaaaattaatggtggtggggtggtttaatcgcacgaaagagagagagagagggagaggattggggttttttaatattttttaacatgtatatatcagattaataataataattataataaaacttaattaataaaagttattttgtttcttaaccactaagaaatctctaataccgagggcattaagtcaaccccaactacctctaaatacatcggtaattctaatatcaacttaccataacactcccatcaaaaccactaactaaacctgttgtgacaattttgccccccaatcaagtcttcaaggtcactaaacctaaaaatatttttattctccaaatagctcacattatattcacacattttatataaatcttcgtagttaataaattacgcttttttatctacttatgaaaaaatttatcatttatgctaaaatagattagtaggatcataatctcactcattacgacctgattaactaacccataatatatagtaaatcctaattattcacaattaggttttccgagatattacaaccatcccctcatacaaattttgtcctcaaaatttacatgaataacttggaatactactcctgcatttgtgactctaactcccaagtcgcttcctcaaccttggtgttcctcaacatcactttaaccatcaaaattgtcttattccaaagtactttatccttcggtctaaaacctaaacatgttgcccttcataggataagtctgtctagagctcaatgtcatcatatcttaaaatatgtgtgtgatcagacacgtactttctcaatatagatatatgaaatatgtccccggcaacggcgccaaaaacttgttgcgataatttgcacacgcaagtatacgtatcgtttaaagtagtagactcactaggagtgaggtcgatcccacagggagtgtagttaagtacgttaaaattaaacttttactt

SEQ ID NO: 308392 - DNA, 1661 bp, Cannabis indica
aagaatcaagaaggggatcattagcaagggttgaggaagtgtaccttaaagaaagagggtcttgtttcgtgctccaatggaaagcttgaaatctcgtttccattgttggaaatttttgtcagagagaaccggagtaaccagagcttaaccaggatggtcaactgtgctgagatagtagggggatcgaacaccctcgtaggctggtctgtcgactagattgggacaatgaatagcagggggaggagtgagatttgttcaagatggatttttagcggaatttgtggatggtggaggagctatgggagcttcgactctggtaggatcatcaaaagtggtagcttaactcgtggcctttgtgcgcaccatgattgtggagggaagagcttgaatcttgaagctggaatttgacttctaggagcttcagtttatgtcatttgataccatattaggaactgagcaatgagagaaaagaaaactttattgaattgcaatatatgttctgtacaggagggagagatacatgtatttataggacaaaagccatgaaaagaaaaaataacccaaaaacttaactaattccctaactaactctaatagtaataaattatgtggaatatataaacattcaaaatatatatatataaaaaaagcagaaaaaggtcaaaagaacactccatccaattctatattttacttttttaacatattgtcattgtgttttatctatatttaaagactattactcatcctttgagattttttttttgaataaaaattaattaagccttgctcttctttaattctattgatataaaaaaaacttagaaaatataatattttaatattattaacaaatctatatattattttaatattgagatggtgaatgaactaatttaaaatattccaaaaaatagaaaactaatgtaaaattaaaaatacataagaatttaaataatatggtagatatagatagtactgtaatggtccgtaatggatgcatgatttgctcatataaaattctaatagcttagttttcagatcaaatacatagcttgagagcttcactcatgatgatgaaatttgaactataaacataccaatatttgaactgctattcatttatacatttgaaaccgtcgtttgataaaaaaataataaaataaaatagttaattgataaatatttgcaccatatgcttattatttgatttacaattgattgcatgatggaagaacaaaaaagttaaaataagtagctttgtcttataaccatataatatattcgtatctacattacatttagaaaaagacacattataatattaataataatgatgtactcagaaaaaggaatcttgcacattattttttcagggataaaaaattaaaaataaaagatgattggattttatagtaataaaaaagttaccgtgtcaggtgagtgaacaaatatatgcttatttatttattttaaaattttgtatttctgcgacacacaagtgcagagcgtgtgtgattgctttttttgggccaaaataatagtgcacgttctcatctgcaaatgctctatataaaattactaatcacttacctagacatattttactattttagtatttaacctttttgttttaaaaaaataataaactaataaaaaaa

SEQ ID NO: 308393 - DNA, 2149 bp, Cannabis indica
actaacttgggatttatgttgacagtctgaaatgtacatctcttttcgcaggattttattaatcaagtggaccctgacatcattataggatataacatttgcaaatttgatttgccatatctcattgaagtaagtgacatgttgaactctctgtgctgtttccatgcagtagtcaaagtaaaattttgcgttttctataatattgcatattttactcatattcagctctagtttagatagcaatgtaagaaatatacacgagtagaattccaatgaataaggcatctggtcttttaatgtcagattatgctgttgctttcgcttttgttcaggttacctgaaaatatagaactggaatcattaaaattcattttctcatgtatctacttagtttggtaaagttggagtcaggagtatatatatgtgtgtttttctcctatttattttctagtcttagctgtaataagattactttattctgctgtatcatatggttatggtaagaagcaaacttagtgtttgtccttgtattgtgttcgaatgttaaccagaaagaaggggagaaaagcttgagagaaacagtggaaatttttattgtcattttgtagaacatagaggtatctaaaaaacattaagagaaaaaattccaaaagaaaattttgtggaactacagatctttttttccctcctttttgcgccttgtcccttgcaattgatattctggctaaatcaagtttacaaacatagtttaagccaggtaatgagaaacaaataaaaagaactcttgattctactaccgcaatatcaattcttcccctgtaatgagcagtaacaaaattttggttcttctactgcataatatcaattcatctcctgtatataatcctacttgcctgttttgaatttgccattcctggttgatttctgccatccaaatctttccttaggagacattatagaatttatatcccgtagatgtagaaatgcttctgtttatatagtattcatttgtacgtgcatgaaatgccattttatgtttcagagagctgagactttgggaatagctgaatttccaatactgggtcgcatcagaagcagcagggttcgggtcaaagatactaccttctcttcaaggtaatatatctaaatatatatacatgtcatatataattgttactgataatgaataaatttgagcacgaggtaattggtcagtatagcacctgaaccttaggtagtttgggattttagtctcaaatttaaacatattgggcgctaactctttaatttcaggattattgtggaatccatgtcaagaagtaatttttttttactttgttgacagaaaagtgcctgcctactaaaactttcttatcatcttataactccttgtccttacaatttagcgccacaacagtcttcttcttccttttatgtgaattcgctgaagttatattattatttttttcaatatatataatttatttttcttcattaccgttgaaacaattggcttactgccactttaaatggttgcagacagtatggtacccgggagagtaaagaagtatcaattgaagggagagttcaatttgacttgctacaggttccatttattttaatatatatacttatatattgatgggtgattcatatatatatttgatatattattttgtatttatctaaaattagtggtcaaagagaactttgttcatattgcaattggcactcaagtttgtttttatctttgttcccattgtagattatgcaacgagattataaattgagttcatactccttgaattctgtctcagcacacttcctttctgagcaggtgaggtattagggttccttggatgttttgtgaaatatttcccttttaaatttcttatcaaggatgtgtgtgtttaaaatatttttacggtgagcatcttctaaaaataacaatgatggtgattggagcaagtaagctcatagaggcctgtatttcctggctgatcttgaaagttgtgtatcttccctccttgctgccccttcacctagaaaagaaagagtttcttttatcttctcccatttcaacactggtagaattattttagacattgaaggttctgatatttaatttgttttttttttttttttagct

SEQ ID NO: 308394 - DNA, 1997 bp, Cannabis indica
ttattattattattaatatataaataatttatttcctttataaatcaattacaaattaaaggataatttttatattaaaataaataataacaaaataatttagaaaaggaaatagtcattcaaaatgagagaaaattaaggagatattttctctccactctctttagtgcaccacttcaacgatgagtgaattctaaagataaaaagaagagacctcaataaaaggaggagggcagatcattttttgcaaaggggggttggcaaaaagaaaaatcaaagaaagaacagagaagaaaaagtaaaaaaaatagacaactgctcttcagtttctcaaaatattcaggagtaagtgtgtatttatgtctcatcttctcttttcttttctatattgttccaattccttatcatatgttttttatatttgtttttgattgcctagacttcagaaaataagtcaatatgggagagtataatcaaaaagaaatatagaaaccttaaaaaaatgaattgttatgctgccaaatttttttatatagatctttttatattcctctttgattcactagacttcagaaaataagtcaatatgtgatatataatcaatgaggaaaagacaaatatctatattgttatgctatcgaatgaattcatagcataatttaatattttccatcattatacttcgaaaaataaatcaaaatgtagtatataaagggaaatacaaatttctacttggttgtgctatccaaattatgtatttttttttaaatactaattttaattgaaaagcagtacgactcaagaagatagattttgttagtgtcgtccacttggtttactggctctgttataaaaaatttcttgaagaaatcaagttgtggattgcatatatatgtgtattatacatatatatgtgtattatacatatatttgtgtatgtgtattatacatatatttgtgtatttatcaattcaagaaatgaaaaaaaaaaaatcaggtggcacggtataaaaggacgatgaccaaaacaaaaaaagaatcaaaatgaatccaatcatttgttatattaaaatctatagcctgtatattcttctgctatctcaaatgaattactgagagaaaatatttcctattgcatcctttattgagtcaaatctaggcaatagaatatttcaataaatatcatacaagttatatatatatatattcgtgtatctatgtatggtatatatgaaaaagaactctaaagtatgacaaattcaaatgaatagacaacaaaagattctaagactatctgtcatgtaaatatcgatatatgtatatcaatgaaaggctatttatcaatattcaagtctggagtttggaaataaccgaccaccaagcagaacaacacatatgttatacccctatacatatcaatattacttgctattgaaaggcctaagcgaaagctataaggctaaagaaaaatgatatgaactaagttcgatttgatcccattttgggtacgtaggcaacctaattgcaaagattaggtacaatcacaaatcctcaaaatttcaaatgaggtcattaacctcatcaaattccaaatgaggtcattaacctcatcaaatcctaaatgaggtcattcacctctataaaattctaaatgaggtcactcacctcaaaattctcaaagaggtcattaacctcacaaaaatctcaaaaatagtaattttacctaaaaattaaaaagtgcactaaaattcaaagccgtaacaaattaaatggcattccaaagaaaaagaggtcattcaccttataaaaaaatttaatactattgcaactacgtttgacttgattcctataaaaggatacgtaggcaacttagtgttgggttttatgccctaactaaaactcatttcaatataatcagatttacttattaatatagatcagaaataacatttaatgttgcatggttcacatgatttatttcatgattattatgtaca

SEQ ID NO: 308395 - DNA, 1611 bp, Cannabis indica
aaaatcttaaaaagaccaaaatcttaaatgaatctagcaatacgtggctcggcacgtacattcacctagtatcaataaatatgtatgcattggtatttaatattgaaaaatttacactaggcactatatattttatttttattatatttttactgctatgcggtaattattacttttttactgtcttaatatatattatccactaagtttgttataaaaaataaattttattccatttaattaatatgtgtcagccaaggtttattatatccttctgttattatttttgaactttgtaaaagttttaatgtgattgatcatatcacttttgtaacagttatttttttaattaaagttcatgattaaaagttgagaaaccttctcttacactattcattgtattttcatcttatttatttgatattgatttcattgttcttgttccatttcgccagaattaattgttattttctagatgtctcgtacttctatggtagttctatttgtgggtgtgaaagatggaggttataagtacatttattcttccttctatatatggttgtttttgtggtttttaattcaaattcgggtataaatacattttgacaagctcactagcaaaagaattttgaggtgtgtgggttattatatcatctttcaagaaggggatataaagccttcattattttacatttatttttgtgttgtgttaattttattttagtagtttttatttattcttattttttaggactgggcttgcaaatatagccactattagatctgatgttgaagatgtacaaaagatggttagtttttttaatcattttttattttgttttgtttgatttgttttagtgttgtttttcaggtattttgctaagtttatttatttgacatcgatttcactatttttgcttaatctcgccagaattaattattattttccaagtgtttttgtgttattgtggtggttctatgcatgggtgtgaaagatggagataatgttcttgatatttggtgtctacagtataaaagaaaagaaaaaagacaacaagtaaattttacagtgtgacagtaaaattataaatatttacctaaattctaatatatttgtaagttctcttaatcatttgatgaaatagttgtttgagttaattataaattttgggataaccccgattgatcacaagtaaaattcaccgtcaatattgaaaaaacgaacacaaattatagtgaagttttagacaccaaattgcttcaatataacactcaaaatgttattctatgttagagttgatggtgtcccattaaaaatagtagaatattataaactacacttttttttttatattaatataatacgtatgaataaatttttatctttatatatattaatgtgagatagtttaataaataatataataataaagaatattttttagtgtaaattttaatattgtgatgggaatagaaaaaaatattggtactagtctaaaattatattcttttagtattgatttaacactaaatttaatttttagcattaaaattagggaaaaaaacagaaaaatacaaaaaagaaaaaaaattacaaaaatactttgggcc

SEQ ID NO: 308396 - DNA, 1816 bp, Cannabis indica
aaggagtgaattggttgccaaaaacatccactagttttttccatgattcaataaatccaggggaacctttagatatcatcctcgagctaagcatataagcgtggtagggaaaattttgcaccggacgtcatctcttactccttgtagattagtctccacttcaaagttatgaatgtgggacaatgggtcttctttcccagtgtatagatgccagaaaggattcttgaactatggagggatcgatagatctttaattcggtctaagagcagtgacgtcgctccctttccatttcaaattttaacagctttggggtcgttcttcctttcaccaaggctgctagattgtcaaactctgtcctattgacaccatggtggtggttttcgtcccaataggaactttttctacccaatcaaggttagcgctagaagctcccaaattctacaaccatctcttggttaaggtgccatgcaagtctctcggtcttccaagtccatcatgaacccctgtcgacttatgtcttattttttgtctcttgacacggggtcatgaaggcaacattggtgattttttggattgaatagtaggtcgtcttgcgatgatgtgctgcgagggtagtcattctgaacattgtagtgactatttctctcgaaatagtctttaataagatcacaattgtgaagagaattgaatagattactcaagttcaactcttctccatgtactagaggaaagtactcatattgttggccatcggggccatggacaaagtaatggcacaactcgcctctctcatctcaaaaatactttcaagtatgaagcgattcattagtccttactcgtcggatctcataacctccagttttgaagtagagtctttgacttccccctttagtgtcagtagcaagtccctttccctttgaagggtctcgaggcctgatgttgttagagcgacaaggagagcttagtggaggagttctatttgttttctcagtagtttgtggtcattccacatcagggggagggcccattggttagcgtgcttaagcttgagccctttcaaactcttgctcaaggtttgtttccctctagggaggctcaatacctgttgtttgcttagtacttgcacggttactgggcatggtagtagtattccgtgcattaagggtttccccttgagtacttgttcccacgtggccaattggccgatggggattctctctaaccaactcagaaatacccctatgaggagtagtcttgcaactagagcagtaagcttctgtgaattgttgagataggttagttattcgttgttccttctcaattctccacaaaccagttctgaaactgcttgtgttatttgtcgagaggattttttagtttttgttgcaagtcatccacggtttggctaagctattcaacttgaggattggcctcctcgaggtcttctagttccacacatgtggttccttaggtggaatttgttcactagtttcaataccagtagcaattggtggccttaccagatgagttctgaagttggttttaagacatctacttggcatctgtgatgcaagtgcagtcccatcaccaactctagtgactggcatacccctaatctgtttgccagttattgtggttcttctttcaacatcgaggaccatgttgcaaccatcttgtaagtgatttcttgagttgtggctcccaatgaaagcacgaaaatattgacatagaaatctagacataaatatctagccacacctgcttggtagattagcgagaattgttggaatttcttttaccaggatcttagatcta

SEQ ID NO: 308397 - DNA, 3087 bp, Cannabis indica
ttttttttttttttttggactttttgaagctccaaagcatttgggtaatctttgaattttaactttcagctttaaaattttcttttaacaaaaatcagctttagtagttttcccgagaagctaaaatctaaagcagaagcatcatattgttgaagagccaacaattaagcataacaaaacaagccaaacaccctcaaacaatccagattgaaaaaggtgaaaatatgaaagtaaaaccatccaaatcaatcatagaataactttatattccaagtccaagacctcgggtaattgcattataagttatatattgatgcttgattatatcaaatccaaaacactttaaaaccttttctcctttcctagttcatggccctcaatattcaaattgcagtgtaactatttcaatacaaatacagagaagcccaaaatagttacatgctcacagctttgaaactgggaacttagggaaaatatcaggtgtaaatttctgtgctgcactcaaactgcccttaatcttcattaatcccctgcattagtacataaaaactcagatgagaatgaataggtgaaaaacacctaatgaggagttaaattaaaaggtctgacctcatgaaagcaatctggggattcatctttcctagtgcaattttgataaaatctttttctttgaaggaaaatgtagcatcaggcttttctccttccaatgttcctaaaatttgacaaaaacgtcagaaaaagcaaaaccctgttgacaagaacaattagaagttctctttaaaaacatgaaaccaagtaacagatcaagattttagtccaattgatcaagtgaaagtacatatttgatatcaattaattaccatatgaaaattttcaaacagccaaaacgaatcccaaatcataaaatacaaaaacacaaaattaattaataataataataataactaacctttgatgaccttgccattcttcagatcaatagtataacagacctcattgaacccaattttctataaacaaaaacaaacaaacaaaaaagcattaggtcatacttaaatcaaaattaattaattaattattattattgaaaaataaagaaaagaatataagacctcgggtgcgagtttgatctggtaaacgagattaattttcttgcagagctctttaccctcgtccgtttcaaagtgtttactcatcaagtcaaacaaagtctccggcttgagctgaggggtcgccattttctttactgaagtttctcaattgtacgacgaagaaatatcaaatatatataataagctgtttcgtgaccgaatgaaccttctggttctgccgatcactgattatttatattccaaaattaattaattgctttcgttattttagaggagaagggtgaaattaggtggttgctttcgtgtgaagataggagagagaagggtgaactgtgagggcacgcatttcgaaacaagtgtttttttaattaatatatcaaattaaaatgataaggttgaggaagttgggttttgtgttgattttggttttgtttcgttcaagttagatagttgcaggagtgtgcattagtgaatcgacccatctaattacaatccatcgttaaatattagatatttaattatgattggattgaattagatagtaatgttgaatatttaactgaattagatcggatccgatgttagacagagtgtccaaaaatcaaatattttaatttagtttggatgagtaatttaattttacataacttaaaattttacttttttaattagatagatctaattcaatccaatacatactgaatttaaaatattaaatggatcaaatctgatctaaaaatactagatctaaaatattaaataaacttaaattaaaccaataaatatatataaactacatccaatggatagaaccgatctactccaacatccaatggatgttggatcgattggatgactgaaattaattagatcggatggtaaaatctaacatccaatatataattggatcgaatctagataggtctaaaaatattggatatggtccaataaacaccctaaatagcttgacggatttttcatagaatatttgtgaattttgatatgtactaaatacaaatcttgatttgtactaaattatgttctttgaactttaatatgtattaaattgtgtttccaaaactttcgtccgcaataagtttctgtttataaaattggatagaagtccttaaatttaacaatctcaataatttagataaatttttaataacatgtacaatttagaaggtataatttaatacatgggaaaagattagcctaaaatttattcaatggtggcccttaaatcatattttagtttattttaatcaaaggcatttttgttaatgtaatgaggtgaagtacacttattgtggttgtttattaaaagtgtatataaaagtgaataaacttcattaagtttattttgggtttatctacaattattgtaatgtatatttttagtttacttttgatatattggtggagtgataattttttctaggttattttatagtttattttaaattgacgctttatttttatttttttgaaaaacgtgatcagaattacattaggacattctcgagaagacttcaacaatcggtgatgggacctcctcaaaccatcataactcattgtctagcctaagggcatgtttagccaatccatgggccgcagtattatctttgcgagacacatgagacaaaactgccctcgaaaatttagacaacaaagttatgacatcctctaacaacacacacactcattagcaaaaaccttcctgttattgatggccatagctacggagagagaatcagatttaaccgcttctaggagagtctcacacgaatgagcccaatttcgtccagtcagcagggcaaaagtttcagcttgaaaaacagtaatactacctgtaaagactcaaacaacagacaaacaaaataacattattacagacaggaaaacctactattcacaaattagagaaaagtagtaacaatacaaaaacactcaaataaaaacccctctaacaccg

SEQ ID NO: 308398 - DNA, 1812 bp, Cannabis indica
gtgtgccttggccatgagtctcaacacgagatgacacaggtagtcattcgtgggctaatttgcatacatgcatgggacggatgcacgctagaaagagacagaagtctaacatatgctactagtttggtggcttgtctcgagggtttgccaacataagtggaggtgtggtgccttgaggattagaccatggacgtacgagagacaatatcgaatggggcatgattagaagcgttggcacgtcaacttggtgttggcatctttccacacctgctactgtggtcacgagtgactaagtgagcaacggcattgggatttgccttatcatagtgggaacctatggaaattgtgagtatctttgctagagagcctcgatgcatggatgcactcatggatgcttgcgagcgtgactcgacgggagttattcgagagacagaagtgtgcatgagccacacggtcatgtgaaaaatgcgcccattgttactcgaacggttggaaggctggccttggcttagagaattcaaggtaccgcacgggtgttttactgcctaaaaaggtgagcctgtgacatagtgcaaatgcagttggatcagctcaagagcttgcccgacccaaagctctccgatctggaacttgacatggctcgagggttgcctttctttatgcacattaatgcattgctactaccaaccaagttcaaaatgccaacttaaaaaaagatcatttggctcatattaagtattttaagatccagatggatctgcaaggagtgatagacgatgtccactgcaggagtggtatttcaagctgtcccctgatagatttgattcctgggatgcttttataccactgatttttacacacacttttcatcctccagacaaataccttcccaattagaggacttggttgaaataaaacaaaggttgggagaaccattgaaagattatatgtaaaggttcatgactagagccataatggtcaaaggtctgacagaagaagggcagtatacaaccattctaggggatatcctacctctgaatgacctttggagagacatcaaaaaaagatcaaccaacaatatgagagatttgttagactgagttgacggtttcataaaacttgaaaccaaatgtccccaacaatacacctgccacagttggggttagtaatactgctcagtcccaagctaacaataataatggagggaaacataacaataatggttctggccaagaaaatggcaagaagtggaagttcagtaatccctctgcacaataacaccttcaggaaaagtagaagaagttcttcaccgtcctgacatacactccagagactatatcctgatggccacacaggccattatcccgtgcaaaaaggcccctccactgaagaaagacattagcaagtgggatcccaccaagttctactgattccataaaattttcggtcacgacactaatgagtttaataacttgaaagaagagatcgagttcctgataagaaggaataatctccacttacattggtatgtccaagctgaccaaaaccaggcaaaagtccaacaaaataataacaagttacccccactggtttcgagccatttacaagtcatcatcagtagaccccacatttatggggactcaaataaagcattggaccgttatgctgagactctccgtcacgagcaaagaaatgaagtcctggttatagaggaaagaaatctgaagcagccaaaggtagaagagtctgccatcaccttcactgaagaagatgctacccatgtaagtgttggatattattttaccaggatct

SEQ ID NO: 308399 - DNA, 962 bp, Cannabis indica
ttcctcgcctaagatcttacaattggcgggttacaaatatactttgataattacgtaattaataagttattccataaaaaaatattgcactgattcatgtcctccagccgaatttcggctataacagaagtcattatgcataaaatagggttgccattctccgctgaagcaattaacaacctgtttaagttggaacaggtcacctgtagtttcactcccctaaaaggtcaggtggacaatgagttactagccgatattatgcctaaacttgccaagccaaattcagaatgggacttagatgattttggaaacctttggtttgggcatactgacctggagcatgacatgaagtgtggatgttgtattgttttgaaaaagggatgcctattgatgtagggatagtcttggcccaagaaatttttgattgtacacatcaggaagaaaggaaactatttttgccagccactatcattgctctttgtcgagatgcaggcattccaatgtggtctgaggagggaacattgcatcttaaggggcctataagctttggcccatcccaagctcgtaaaaaatctcatggctcgacttcaaccttagtgactgagccttccatggagcgctttgctcactttgagcaagtgcagcaacaaatgcatcaaaaggaagaagaaatgtgtagccgcttgcaaaccatgtgggcttatgagcagcagcgagatgcgattatggagcgcacattcaagtagataactctgcgagtttttcccaagtaccgacaatttccgcagtagattctcaatccatggatagcttcatcaacatcaaatatggatgtaacacacggcgactctaagtaggggagtttcctattccataagctattttatattttctattgtgtgttgttttgtgtttgttgttggaaattattttaccaggatctcagatctactcacaagtat

SEQ ID NO: 308400 - DNA, 1636 bp, Cannabis indica
caaaaaatttatattatgactaaaatatatctctaaacataagtttttttctagttaatatgtataaaacctcatttgaattaattaggtcaatatttctataattaattaaaaataaatcgttagatgacattaaaaataatgatcacaatttcaataagagggagaacatatacgtactcataatatcaaataaagttcaaatagatttatatggataatctcatgatgttcagctaatttatcattaaaaccgatcgaggaaaagtacaatttaagattcaaatacattaattccatgagtcgtacataagtaaaaacaactcttattttctagaaaaccaacaccctataatctcatgtgccatgggatgtcacaagatattataactcattaatttctcaattatggctagggggctttccataactcggtggtgtcttaggcttcccgtaaactggagtcggtgttggcttaggcttgtccactggaggtggtttcacgtaaactggggtcggtggtggtttaggcttgaccactggaggtggctttgtgtaaactggagttggtggtggtttaggcttatcaactggaggtggtttcacataaactggggtcggtggtggtttaggcttgaccactggaggtggctttgtgtaaactggggtcggtggtggcttaggcttatcaactggaggtggtttcacataaactggggtcggtggtggcttaggcttgaccactggaggtggctttgtgtaaactggggtcggtggtggcttaggcttatcaactggaggtggtttcacgtaaactggggttggtggtggcttaggcttctcgaccactggaggcttagagtaatcagcgagagttgattgagtggcgaaaagtgccactcctaagagcaacaaaagaaaatgagaggaagacataatgtcttagttgtgttgtggtgagtgagtgagtgatattttgttgtactaagtggtttcttttatagtaccaaatagagggaaatcaattaatgtgtattcttgttttaggtgattttgggtcccattagggttgaaaattaaagtagagagtttggtttttgttgacggtggtgctatatttaggctttgaaatccgtctccaagatagactctcatcttccaaaatattatatttatctttatatttatatatatctttgcccatgaagaaaaaaaaacattaatacaatttttaatttttgtatatgttagtaatatgatgaacatggttaaaagtatgggcatgcttagttttgagtaaggattttattttatgttggggtttaattgtcataaaaactatttatatttatttagaacaaataaaattgtgatcacttttagtatatttataaattttgtcaacgttttatattcaagatccaagtatattgatagagatttttgaaaaaaatttcatcccacagtaaaaaaagatttaaatttcagtatgtgatgtaaaaattcttattgaggaatttttacaaacatactggattttggatcaaattttacaattttactgctatacaatttttttttacaaaatgctatctttttataaataactgtaaacaacaaaacagaataattaaaa

SEQ ID NO: 308401 - DNA, 1465 bp, Cannabis indica
attacattacatcaaaacaaataccacctaacttcgtaattgactctctaactaaccaactgaatgcaagactcaacttgataagaatagacaatcgtacattaacttataattacataaacaatcacactgtctatcaatataacctacaaaaaataatgaacaacaattttcatcaatactaattagcagaaaacgtgtaataaattagtatgttgggggacaaatatttcctttttttctttcatatggtagacaaaaattttctaaattctaagtataacgtgtattcttttgtcgtgcccaattttttgtttctttatgcccatcttccattaatttcctttcagaaaagaaatcttggtttaacaaattggtttcagaataattttaccaattagttaattttgtaatgattttataataatttacaaaaaaaaaatgaggctatatataatatttaacaggacaacggagacgcctattttgacaagtttgatggtatagtttcaataatgaaatctgatcagtttgttaaactatacattttagtggagtatttcatacgtgtttttttttttttctaattttagaactagctatagatacagtactgagagggactgttcattcgtattccattaattgtctacttttttttcttttttttttttcacataattcataattttattttcttttaaagggataagacagtattgcatttgtcttgctaggctgcttactatatttatcaatgtataaatggttacgtatgtctgaaacagacgtactgctttctgtagactaggtccagtttgtactgttttctccaccaataaacaaaatccctcaaattacaatttactattgtgatgttacttcttctaagggaattagtgatttagtgtgatgttattaccacaattacaaattttgagtttatttaacttgattagtaataactcttttttttttttgagggattgattagtaataactctgataacttgaattcctgtaatattgtaaagaagaaaaaaaaatactgtataaaacgcctcaaacaaaattataaaaaatttgatcaacacttaatttatttttttgtacttttcctagtgtttttttcttctgtactttaaaattagctttttataggtcatattccatccagtattgtcgttatcatgtatctatatatttaatattagttctaagatgaatcaatatctctttatcattttaatttgtttcattctttctttaacatggctcaatttttacaattatacatagcatttggtttcttgaggctctgataaggtttcattacaaaaatagttattatttataaataataacaatgacaataatataaaaataacgaaaatataaaaataaaaatagacaatgacaataagaataagtataaaaataaaataagaataaaatagtagaataa

SEQ ID NO: 308402 - DNA, 988 bp, Cannabis indica
aatcaaatttccctattaatattcatattttctcatttcgttgacagagattttcggtaacaaatagtttagattatgttgaacaattaatacaaataaaagaaaaaaaaaattacgtagttggagtattaatgaaccttagtgtacaagttatttttatttatgagtattttctttgagaaatgctaaaaggcaccaatggtgtcaaacagcctcctacgtgtcaataccgctattggtttaattaagtaccgggtcccatataatttaatataatagcttttagggagtatcgctagtcaatcgcaaagcgacacgtcttaagggtgctaggcaccactagtgcccaatagcaatactcattttctttcttcatatagtatttggggtatttataggttcatatataatggaagaaaaacaagcctctattggcgtagcctgtcgaaattatcctctgcacaaatttccaaaattttgggaatagagcatcatctcctatatggtatgggtgtgtctatatttgacatttagtgcaagatttttcttaaactgcggacttgatagctaataatgtagccaccaaaataatgtatgagatatcgtgaaattatagaattatgagtttaaattcttgagtacgtcttttcagaataaagagtagaatgttcttccctatgtcgtattaaatgtgtgcatagtaacttaccctcgagtggtgcgccatgcttcccaaagccctctatctcttctttgggtcgagtttcacccgcgaagaggaagaggcaaaactactatcctcttggagggttctctcggagatgactaatcttccaaagttcctacaaattattaagcttcgaatgtagtctagtataacatatctcgtactgagggtcccagtgacacatggcttattcttggaatgtcacttattgttaggttatttttagtattaattttagattaagtttagtatatttttaat

SEQ ID NO: 308403 - DNA, 1074 bp, Cannabis indica
ttaactaaattaaactccttaccactttggtcaaatccataatcatattaatattctcacatggaagtagacaagcatttaaaatgcacaagttcaaactagctatctaccacttctttttactattatgttccttttctttttgtactcttatgtaaagtttttcctaccaataattttccaaatatttctgcatgttttcattcatgaagggaatttcttttattttgcctgaaaaaaagaagaaagaatgcaatagtaatgggatatatgggtcactctgtgagtctctcacctaccttttatcgttacaaatatgatgatttaaattaaaggataaccgttttagactagataatactattcagttgattatcaaaaaagataatactatacacagttattaacttattgcaaacgacaaggaatgtaataaacttaatccataataaattaaagatgggcatacatgaaaacaactgctccattaagatgagatgaaagtttttccaaccatttgtacgaagggacccattatggacgttgagttaacatattatacattgataagcccatcaattatcgattggtacgtgattaattgtccttagaaacttaaattatttccaagggtctgttgttaggaagaagctagctagctacacaaagtaatacaattagcaatatatagggggtctcgttctcgcttttgttggaagaaatgactcatgttgatcaggtcggttctgaagcgagaggaaggaggcagccaccttatgcccccaccacttagggcatctattttgaaaaaaaaaaaattaaaatatagttaataataaaataaaataaaaaataatacataataccaaatacatgttacacggtttagtggtaatttaattagagtaatatctaagatgttcggtattcaaattccaacaatcttactttttatgagaaaattagactctatacattttttatattgtctcttttatttttatcctcttttttaaagtctatcatttttacttcttttttaaaaacattgtaccaattttgcctctgtcactt

SEQ ID NO: 308404 - DNA, 1634 bp, Cannabis indica
aagcctcccaacaaattaaaaattaaacaaagatgaaattaagaatcgagaagaaaatatctttacacatgtaatccacaatgatcatcagttcactatcgtcattagatcttcataatttaagcatatgatatataatttttattatggatgataatcaaaatatctttaatcatcaatcatatatctactatatatatgttaagaataaaaagaaaattatatatatatatctatggaaatcacgttgatgaatagtccttggccaaccatgaaaaaggattgcatcgaatacgtctggaaatatgaataatgacggcgttatgccaaaattttgcgagttccaccaatgcaaatcacgttgatgaatagtccttggccatttgctatgtggagaatcgacttgctaggttctcttccaaccagaaaaggaggggtcaaatacaccatagtggcttttgattatttcaccaagtggatggaagcaaaacccatgaatatgctcacctccaagaaggctctggactttatcatcaagaacatagtatgcattgtatttgacaacaggaaataatttaatagcgaccacttcactggcttttgtgtcaagcatgggatcatcaaaagtttcttagtcgtggctagaccacaggcaaacagacaagtggaatccgtcaacaaaatcttgaagaccacattgaagaagaaattgcaagcctgcaaagctcattggctggaagaacttcccaaagttctttaggcatgctggaccaccaagaaaacttcaacggtgcacaatccttactcgatggcatatggatatgaagtagccatcccaattcaaaatactatcctttctcataggcaagaaacttacgaccctacctggatccacgctctacttcaggaatccttagatttaattgaagagctccacgagaagtctcaagtccaattgaaaatgcataaaggcaaaatttccttgcacttcaattctaaagtcaaaagttggacatttgaagttggtgatctcgtcttgagaagagtgtttccagcatctcaagatctgggagtgggagtcctaggacccaactgggaaggaccttatgaaatccagcataaagtgggtaacagaacctatcaaatgaaaagactggagggattaaagattccacaagcttggaatgtaaaccacctgcaccgatattatcagtaaaatgggagtgtcaagatccaaccttcctttcctttaaatgcattttttacctttcccttttcatgcatgcctcaaggcacatatacaaattaaatgaaagcagaggaattgctcaaaaattgtacttttaaattttcagcaatattgttgttagttttgtagtactaaatcagttacgcagcggaataatattttttgattatcatcgtatcacatctttaggatcacaataactatatacgttaaatttgaaaaaaaaaaatttaacctcttaaagcctattagggtatccttgttttttcttcgtaagttgtattcttggatgatgacgaagaagtcacactgtagtcttccagttctttcaccacacacaagtactagtgtgggctagtagaatatagtgtatatggagttctta

SEQ ID NO: 308405 - DNA, 2255 bp, Cannabis indica
aaaaaaaaaaaaaaagaacaatggaaaatagcattgttacttacaccaatgaccaaggagagatcataaacgattttagtgaagtagtaaggcacttcataaagcatttctagggttatatgggaactagctcaagtcctactcaagacttaagaaaggatttcatgttgatggggaacaagcttaatagggagcagcaactgaatctgatcaaaccttttacaagcaaggaaataatgaaggctttattcagtattccagactctaaatctcctagtccacacagttacggagctggatttttcaagacaatgtgggctgaaattggagctgaattcactaaagcagtggagaatttttttcatgacaagtataatgcctcgggagcttcatgccactatgatcactctcatccctaagacagaaaaccctaccaaggcagtggagtttagaccaatagcctgctgctcaacagtatacaaatggatctctaagttgctttgtttgagactttctcaagtgcttccgggattgattaatcataaccaaggagcttttgtgcaagggagatcaatagctcataatgtcatgattcttcaagacctcttgaagaattacaaaaggaaaaacatatgacctagatgcataatcaaggtggacattagtaaagcgtatgacacagttaattgagaattcttagagacgcttttgaatgaattcaaacttttaggtagattcctctcgtggattatgacatgtttaaaagcgacttcttactcggtcttgatgaagggaagagtgtaagtgagtttccaaggcaagaaggggctgggacaaggtgatcctttatcacctctcttatttatcttaataatggagtacttgaccaggagattacttctagcagccaatcaacctaatttcagatatcatctgttgtgcaagaatctaaggattgtttatttgagttttgcggatgacttgatgatattctgcaaagggaatctaggctgtattcaggttgttaaggagattcaggatgagttcagtgcaacatctggtcttgctattaacatcaataaatcccatctctactttgggggtgtgaaagaggatgttaagcaagctatgatgacagaattggctctccaagaaggatcttatcccctcaattacttgggcatcccttgagaccaacaaagtggaaagcgaaagattgtggtgtaataatcaagaaaatcaagcaaagactccatacttgggctactaggcatctctcatttgccggtagggcgctcaactcattcactcagtcttacttgggctaaggaactattggatgagcatttttattttaccgcatagtgtcacaaaggaggttgaaaaactttgtcgtggattcctttggggatggaatgggagtaaaagtaaactccatgtggcttcttgagaaaaagtgtgtcttcctaaggcttttggtggccttggcttcaaagatggtatcaagtggaatcaagccattcttgctaaatatgtttgggccatttcttcaaaaaaaggccatcctatgggtgaaatagatcaataatatttatctaaagagcaagaattggtgggattatgagctcaagagtgacactagttggtattggaggaaattgtgtcatctaagggacaagttcactcgcgaagacattgctaaagctgggactggtacaacccgattcaaagctgctttgttatataacacagcatatctcaaactcattttgagttaagcaagtatattgggtgctcccttaacatgccgaagcatgggttcatcttttggcaagcaatcaactctcagcttttaactcgagacaagtttgagcaatttcatatcactcttgacagcctccattgcccggtctatgaagctgcaatagaaagcaactccctcttgtttttatattattggttttcttaacaggttatggagcaggtgtgcagttggttggggataaagagatgatcgactggtttccaaagctggaaacaatggctaattttgaacagcagggacaagaaacatcggatccatgtgtcaatattggcagccatgatttactgcatttggagcaataggaacaactgtctttttaacaaatttttgagtacaaagattacacaggatatcaaagaaacaatgtattatagattacatgtagctaaaaaaagaaatatgaaagaccatgagaagagatacatagaga

SEQ ID NO: 308406 - DNA, 1430 bp, Cannabis indica
aatcaaacccaaatatctgaagtacaatcaccacctggatatctcatttcatgggcaagagaagggccatcaggctcagctccaaaatccacaaagaaattcgggttgatagccaaacctccttctcggtatcaacatcgagttgcaacatgtgagaacctttctccatgagctcgggatagaattggcgatcccatgtactgaaaagcgagtttgtaacatagagtcgcttcccgtctaagctcatctgtatcatctgtggtccgcctctcaatttatgtccctaaaattttgttaagaaaaaaaaaactaccactctttaatgtcgcaatttatttggtagcaagtaaatgtgttacctaaagatatggtttgtacaataaagatgtttatggatcaatttgattcatcataaaagttgtctaccactcatgccatttcataaatgtacaaaaagactcgttattagtgcaaataaatatcaggtctaacatctgctactaaattatacctgtatttgtggaacatcgaactggaaagttttaccatcttctccctcggctaataccgagcttcccttttgaatttgtcctccaacccaaacttgtcctgtcaacttgggatttttaggatcctcaatattgtactgtcttacatcaccatgaagccagttcacaaagtacaaaaaccgatcatcgagtgagattagaaaatcagtaatcagtccaggcatttcgggaagaatccagttctgcaccttcaatgctttcactgatattgcaacctgaaaaaccaacaacaagaagaagatataatgccattcttagtttaaaagaatgaaagtctgttaagttagttatcttttcaattggcctatttaaaggctttcattcttctgggtaacacattttgtaacttgagaaagtgaattgacatagctgaattgtaatgagagagagagagatttcagaggtgttcaagggactaggctgttcaattggagaaagttcgaacctctataatctttagtgttctttgtatttgaattgtttatagttttgtactggtacacagttttgtagtttggtgtgtttgtgtgtagattagtgttgtaacaatttccaataatggaaaaacatttagatttcttatgtacaaacctcgtggctccaagagtcgtcggggttcttgaaaaacctcaccatgttacttgtcaatgcagctccaacaaacccggtatctttggaaggatcatgcaaaaaccttatctgtcaaagaacataacagaaacctcaaatatttcgtagttacaaacaaaagtattcggttattgcaaaatcaagtttatgtcagctcacctccaagggtaacatccctgtgttaccaagatctaatgtttgttttagttcaccaccgggccaactgtaaac

SEQ ID NO: 308407 - DNA, 2505 bp, Cannabis indica
  modified_base (61)..(61): a, c, t, g, unknown or other
  modified_base (63)..(63): a, c, t, g, unknown or other
  modified_base (65)..(65): a, c, t, g, unknown or other
  modified_base (67)..(67): a, c, t, g, unknown or other
gtagtacgtagtacgtagtacgtacgtacgtacgtacgtacgtacgtactctctctctctntntntntctttcttcttcttctttccatgtctgagctttattttattttagggttttagaaaagttggaatgacacaccaaaaaaaaaaaaagggaaaaggtgaaatgtaaccgtttatgggttctgttctgtcattattttgccgttagttaggtctgttgttcgagaaaatgaaaaagaaattagctgagtctacaatggtggtgttggttgcagacctaactgcttaacagctccactgcaacttcttcttctacctctctatgttttgtatctttatgtatatatacagttgtagttgttgacatcgtggccgttggattacgtacctcagttttttttgacggttgggattttataatttagtacgaataattgaaatacagttataactgaaactaactatttttttttttagatttattttcataataataataataataataataataagctgtccttttttagtaatatttctaggtaaaaattaagtgtcactgaattctaattggatatgttgaacgctgggccatttttagcttttaaaattgggataattaataaggcactattttattttatttctttgtacaaaaaatacaattttacttctaaagagttagttttacatttttacagttattaaaataaaaaaaaatagtaagaatatttaaaattttataaaatcgtatttttattatttttgtgtatttgtaaaataatctcttttaaattcttttggtgtgtgttttcaatttttagaattgtgttttcaagagttagagattgctttatttttagactgcaaaacattttttttttgcatttttacaaaaatgtaaataacaacccagcaattaatagagcaacttaaatcgtaactcaaatttatatagcaacccacataagaactaccgaagaaaccaccgaagcaacccaaattgtagaattgaaaaaaaaaaattaaaaaatagtatatggggtgattctcctttatttttactaaaaaaaactttaatagtctacaccataccgtaacaagaacccaccccacctcagattttgaatcccggacgcgaactcgtgtttatggtcagggtttgggtctagatccaagtctgtgtcgggggacagagtctgaatttgaggttaggaccagatgcggggtccaattatagggccgagtacggggtccaaatcttagtctaggtccgaagttgggtcaaagtatgtgagccaaaatataaataatatgatgttacacaaaaaaaaataaaaattattctctaaaataaacaacaacattataatgttttctgtttctttttttaatttttttaaattatttttaaaaaatttaaccaatcacactttatttattttaaaaagttgtaacctaatagttttagccaagcaatctcatagctacttcattattttttttatagaccaatattagattttgcttttgctggtaactttatttagtcctaacctaaaggaatgtttgaagttttatttgttgaaaaaactataattagttttggttagttgcctttgaattattatattttttcttcttttaagtcgagatatgaatgattttttttttctttcgttttttttttcttattattatttttatttatttttatttttttggtacaaagtttcttaagcaaattattgttttttattgttctcttcctttttcggtaaccacaataaagatgtaaaatttagctttatcctattcctttccatttgattcataaaattattatagtccttaactaatatgtttcataaaattatgtaaaataaaaaaaaaaaaaaaaattaacactttaaaataattttatatatatatattattacagaaatccacatagcagcattatgatatagttcctccaaacgaaaaggtactctaaaagttattcttggaaagttaggtatctcccgaatgttgttccaggacagctaacttgtccatcctggaaagagtcttgtggaatgatagttgagtccagaaggaagttcccggatgactatcatgtccactctgagttgagccttcctcttctgaaaaagagtactagacaactagttattctccctggaaggcagttttgagtcgactccatctggttctatcctatctggaagctttttcaacgaatgcctttggtctgtgatcccaaatatactaagactcaaattgacgtggagatctcgctcgtaggaaagtttgttaagttagttattgtttaactaatttaacaacttcgtctattgcagccaccaattttaggatcttgatcctaaggctataaataccactcacttaagcatttgaggaggacaaacttcattcagtttagaatgagattgagagtttgagagagaaaagattaagaggtagagagagagagagaga

SEQ ID NO: 308408 - DNA, 1992 bp, Cannabis indica
gcaaccaacgaaacaacttaaattacaacacccacatagcaaccatcagagcaaccaaaaccataaaaataaaattaaaatatggtacataaaattattctcctataaattaatcaaaataaactattattataataaatatagcttcatacagttacaacacctcacatccgtcatcatcttaaatatgtgcaattcaccaaaacaaaaataaaacattatatatttattgtaatacatagaacgatcaaattcaagtagtgaatgaggatattgtctcttcatctaaggatcgtgttacacataaagaagggatacatgaacttgatccaattaatgtagtggaggcatgagattttagtacgttctctaactcaatggctatttctttcatcgcaggtcgattctttccagccaaactcaaacatctataagcaagattagcaacacccttcaacgattcaaaattacatccttccttaattattgcaggatcaacaatttcaagaagattgtttgcctccatacactcaatgaagtaagtcactacactcatactaccttttcttgaacttgtccgagataccggcttttgaccagataatagttcaacaataacgacaccaaaactataaacatcactcttctcagtaaattggtttgaacgaaaatattcaggatccatataaccaaatgttccagatactaaagttgttaaatgtgtctgattttctgataatgacctcgaagttccaaaatctgccacttttgctcgatacttttcatctaaaagtatgtttgtggatttaatatctcgatgataaataggaacagaagcagcagagtgcaaatagaaaagagctcctgaaacttctgtagcaattcgtaagcgcatttcccatgtaagttgaaactcttcatttgggtcatggagataatgataaagtgttccattgggtatgaattcgtaaactagaagaggaacctctgtctctaagcaacaacctaataatttgaccacattcctgtgattgatttgtgaaagaatgaaaacttcattaataaattctgtgacttgacccttgcttcctaatttagacttttttacagcaacaatttttccatcttccaacattcctttgtagacagttccttggcctccttggcctaaaactctgtttgcattgtaatgatctgtagctttttctaactcctttgagttgaacagtttggttttatgatcaacattaatcgcttctagtttaacacaggtgatagtttgttgttgtaataacaatcccccatttaatttaaagaactttttcctacgtttggtgtcttctcttctctttattaacttgtataagactaatccactaaatgctgaaagtaatgctccaattccactgctaactcctgcatgaaataattaactcaatttaaagggaaaaaataatttcatgaagaaatggtactttttctgtcatttgtcatagttttacaacttgggtcttggggacatttatgccttggttattttcttaattgttttgttaagtgcataatgaaagcttacttggatcttggggacatgtatgtcttggttattttcttaatgttttgttaagtgcataatgaaagcgtagtcttataacaacattttatattataaatatgatgggatgtttctacgatacatgctccttacttgtttcgatatattgaaattttttttagtccaagcatgttatagttatataagatgttttataaaatttgagaaatttaaaataatttacaatataaaaaataatacttaaatagtctatttcacatgcatataaaataattttgtcatgcatgtaatacaatgtttgaactttgtttttggcttgttaatttattttgaatttcttaaaattttacagatgtcttaaataatttcaacgtacatgatcacagaaaaaaattgattaaaaaattatttcggat

SEQ ID NO: 308409 - DNA, 2801 bp, Cannabis indica
ttattttgaatttcgacttcaacctacaccttggaatctggacccaaactccaaccaagacaagactcatactcgaaccccaacctaggacctaaaccccaaccccaactcggatccaaacccagatcctggacctagatctcgacccaaacctcagactcggacccaaaccccgaccctgacacggaccccagcctagaccattgattctgaccctagacccaaacttcgaaccccgatcccaacccgtaactagaccgcataaatagaatgaaaaaattacacaaaaataaatgtttctcttggcagagaaaaacataaaagccattgcaaaagaaaataatatatcacttcaaagaaatttgcgcattgggtgtgggtcccaataaattaagaaaaaaatgtgaaatggtgaaacggaagcagtgtatatattactgtgaattcacgtgggattatttgattgcattgacagaaaaagacagcaagttatcacagaggatcccggtcccaatcttaggccatctttatttttcttaagctatatcaaccgaaaaaattaacaatgatatatataagtaataggaataacaagcgcatattatcagtggaagtaacttcgctctagatataaaataaaccaaaatgagtattacattacatggatgtatagagtaatatttcatagctagtttaggataatatactccattaactaccaatctaatttctacaactaatacaaccaaaaagaaccaagtaaccttagaatcagcattttaatcattcaagcctctgttcccatttcatggcgcttttgtctttcaagtgagaacaaaacgacagtgaagaaagcctgccaaattacactcaaatgttaaaacaaataattctaacaaccaacaacaattatttaactaaatccaaatgaagataacataattaaagaaagcttacttgggtcgttgttgattaacatagcagtccctccaaaactacaagtcccaccagtcctcttgtgcttctgccaatagctattgaaagcataagaagcatgagccacaacagtatcgggattataacaatttccttgtggcattatctcattacaatcagctccaccttctccacaagcataatccatggcagcctgaagtgtatcagcagggacattgggcttagccacgcaccaaagcttatggaccatccctatatggggtgaaggggcacctgggtggtatggtgatggatcacaaggaggcaaggtgaacccaaatggtggactagctgattcaaaagctggtggactagctgctggttcaaaaacaggggaactttctggtgcataagagaaaggatagtggggtggagagactatttgggccagtggaggagacatcatctggggtggagaggctatttggggttctgaagattgagggggtttggccgcattagaaggaactgaaaatgcaactttcggtaaagggtttggtctgactggtaatgggtccaatgcatctggattcaaagatgagagctttctactcatgggtttagtagggttgttattgactatcacattgaccttgttgagctcaaaaagtccaagctttttcatgcatttggaatgtgatgagaccagattagctgtttcagctggtaaaggagcaaactttggaaaaggtggatgtagagagtaagttgagtttgtattctgaagaaactccagaaggggtttggtgaatctttgtgcaaactccccattaaagtaggtagattctgggtccaaacaagcagatgaaaatacagctgagactttgatatctttctccaaaccccaccttgtaagggaatggtgaatgttctttagagatggtagtaaaagagaaagcttatgctcttgacctttttggcacataatagtactgccaacaactatggtggtgaaccggttggcagggtagtaagccagaacatgatccctaagccaactctctgccattaaaacactgcttgaaaccccatgaaggtctccactacttacagaagcagcaataggtaaactagggtgagacgacaccgtttttggcgcttctggagttgaaatgtaaaggttaaggagctgaacagattcttgaccagcacctgcaagagaagagcagccatgagaataataaatgatgaaaaaacaaacccagaaaaggaaagagaaactgtacaaatcgtagagtaaaaataaattcaaaacaggtaagagaagtagtaagttgcttacttgtaagacccaagaaacagaaatataaaatgggaaagatcagcaagaccatcttcaacatttttgttaagtgttacaatactgacccaggccctgaaaaggaaagatgacccagaaagctaaatatagcgagcttcaaatgcttaaaatgcacagaatgctatcatatatgctttacttacagtgagatactgaagcaaagaaaaggagttaagaggacaaagcaaagcaagttgttgatactctacaacgttctctttctttttaccacttgtaaatcgtagtgaaaaatcttccttttttgttatactgtaacaagaaaagaaaaagattttaattttagctcttcaagagtacaacggttacaaaagccaaacattttgtttgttcagaaaagtgaaaaataaaaaagaaaagaaattgagcaagggttttggtttaacgtttccgtagtgtcccaatttacaaggaggccatttgccctttcagctgagtattgagacacgtggcagaagattaaaaa

SEQ ID NO: 308410 - DNA, 784 bp, Cannabis indica
aaaaaaattgtagaatattttaaatagttatacaatgtttataaaatatatatagtgtaaatatctacaccaaatcaagaacaacacatcaacaagaatattagaatcaaaacttaaacaaaacagtaataaaaattgcaaaccaggattactaaaaacagagtttttgtgtctaatccaaggggaagaacaaccacaacaatggcttagaattttttaattgaatctccaagagaaatgttacaactcgagcttcaagaagcttattagcttcacagattacaaaacagctcatttgatgagaggcaatcatttaacaaattgctctctttaacatcctccttctaattcttgttagaaaattgactttgtcaacaattttatttgaatgaaatttaagtgggtcatttgtaccccattgtttgtggggtaaaaatgatcaaaaccaaatgctatttatatagcctaagaccacctatacaaacttacattaattattatggttggactgaatatttttaattatattataaaatttatgaaataaattagacttttttttattaatacttcttagaaaaaaaaaatactgctttcaagcttcaagacgaattgagatagagatggagagatcaacaatgtagtctctgattatatttataacggtctcataataacaaaacacaaggatgagattgagaaaataaaatgaaaaaagagaaaagatttttcaaattataaaaatagaaaatatttagaagtgttttaaaaataataaaaaaaa

SEQ ID NO: 308411 - DNA, 956 bp, Cannabis indica
aagaggaatgtgctactcctcccattgcgttttaagatagaactccattcattttatccccaaattctaacactctcttctcttttcggccccagaaaaaaacctgatcttgaattataccaaaaataatataatatttggtggtggtgctaaacattatataggtgctctcaagtatttctcttaactaattggcctattttgggagtgtggtaaaatataacaaagtactatttatttgacattccatagtgatgctataaccccataccaaacatctcctagtgtttgactgaaatagactaaaaagtttggatatgtcctattggtcaacaacaaatactagctagggtgtcgatcaccacaaattatgtaattgaataataataataagataaaaaagcaaagtaatggttgaatgttcctatcaacaagaaaaaaaaaaaaaagtaatatggttgaatgtatgaatgagtggggccttgtgttttgtacttgcactctctcctataaaagcacactctcactctcttatcatttcttccattccacaatcaacatcttccccaaatcctttcattcatttccagtcaaggcatgtattgtggtggtagggtcttaatgtctattctctaaaccagttttcacatacttcctcatgaattattaaatgaataattagtaattttgtctactctattccacaatactgattgtgtcattaaattatacaacttattaaaagaaaattctgaaattttaaatatacaaaaatttagtccttctgttaaatcatatctcattattccgtttaaatcttgacgtgtctttttaaattagtaattttgccccatacattttgataaatataaaagcctatcctctcaaaataaaaataaaaaatatttaatatttttttagtaaattttaaaaaattaatttatatattaaaaaaa

SEQ ID NO: 308412 - DNA, 2468 bp, Cannabis indica
ttccgctgcacccaatgtacgatttctgatacttttatgtgtttaatttttatcgttttagaagttcatatttaggttgttaaatcaacatacttgtgagtaaatctaagttcctggtaaaataacttccaacatgatcttcatttgttgatccatccaatcctagaattggaaattttactgctcaaatgaaaaattcacaggttcttgagtatcttactgattgtggtgaaggtgttagtatgctcttgcacttaccctatggcggctcacaaattttgtagcttggtatcatctccaatcactacttaaggatctccaacatatggattttcaatacttagaccagtctgcccagcctgagcaaggccgatctttaattaatttgggccctaggaaaactaatttttttgggccttttttataaaagtaaatagtattttcaaaaattattaaaaaaaatatgtatattaataaaaaaaaatcatttggaccccaaataggagtgggcactaggccctgggcctgagcactggtggtcctaatttcctgtacgcctagagtgaactcagcgaggggttgtcactccttgtcctgttaattgggaacctattggaagctgaggaatggtagggtcaggatctatccttactggatctctttgattcagagaagttttgcacattaggacctgtgaccattggatcagttgtctcattgggattacccctccgtgtttgtacaaccttctttgtgtgtcctgaaaggattcaaaacaaaaattgtgttgtcttttgctcttaatgaaagtactaaaatattgatctcgcttttagccaacgacaatgagtcagttaaagcgataagaaacaattaataataataactaagcattaagaacacgaatttttttatagaggttcaatcccgtgatagtggtaatagcatactctcctttttattgtattaacttgtgaagaaaaaagtaaaaagttctttatcttccttaaaagcttttacggagaatttagtagcttgaatgctctattgaataaatcatttcagatccctgaatagtgaaattgactccaacactatttataagaaataattacattaatttagtttctcaaaacaattcaaagaaaatgataaactacttactttcccataatacaataatcacatatagaaatctcatgaaaatagggatttaattgataaataaaagagaaaagtatttttaaggctttcactatcgcatttatcctgggtagaatatgcagagtgcctgtgaggtagatgctagccagacggtataacataccttatttgaatattctagctttttattcaaatcaattatttatgaatgacatattactttggacggtacaccatggggcatatttcctgtccaaattatgacatcttcttcacgtgtcactcagattgatgtcacgtcaccctgtgtgaaaattggaataacaaccaacgtatcttgtgagtcaattttgagctcgataacatcagaattgtgctattatcatttgaaaagtttagatctgtcttgaaaagatatttcaaatgaaaattgaaccaagtcatttggataagaattgtgcgagttatgcccatttactgaagggttgtaaatatattttagctccaaattcgacttgtgccacatacttacaagttgtaccacatcattgtgccaaaagatggcacatgtcggccatgcatgtttttggacactttgggtgtgttttgactttttcttatggtgagtcatattttgtaggttccagtgtcttgaaatctcatctcgacatctgaaaccttaactagagacctcttttggtgccaaagatggcacatgttggccagggcttgtgagaagtcttttatggtgtttcttacttagtttagtcatgttgatgctagaaaaacacttcggccacattatttctcgaccaattcgtgggagagacctgtgccatcttttgggtcacaaaaatgacacaggtcgaccattgaggttctccacctctggacttatttttggtaccttgatgtagaaaaattacatttggcaaagaatctctccgcctttccttgtggccgacttgtgccacttcattctgcacaaagatggcacgtctcagctgggcttgaaaatgaatgggaaatggttcattttaaatgtgttatgctacttaatgttgggggaaaattttggactagtttcctttggtggtttgagagtagagaatcatgtcatctttttgttgcaaaatataacacaggtcagccatgccatgggtaatggcttccttgtgcaactttaactttatgttcaagtttagtatttttatgcctaaatgagttaagttcttgttggattccttgttggattgaggtctctaggatgaaaacccttgagcgggcccataaaccctaggttg

SEQ ID NO: 308413 - DNA, 1964 bp, Cannabis indica
gagctgcacagtatgtttaaaactcacgtaatacgcctatggtagttagggtgttacaagctgactaggattaaccactaacagttagagctaattgttttaactaactatcaactctaacacctcctctcaaactcataattgaaatactctcaattttgactttgttcctgaatgtagagaatctttggctcgaggttgctttggttaggccatcaactaactggccatcaggaattagtgaagatggcttaaatctttgagaaaaaatcgagtattgagagttgagacaaggtctgtaacaacattgtgatcaatgcgtgtgatgacaatgtcatccacatagtaccaaagtgacagaatctgcaacatgttaaataaacagagagcaatctaaattagatgaaacaaaactaagagacagaaggttattttggagtttgtcaaaccatgctctaggatcttgtttgaggccatagagtgctttatgaagcttgcaaactagatcagttttaccaggaatttcaaatccagaaggttgcaccatgtacacctcttcttgcaattctccattgaaaaatgaattgttgacatctagttgtctcgttgtccatcctttagacaaggtaagtgttaaaaccactctagtagttactggtttgaccactagactgaaactttcagtgaaatcaaacccagtatgctggtgaaagcctttggcaaccagtcttgccttgtgcttgttgatagtgccatcaggattttctttaatcctgtaaacccatttacatccaatagccttcttgcttggtggaagtttaaccagggtatatgctttgtttcttgttagggctaagacttcatcagccatggcattgttccactgtatttgttgcaatgcttcatgaagtgttgtgggaaccctggaaactaagtgactttttggcttgtgaatacctgacttcgacttggttttcatgctgtatttgttgcgctgtttaggagcattttggcaccctgcaatgttagaaagtggtgctaatattaaatgagcagtatcatgtgatcctggtggtgccatgtatgttgcagggtctgcttacagaggagtgctattgagaacttaaggtaaatttggtggaatagctggtgtgagattaagtgagataggctactcattaggcatatcaacacatagtcttgaagattcacctacatcaaacacagatggttgacttggatgccaactgttagacataatatcaagagtattgttgtttggctacacaaatggttcattaatgtcaattaaaatatgttggtcaatctctgaactggtgtttaacagatccgtcagtgtatggtggtttaaaatgaggacacataggggtaatagctgacacaaaaagaagttgttgtttgttgaaaggaattaagactggtttgagcactagactgttcataagggaaagagaattcttcaaagagaacatctcttgaaatatagagtttgccatttttgtcaaggcatttgtagcctttgtgattgaggctatagcctaaaaatgtgcatggagtagatttaaattcaactttatgtttgttgtatggccttatatttggaaagcacttgcagccaaatgttttaaatgatgtgtagtctggtttaatgttgaaaagggtttctaggggagatttgttgcctaacactggagtaggcagcctattttgaatgtacacagcaggcctaaaggtttcatcccaaaacttgaggggtagggaagcttgagctaacaaagcaagaccattctcaactatgtgtctatgtgatcatttatttatttatttgatttataaattcatccaaatccttatcacattgatattcttatttattgtgtcatcagcacagtggaaagtaatcaaagtatacagggtttaactgataggataatctacaattt

SEQ ID NO: 308414 - DNA, 1642 bp, Cannabis indica
aaaaaaagagagagagagagtggggaagggagtattagagagggaggggaggcagaggctcatagtatgtgtgggttgtgggctgtgtatgtgaggtgggtcccacctaagcaagttgatggggttcacatgattgtggaccgtgttttggttaaattcatcccccctgaaactttgctgcttctctgctgacccccaagcatggcctcatctcctctcctaggccttctttttaattcaaattatatttatgcatatatatattcctcccatttttttgcttacattttcctaaaatatataaatcttatctgatcttgcatgtttcatcaaaatctgctctattatttggtgttgcttttattgcaccaattggaatgtagataaacattaggtacttgggaacagagagagaaggttttgtatgaataattttttatacatatatatatttgtagtttatggatattactactactgctacaactagtagtactaaatacaagtactaaaaccatgccactaggatgggaatgtggggctaatgttttaataaggaggagagggagaggtatggatatattggataggcattgaagacaaactactaaggctcatccaacaagaaattccctctcttccttttcaatcttacctggcatgatttgattcgtccatctctacttttgtttgtcttattggctaggttcaaccttagtatctcaaatttttcatttatcctttaatatcatctatttatctatttttattttcttattcttcttttatttatatattcttttatatttataatcaaataaaaaataaaataaaaataatcatgcatccctccataatttccaaccaacattgacatttctccctccaagtgggggtggtttccctttgtttctctttacccaattcattgttcaattaatccaaccctttgctccctcaacgcaaatgcaatgtttggaactgaatctcaattatatgtttcatccctcacaaaaattaaaaaacaatgatccaaaatcggataagtatgaagtacactatcccgtacaaaattaataataataacaaataaaaaagaaattgtagaataaggattaataacactaaagagtaggggtgttcattggatcacatccaatgtttttaggcctatccagatccgatccaatcatatattggatgttagattttaccatccgatccgatccaattaatttcatcatccaatcgatccaacatccattggatgttggattggatcggttctatccattggatgtatttcatatatatttatttatttaatttgggtttatccaatattttaaacctaatattttttggatcggattggatccatccaatattttagatccagtatgtattggatcagactggatccatccaatccaagaaaaaaagagtaaaactttaatgttaattttcatatatacatataaatttgacgtataacaatataaaatctaattactcatccaaactaaatgaaaatactaattagttcgattggatgttggatgtattggatttttagacaccccatccaccatccgatccgatccaattggatatttaaaaataacatccaatccgatccgat

SEQ ID NO: 308415 - DNA, 1491 bp, Cannabis indica
aacactcttaactgtgaacttcctgtcagccgcctccttccatattaacatgtcattatgatcgtgaggaaggcgcttgatagctccaattctttcacccaaagtatccccaaacatctctttaagtagctcaatgttccaactcccattgtcattagtcaagtctgctacagatttgggtttggatacctcggtttcacatggttgaggaggtccataaaatccccgtaatcaagccatggaatccatggttgtgtccagacatccaccgagttacctctccccaccaaagtcaaaccccctttgcgaattagatctctagaattcaatattcctttccaaaaggctgaatcactacctcttgctcaagtactccaaaaggactcctttttgcaatatttttcagcgaggcaaacaacccaagctctttcgattttagaagcaaactgccaagccagtttggccaacaaagcttaattcatatcctttagcttccggaaaccccaaacccccagtggccataggagaacaaagccgatcccaccctaccaaggccaaaaaatgatcctttttagtattccctgtccaccaatatttccttatcactctgtcaatttctcgacaactagagaccagaagcttgttagtagacatcgcatacaaaggaatcgagagggcaactgattttaccaaagtagttcgccccgcgaaggaaaggagtttagatttccatccttcaatccttttcaaaaccttatctttgaaatacaagtattcttctctcttcttcctcttaaaaacaaagggattccccagatgcttttcttggccatcacactcctttacattcagaatgttgaggatgtcgtttttatgagcacttaccacattctcagagaagagaacacttgatttcaccaaactacactgctgtcccgaccacgactcgtatttatgtatacattccaggatattggtcgccatcctcccatttgctcgcgcaaacaaaatagtatcattagcaaacatcaagtggctaattgccggggctgttctagagattgatattccatggatctgacctctaatttgctgtctaagtatcagctttgataggacatcatgacataagaggaacaaaaaaggagagagcggatcaccttgacggagaccccgttgaggctcgaacttcttttgcggaaccccattgattggaaccgagtaagacaccgtcctaacacactccatgatcaacgcacagacccgagtatcgaaccctttacctttgagcacttcgtgaaggaaattccattcaattctatcataagccttaagcatatcaagcttaatagccataaggcctcccttccctttctttctcttgatggtgttaaaggtagggattgggattgggtgtttaggttgtatttaagtgggtatattagtcatttactttattagttaataaaaaaattaaaataatttattaga

SEQ ID NO: 308416 - DNA, 1449 bp, Cannabis indica
aaaacaatcaaacaagaagcaaaagcatcctagtcaaagacaaaaaccacattttcctctcgtaactccctcccccacaaaatcaatctgaattaaagctcaatgtaagtaaatcattcaagagactcaataactaagtccataataagagataagaaaatagccaaatcaatcatctaatcgtgataagcttgacaacccacacatgcaagtggtttaggcaaacgccattaaccaataaaaagactttctttaccaataacattttgttaaaaagagaaaacggggcataagtaattacttcaaaagcggtatcgaactgttcacaaggcactgcttcacaatttgggtacgccttctctgcagccgactcactatacgccccacgaacaccctaatattccagcaacatcaatcaaaacaaaacagagactataaaagcgatttacaaaccatcccaacatagattttcttgagcttaaacatgcagctatgaacatacctggtaagccacacgaagacgagatccatcggatacagaacgagataactgactcgaagacaacggccctaaaaataaaaaatcggcatttaagaaaaaaaaaacatgcaatttccaaatcaatctaattccattaatactaaaaatgaatcatactcggaagagaatgcaagtccttggaaacaacgtcttcagagagaccctgtaactgaagagccccaccaccggagaggcggttccggtcatttccgccgcattcggcgcgtaccgatatcagaagagggatgccacgtcgtcgtttggggaaatgcagagagattggtgtgggggcgtgattgaaagaggagaatttaaatagtgaagaagatattggggatcgagctgtggaaggtgaaggtggcggtgctgtggtggacgccgccatggatgtggaatgaaggttagagagagaaagaggagagagagaggtttgttatggaaaatgaagtaaaagggttttaatttaatttaattttattatatgtggaaattgtgaattgaatatttaattttatattcgaatcgagaagttaaaagccacgtcattttcttctagaagatctgaagtatttcctggatctaccgttttgcttttcctgaaaaaagcgaaaaatttattaaggtgaaataggtgagcacatggagcatcacttcccacaaactaatgattcatcctgaaagttattcaatccaatctcagctgatctaatagaatcgaatatctaattataattcgattgaatcagatataaattttgaaaattcaattaaatcggattgttaaatgtaaaatttgatttagatacgccactaaatatatatacattgaacacatgagagttttaaatataatttatatatttaaatatattttagggtaaatactatttttggaacctttctgtttt

SEQ ID NO: 308417 - DNA, 1721 bp, Cannabis indica
ttttttccagcattgatatgtgctttgatctccttacttatgtctagaaatgccacaatatttccagacaaaaacttttctttcgaggtacgtacacatttaaatacaattgaaatctgctgtgctttcttctgtgtttctctttcaatttgacaggtgactttttgtgagtgtttgtctcaatggatagatatagcaactatgtctacaaacataaattaaatgggaagaccattccttatatttatactaattgttctgccaagctattctttcttttttttttatgctaaattcaactcctaccactttccaccggatgatttttggtttgttttgggcaagagaatgaccattatttgttcccgggttgtttttcaattatgctttaatattatttctctcagtttaaccaacatcaactgaatgcgagtatcgactagaatgttcatgttctaactctctggaaacgtgtttacaggtttagatagtagtttctatggctgttcactattataaagatcattatatcaggtttcatctattttctttgttagtatctattatgtgagatgaaaaaaaaaatgatatacaaccttaaacttcattacatatttatacaaaactaggaatctatcttaggaaagtattcaattagaaaactagaattaagctcttttgcttttattatatgaactttttaattttcggtatttagagaaattataacccaatttattatatgacagtttatattatagttatagtagggatcctgccaacattcgggtaattctgaataatttacaatgtacaaaaataaaagttaaaaatattcggctacacgcttataaataaacaggtacgcctggtactcacttaatttgaattttatttttggctttgtaaattattcataatttcttgagaatagacaaaatgcctacaataactataatgtacaccttatacaaaaaaaaattggtttacaatttttctatataaattaaagttaacactcctccttaagttgaagcatagatattaattatgcccaacttgttataaagataatcactctaaaccccattgaaagacttcgtaagatgccccctttgatatattttgtaaaaatcaagccttgttgaattttcacatgaataaaatgaaaatcaatttcaatgtgcttagttcactcatgaaacatagaattagaagtaatatgaaaaacaactttgttgtcacacctcaattttgttcatattgaagtcctaagcactgcttcaatcaaaattttatacatccacattatatgaaataaatgagaagcaataaaagaagaagaagacgaagacgataagtcgttatatgaaatgaatgaagaaataggataagtacactagagttgacctttgtgcaaggcaatagaaaagtcatctcttggaactagattcttttttttcgaaaaaggagaagagatccttaagtcattgacaggatcctccccgaaatatattaaaagtctcccttatggtggaggaaaaccataattacaaataataacaaaacaaaaattctaaggcaagagtattcccccactctgcctcagaagaaaaagaagtaaatacatccacatactggccctatacaaatgaattccattctctacacaaatctaaaaaagataggtcctcaaaatgtttagttttaaagacccaagt

SEQ ID NO: 308418 - DNA, 1951 bp, Cannabis indica
gtataatatgtctgattgctgacagctgcaatatcttatgtctgtttgccaaagtcatttagccaaagagtatacatgcaataaaaataggcaatgttctcaaccaaagtctccccgagagaaaaagcttgagttcttccctcaaaaactacagaagtgaacccggtgataagaatcacgtttagcaaaaacttttttagaaaagaaaaatgcacctgaatcccttctttgacgtctccgcaaccttcatgaaaacttacccaatcaagttggataacaggccggaatgaaaggctgacaaggaccaaagtaagaaaaatgtccaaagcaatcacagacatcacccttggacttgaccttgtcaacgagccaaaccccaaggagaatgcaggaaattatgaaggaccttgtttcgcagagaagggccatctcgtagccaagaaaataaccatctgggtgggtagcatgccaaaaagacgttacggcaccgagaaaggaagggtcaaaccgaaacgtagctcctcaatctactaggaggcaatcaagactaaaagaagaaagagtgaaacactggccgttggaaccaggtgtttcaaaaaacacaaccaggccctagacagcctatcacaacaagtctccaagaaaggaacagaaaaatgaaatatcctattctactactaaaaagcccctcgcggccagggcaaagtttaattgtctccgctgctaaaaaggtgtagttaaaaagaggatatacgaaaaataataataataagaaaatttaaaaataggctggctggaggttcacggatggacgcggcttgatggagagggcggggctgcaccggagatccgctccatagtctctgtgtaaaggtcgtgaacgaccttcatattctggatgaagcaagcttagcgggcacttttctcatttaattgttgattggcttgcagcagaccctcaatttgaaacttggaatccataagcttagcccgaagggtctcgttggtagcacccagatcacagtttgttgcccggactcgctctaattctttcactagcacaccaacttccatagtggccctttccctctgcaaggccgcctgtcgaaaaataaggccaagtcagaagactaaggtggcaaaacgtaggatatgaaaagtaaacgcaaaatagagaaaaaagtaaaaagcaagcatccaaaagtcttaccccaatggtctgccgctttgtggagtgggctagcgcaaaagcatttacgctgttgcaaaatacccaagtctccatgggcaattctgaggcactcccggccacctgatccaagagctctacaacaaaaggagcagcctctcgccctagcctataagccaactagttctacagggcctcgaccttcacgatctgccccgttagggcaccacgtgcatatcatccaaaagttctaccttgcaaactgccaacatcacggtcacgcactgacggatttggagcttttccgcctccagacatcctttcagggccctgctcgcttccttttccctcttaatcttcagagggtcgcaaggaaccaccctcctaaggaaggcgaaccccacaaaaggcgttcttgatgcaaccgaggggagagacctgggttggcccatcctcagtttggcgtaaggggttcaggggtgatcccctattcccccatgtcgaaatctgacaccacgagtttctgcctctttttggcagaggagctacttaccgccgtctcgaaagggccagctttttctagagcaatcatcatttcacttctatgtctagatagaagctatagattccatatctatgtttagcgctcccactcaattgtactatcatgttccaaaaatgtattatcactcgaaccaaaaggtaggcttaactaacaaatcaaagaacacaaatagcactcttgagattgaacctaaccat

SEQ ID NO: 308419 - DNA, 1366 bp, Cannabis indica
aaaatatatataaaaaaaatagtatactatgtaaaaatccaattaaaaatcaaataaaatttaaaaatttaaaagataaataacaatgaacaaaactgatagaagatgccacaatatcttgtaaatattctcctttgtataagtatatagatagattgattgtgaggtttcgtaaaataataatgaagttaatagaaaaccaaataaaagattttgtaaagatgtaaaaatttgtaaaaggtggtaactgcttggtgttttgggctggccccccacaagcccaactcgtacaattttcactttagaattttttttctttcttttgtggaaaaccatctcgagctaaaaaaaagagtgtgaagagagagagagagttttcggtgaaaacaagataaaagtggggtgtcaaaacaaaagcagcgtaaccctctcacgcgtcgctttcccttcaaccttcacagccctccccccaacaaagggggcacagatctgacggctgacaagccctctgtagcgctcacatcgatggtaccagatgtgtacacgtggaaagatcgtggaccgagaaaaaatgaatgatagtgtaatgatgaataaataatttgacattctgtattttttgcagacatgcagttctcactctctgcccccctctgcctaaatatgctcatttttcgctgcattccactatatacaaccaactcttgtacggactccctctctctctctcttaaattttaccactgtcatactctactctttgcttttgtacaacatatatatccctttaatttgtctccatctttgaaaattcaaatcccatttctactcttttttattattattattattaattcaattaaacaaattaaattagaattcttgtgtattatatttatgtttgattaaactctccaaccacaattatataaaagagagaaaaaggagacacagtccaaccaaattggtcccatctatatataatttcttttttatgaattgacaatataacaaatatatgtacctttattgttaattaatagtttcaattaggaaaaagctattcactttttttttttctttgaacataataatgttatttatataccgtagtactgtagtgacaagcttaaattaggtcgaggagcataatcatgtgttggagtgcatgtatatatatatatatatatatatatatgaatgcaagtgtgtgatatgtatacatggtaaggtgtctgataaattgcggggatgccaagagagaattgcaaattttacaaaagtgaataaaaaaaaaagaatctaaaaattagaaagaaagtaaaaaggaacaagtagtacttttttacttctttactttttcaga

SEQ ID NO: 308420 - DNA, 2393 bp, Cannabis indica
ttcaccccattggaataaacaactgagaaattctcattcactttctttttctctcttcatcttcttcttctttcctttcatctactttatattattttatattattttataacagattttgatttattagaattttagaatgctaatcacgtgtttggagtgattttgaatgattttagcacattttagttgaaaaggtcgaaactaaaatgcttgttttatagattttgatgactttaaaagcataattggatttggagttgaacatgaaagtgatttgtgctatatcatgaaagtggatcaaccgcgacctaatcgaagaattaaaagtcgtgattccaagagggattaggctgcaacacatttgtacttgtgtcgcggtaaacataaatgagataaatgttagagataatcaaatttaactgggggaatcaaatctttgaaaggcttgccacattaagtttaatgttatccaaaatatctttactgttatccaaatttctgtagagtgacgtggcacccatctgggtgacacgtggagcacatttaatcacttagatggacagtcttactccaaatgagtcgtacagatagttatgatacttgaggtcgtaaacggaagatgggatgtccagataggccatgtataggcatccgaccagcttccgtcaagcaggtagctcgtatgcaccgaccaggggatgtgaattagtaatttcagaggtatatcttgtatatctttaaatttgcacttcatggcataatccctacattcatgggagggattcgtatcatcagagaagaaaggaaactgccaagtttcctactttacttattgtaattatagaaataaactagtttctcattttatatattatggatttaggaaaactaatttcatgtaattaatctctataaatagtggactcatctcattattcagggacacgaattttattcagagaaaataatcaagagataaacctcaatcttagagtaaaattacttagagattattgtcagagcttttgagagagagaataagtcattcttgttcatcatctcacaagtcaatacaacaacctttaatgggccgaacctctataaatttcgtattttctttactttatattatttacattctattatttaatttttctcaatcactttaatttgactcaccgttattggttaaaagtgaggtcaacattttagtgccttcattgagagcaaatgcacacaagctttgtcttaagtctttttcaggtaacaggatggttgtgcaaacacagaggggaaatcagactaatacaactgatctaatggttacagatccaagcatgcagacacgtgcaaactcaagagatccaaccaaaatggaccccaccctaatcaatcctcagccaccaacaggtccacaaactgtaggtcgatgagtgaccacccctctggctgggttcactccaagcatgcaagaaactggaactaccagtactgcaatcaagcaaactattcatggtactagaatcccatctgctacgaatactcaaaggccagttggtgatgacaccaaattgcagaatttacgagctgcattggggcaaatacaaggccacaataacactcttcattatgaccaacaagatatgcgagcagctataaaaatcttacttttgataagcaaagacaccattttaaagagtggagggatcgggagatggaaattatgatagcccagccatcggtaattaacaactattctaggcaagccatcgtactgatcaggttagcctatcaagtcaccggccagcagtcagtggcagatactgatattttgcacacacaagtgtacgtatcgtgacaagaagtaaactcaccaagagtgagatcgatcccacgaggattgtagttaagtacgttaaaattaaactcttacttctatttggttaaataaaatttaagaaaatattaaaactagaaaataataaaaatagtgaaagaagaagcaattaaattaataaggaaattaacagttaataaaaactagggctacgacttcaattgtttctattgattatgacctaatatgattatctcactattatcaatttctatgcaatagcaggtttactaaagtaatttatagtcatctcagatatataaatctcaatcgcatgcaaatccttatcaacgtaagttgcttgcgagatagcaagtgatctattcttccagtctataataatttggataccaatgattagccattctgaattgggtgcttagccattcttttacatctaacattttcttgactttgcttccaatgattaagatatcattgttggaatttattttaccaggatcttagatctactcacaagtatgttgtttaa

SEQ ID NO: 308421 - DNA, 1503 bp, Cannabis indica
tttttagattaaggaatagattcaggttgataaggggaattggtcttgtgtgttttgtgaaagttttggagttgaaaagggcatattgtttgctgatagagatgtaacattcaatcctcgtcatttgtttgacttttattttatcaaaatgatgatgagagtgaaagagagaatattgaagaattcaatccagttttcttaaccccttttcttttttaattattattggttaaatatgttcaaaattgtctggaaggtattcttgttggtaataattaaaccttaattgtggtcaaaatatgtgcacttaattaaaactttcctaactggtaattgttgaatgagagagcattgttattattttgaaataacatgatgatgatgatgtgattgtaacccttcgtaattgggccctatgtttggcgtgtgagagaatttcatttaagagtgaaggaacacttgcattatcatatttgaaggcattgggacctctttgttgggtagattttatacaagtggcacatttttcttcttttttgatcagttgctctttgtattgtatatatcataactagctttagctggttctactagctaagatacattaataaaatagttctacaaacgatgaacctggtgtgaaagacatgtatatacttaattactcaattatttagaaaggaacaaaacttgtgtgttgagacacataaataatagtacctaacaccatttctaaaacgatataagtaaatgagcatgtattatggtgactgcaccaagaagctttagctgttttttactatccaaattttattaattgctaacaaaatgctgattattctataaatagatttggtcaaaagaaagggaaaaatcacatgaaaaatcatcaatgtgatctgacctgttttactgagtgagaagaggaatggcgggtagccctaaaattcacccctgctatgttttggtgagtaaagtagaaaagagtgttaaaaaagacaaattgtactttgcttttgtttaatctttcaattttcatagagctatttaaagaccctactgccctactacccctttagtttgttctttggtgagttaatgctaatgggtcgctgtcgggatctacgtggtgcgaacccaagaggttcttttgttggtttgttaagaggagggcctctctctctgcccactactgggcgtgttaactgtccctatctatgcacccccgtggggttggggccccttaacttagtacactaccatctcttttcactcatcccataacttaaaacttacctaaatacattaataataacagttacactactttaaaccttaatcacaacagtataatatccatcaggttaattagtatttttttccctgtattttgacatgtatcaaattatgttccctaaactttcaaggtcgttaaaaatgttccctaaactattgacattgttggatttaaggatttttttttaattttagtaaaaaagtcta

SEQ ID NO: 308422 - DNA, 1819 bp, Cannabis indica
tggaagtatttttactagataccctgagattttaggaatgcgagtgggccgtgtgatcaaaccctttgtcgagtatcttgagagcttgggaattccaaggttagctgtggctagattgatagagaaacggcctcatatacttggatttggattggaggataggatcaaaccaaatgttgaatctcttttggagtttcatgttcgggaagcatcaatggcgtcagtagtggctcaatatcctgagattataggacttgacttgaagtctaaacttcgtagtcaacaaggtttgctcaaatcggttattgatttggatattgaggactttggcaggattgttgagaagatgccacaggttgttagcctcagtaaggcacctatgattaaacatgtggattttctcaaggattgtggattatccttggaccaacttaggcaaatgatcatggggtgtccccaattgcttgccttgaatgttgacatcatgaaacttagctttaacttttttataacagagatgggaaggcctttggatgacttggttgctttcccagcattctttacttatggccttgaatctaccataaaacctagacataagatggttgcgagaaaagggttggaatgttcgcttgcttggatgcttaattgctcagacgaaaagtttaagcaacggatggattatgatactattgagctggatgagatggagccagagccactattcgatatgaacacattgatggaagcaagaagtgatgactcaggttctgaatatgaagatagtgatgacgattatgaagactagtgacagtgagttttgtggagagtgaagtttattcagtattgtagaggtggactttttcagtctaagatcttggagtcatcttgtataatctaaatcctttctttgcataatgaagagtagaagtatgatttccatgatgggtgattttcatgtggtccggatgatttatggggagaaacgtgagctcttctgtgccaaagcactggttattttacaatttttcactgtgctatagttttatagccttggatctattagaagaattagaagaattacaatctcttgggacttcactactttcttcttctgtttacttttttttttctttttgtctcaagtgtatgaggtaatgtataatgacacctatgtagcaacaagttgcttaaactttgaattaacatgaatgtaaatctgcatggtcgcaaactttgaattaacatgaatgtaaatctgcatggtcacccttcaaaatgaaaaatgattcaaatgaattaatatgtttatggcttctctctatctctctcactctctcttttaagttgtgctttttttgaaaaagttaagatcttttaaatgcaaaagatgttcttaaaaaaatgtttggtgaataaaatgtgaacctacaaaataaacaatagtaattttctattttaaaagtcaaaggtttagtattttttgaaagtagtcaaaggtttagtatataaagccgtttatgcacttattttttattttattttttctaggagtgtgaatattcttgtaagatgttatttcaaagtaaaaatcggaaaaaaaaaaaaaagtaaatgtaaaagttgggaaagctttgaattaaacaaaagatttggtctttgtgggttttttaggcaactctgtttgaacataatttagaaggttacgcgtcactcaattatatataaaaaatattgtaaaaaagaattttcctacaactcttcctttttttaatgttagttttttctcttatcttttgtaagattctgttattgagat

SEQ ID NO: 308423 - DNA, 674 bp, Cannabis indica
ccgaaattttggtagaattagaataaaactttaaatttttaggatacatcgtaaacccttagtattagattaaatgaactaaattgcatttttttgttattagaattctcgaaatggataaagattggatgaatgtgcatagattaccagtgacatataggcaaggtgttgatcattttttggagttttgtgcgaagaatgcgaaaaaccctaattttgttcattgtccttgcgttaagtgtgctaacttggagcgtatgaaaattgtcaagataaaagaacatttgtttaagaatggtatagacaagaattataaggtttggtatcaccacggggaagatattagagtttcgggggtggggccatctaagaaggataagtgttttaatttggattacgaagatgatcacattgcagaattatttgatgatgcgcaacatgaatccaatgttgatccagagaaatttataagagttttaaaagattctgaaaagcctatttatcctaattgtaataggtttactaaattatcaacacttattaggttatacaatatcaaagccaaacacgggtggagtgatacgagtttcacaaacttgctagctttcttaggagagttgttacctgaaggtaatgaaattcctttgtcttttatgaggcaaagaagacacttt

SEQ ID NO: 308424 - DNA, 1437 bp, Cannabis indica
ttgtcactaatttagttttagccacaacaagtattgtgactaaaaatatatttagtcacaacaaattgtaattttgtgactataatacttttagtcacggaccttttagtcacaacataggaatcatgatttataattagtcacaatttttttacttttagtcataaattttattgtgactaaaagtaaaaaaatttatagtacatgtttttcggttagataatgaattattctaattcaaaaaaaattttactatgcgcttacaggtatctacttcgtaaatttataaataaaattaagtaagaaaattaaataaaagatatatattacctacaaacaatataatatgttatgtttcaaaaaataaaatgtaggtatgagtttagatgaatatgattagcttaaaatgaaaaaaccgagagacatgactggtagctgtgtaatatgtataatatgtgagtatgttatcatatatcattagtgtatatttatttgtgctatatgtataatgtaatgttgatagtgtcaattcaatttgaagggtatacattattctcaattattgtaatctgaaaaaactcgttcaaattgtgtctcatttatgtattaaatactagagatcatggttgactcacccggccaaaccacacacaccacacaatttactttaattcttcataatcattggttagcttagctgttcccttttcactcatactttatcacacatctatatctattatatcaatggtagaaataataaattatattaaataacggttgggaaaaaaagtatatgtttagaaataaatatatttatcaactagtaagtttttgtgtcacttcattatgataggacttatttatttaagcatcacaactccaattctttacaaaacgccattgtatatgatcaagtggggaagtatgtcaatgaattggcaataacacatatttaaatttgttaataactccatcgttgaatacccatcacaataacaaatatttgtaagaaaagtataaatatatgtaattaagtaagatcgatcctctaacttcattcctaacctcagatttattctatcattataaatatattgctaaatattacaaaatatcgcaaaaaattggtaaactagaagaaaaaaatacaaaaaacgagagaggctatgagagaaaatgacgtcgagaccttgtgatcgaggttctcgatctgtgtgtttcgacactaggggttttgggtcggggttaacgctagagagtgagagagaaattttcttgaaatgtaaggatattttttcggtggaaaaaataataaaaatatatatactattggatgattctacaatgcacccccttaaaagaagtgtactgatatacccttgacctgtttcggcatccatttcatattcatgtaagttatatctatttaagata

SEQ ID NO: 308425 - DNA, 1148 bp, Cannabis indica
tatgaatataccacaccaattcgttatgtatggatgatgagattccattgatacagagtcaattccaatagacttattggagggtcccattggcgtgcatccagtaggaattgaacctgcgaattcgccaattatggattgggcgctttaacatccattctagcttcttttctctatcaacgtctcagatttctaaattctcatacggcccccctagaattccttctaaagtctgctgaataatttttatggattgtgtcatttcaccaattcggactagataccgagttaacgaatcgccttctttttgccactgtacttcccaatcaaattcatcgtatgtgtcaaataatgtgttgtaatagtattggagaactagatcaaatcctataaatatattctagtattgtacgaggttgtaatacatcaaagtgtaacatgtgaaaaaatgatttaaatattgatcttgaaatgcagttgaaatgtcatggtcttagagtgtttgactaattgactttatatatatttttagctatggaatcattaaaatctgcaaaagtagatgcctatttgagaaagaacaaaacaccagaagatggtcttacttaggtgaagtgtcttgatctcaaaaaccaggaacatattagattgtttcaattaagatattcaacttcttattataatttaagattaaagccactttgcgtcctattttattaaatttaaaaaaaaaacaataatttaagattataataagttgattaagttgatgtgagtgtatgtatatgatatttaaaattcttttttttttttaattatatattattaaaatgtgggtaaaatggatgtaaagagtataaatgtataatctatattgtgttaactcaatatataaacacttaaatcaaaaaaaacacaaaacaaaaatattgtgttaactcaatagttttcaatttcccctaaattatagtaattttttaaaaacttgtcaaatctattgcattctatttatattttgattatagatcatagacatactcctagaaaatgatgtggaaattgaatttattatccttaagtacataaatattagatcactaatgtataagacatttttttatttttatattttaaagtagttttttttt

SEQ ID NO: 308426 - DNA, 1643 bp, Cannabis indica
gttttgggggtttactcgcagaaatttggattttgggatttagtgaaaccaaaacgaaagtattgggggttttacggccatttacatttttattatttaaaaaaaattcaaatatactaataagaaaatgacacgtggatataatggcttaacatttaacggttaggtacctatagagttccagaaatataatttagctattattaccgcaaaaaattaaacttaagtatttatttacaattaagagttaaatttaaatatttataccacaaattattctataaaataaacttagctcaacactatttattgagcacgcccttttaaaagagcatcttatataaaaaaaaaataaaaaaaaaaattgagaatcatggataaaatccactccattaactccttcaaatagttctatagggaaagcaaaatctgtattgtgtattacttattcatttactaaaaattctctcttttcctctttgattaattactttttatgagcattgtttttggatattattagtgtctagtaacttttgatctgtcgtcttgcgattggctggcgatactctctaaaaattattacattaaactttatgggactcgatgcttaattggaccaatagcgatattgacacataaaagagtgttaagtactattggtgtcttttagcatttctcactttttatattattttattactttaattaacataaaatattatatttaagtttaaagaaaattaaaatatgaggtattatatagaagtatatttttttaactaaaaatatgaggtattataatatgcttgattagctccactatgtggatgctctaacgtcgtctattaattatattttttttaatttttattttaaatgacttactgttgatttttaatttaaaatagttgtgacaataacaaattacgtgtgtgccacatacaaagaccagaaataagtgtgttctaacacacgtatttataatacaaacgagcttcgggagcggttgtttaaattattcaccaaaaatataaataaaatttaagaaaagacaataagtaaaaattaataatatatataaataataaatatatatatttaataagattataattttatcacatattataaattattaattaaatttaattttaaaaaataaaaaagaaaacagaataaatatttatggatagaaaatttagttattaattatatattttaattcttttgaaatttttattagatttagttagagaaattttttatataaattaattttttattattattattacttagaaagatatcattagttataaaatacgtttatatttatgatttaaatattttcttaaattgaaaataaataagtaggtacatatttatttaaaaaagtacatttaaaataaaatatgataatatccttagttagaatttttctttcctgtataataattataatagtagtagtagtagaaacacgttatagtataaattaaaatttataacataaaaagagtataatcttacacaatacaataaataaataaatatccacatgtatatacatattgaaacataaaatctatttatttatttctttgaataaatactttaaataacacttatatttatttttt

SEQ ID NO: 308427 - DNA, 1220 bp, Cannabis indica
taagatgaatttgaactcaggggactatgtgtacatgtctaattaagtgattcttggatgttttccatcctaagattaaaatattgctatgttaagcacttctaatttgatatattatcaaattaagtttgtaattttcaattttaacatgatgagtacactttatataagaaaaggaaaagtagaatttcttcatatttatttgatatattgttatatgaaatggatttatctataatcttcatcgattaataagaactattaaaaacttacttagatttcttttcttaacagtttacatatacaaatttaaataaaaaataacaactagctattaaacatatgatattacaactttaaatgggatccaaacatagtttatctatgagtaaaaatttattaagtacatgattattaaactatctccactctataattgggacaaaatttactaatttatagccacttaaaaacatatttttataatacacgtgagtgcatgataacttagcagctttcaatccaatcgaaacattctccaaacaaatcgaacaacaaatgggattatcttctacccatactttttctaattttttgattgactattcactcgccgccaccaaataaataggaacatcattcataccatagtcattatcatcgtcgtcgtcccaatcaaggtgaggtagttcatcaacacaaatttcaacacaaatattaacactgacttcctcattcaaattattataatacttgttcatcatctctctaccgcaattaatgattcatcagcaagaggaacaagagaaggaagatagaactcagtaagcatatcttgaatggtaactagggcttcagttttgttgttcttcattaatgtctcgtatgaaattagcgcaatattttctaaaaaaagtaattgagttttccatattttgacgatcacatagtggagcaagaatgaacttggcatttaagttaatggtaaagaaacaatcattatgtggttcttgttctattaatggatttggttcaaaatgatatggtgttaaatggtaatagagatcaccaatgacttgtggagaactcataagtgacgaagtaaaaaagaacaacttgagctttaaaagcttcaaaattaggattagcttgaaaacggttgatgcatttgatcatgttaaccagagtaaatactattttggactctgtattttgcaaaa

SEQ ID NO: 308428 - DNA, 1206 bp, Cannabis indica
tttgttcgagacaagatcaacactccaccatacgccttgttcctatactaagttcactccaattggcagatgcatttactaaacctctatcatatcccatattttctgctcatatatccaagatgtccatatacaatatatgcgctccatcttgaggaggtattaagaatatgattgtactattcttgcatattgtcagcttgtatatagatttagttatttacctaaccaattctattagctgagagttaattatgatcgctatagagttagttgtgagtgacatctatatatagttatgtacctcattttgttctttatctcaatcacattaataagatgatattacattttctgtccatttcgtaatacatcccttattatattattgtttttatgaaaagaaaaactttctagttctagatttaaatagaataactgatcattatgtccaaaaattattagaattgtgtgtcttacaagacacaaaataagggagtcaaatactgtgtcccaataaatgttccaaccaattatattatgacaacacatttaatttgctgcatatataagcacttaacaaactctacaatcgtactagttgtactgttaaactatcataaatagatcgttttcgttctttcacctctatgttatgagtttggccttactactattgagtacaatactcctagcctatttataccatgtaccttagccaaaaagttgcaaggaatgagattataccttcattatattacttgttcccacaagtcacaaaatttgatgaaaaaagagttgtgaattcaaataaaaaaaaatagtgactatgaagcaacaaaatttatttatgctaaaaatttcataatttaataatttagaaatctaatgtctcaaaatgcaaagactcagttcaccactgtggcttttgaaagtgactgcccataatattaaaaatagttctaataagtcttttaaatgtgttaggtgttaatatagcctgcaaaaataatattatactaaataaattctcaaattaaataaaattaaaactaaacactatatataaatagaccatatatacaattaaatacctgctgtaataattagagttagtttagttagttttctgttaaattagttattacttagtcggttagttattttgaccacttcttgtatttttttttgaagaaaagcgtacat

SEQ ID NO: 308429 - DNA, 1227 bp, Cannabis indica
gtctggttcataacatttggaagatgagaaacacatatttctaggataaagagtagcaagatcctattaaggtggtcagggagttcaaagctggtgttacacagagaattgagttgttctgacccaagaagattaaagaggaagataaagaattgttttttactttgtaaacatcgtaaacagtatggtataggaaagtgatatgaaatgtacaaagtattaaattgtaaaggtgattaatttaggccccgagtgaggtgctattaagatgtaaacaaagtattttgagttaatatcctgattcatcaaaaaaaatattatatgtactgtcacaatgtacaaaaaatgaataatattattaatggttaatttaaatttatatttaattatattattaattgtgtgatttatgtgttttctttctataaatatagcttagctatattattttgtggggaaggttgctttacattaattataaatttaattaattatctcgaaacaaatatatatatttttgttactttctgcattagctaatttggctctaaatcctaacttgttgtttttctacattaacataattcaataattatttttgaattattttttgaaaatatttatggatttgtagattcacccctgacaaaaataaatttatattacttcaaatcaattacgtacatcaacctttagtttaatgatctttacaaaccatatccctttaaaactcatacctcttattacactttgctcaacaatctgttaagccatatgttatatttatctcctaatttaagtatatgtaaattataaactctctttacaacaactttcacaaaattgactaaactattagcaatttgtacatctttataccaaccaactttgtttcttgccttccaaatcatatactcaccatgatatctcacttagattttactgtacatataaaatacgaatatataatcacatccaaacggcacaccaatatagcgccaatagctaaaaaaaaagaatccttaaagattaaaatctcaaatcccatttcaaaaatattaagaaaataattttacctaattaaaaataaacatatatggaatacttctaaatgagcattacttattaataggtataaaacaaatttaactataaatattaattttaaaaatattaaaccatttgattttgattcgatagcgaataataaaatagaaatttgaattt

SEQ ID NO: 308430 - DNA, 1128 bp, Cannabis indica
gagtaaatacatataatacactgacctagggcccatggattgaggcccaactcatgaattttatgccaaagatgggccacatcatgcaaatcctaaaaatctggtttcggcgacagccctatgaagtggggttttgcgacacccttcagattacccttttgggatagccttgggctatccatttgtgtcttttttggatgcttggtaattcatacaagtaagctctctaggttcatcagtctcggtttaccctcggtcaggtcttaactgaattcagactatctgttattgggctggttcgctatctatttaggacatgagaataggcctgcaaattgaactggggacaatgagcacacacgtgtcgtttgtccgaaaacatggataacacctgacgtaatacctgtgtcctcaattgacaataacccattcagaaggatgtcagttaatattacttacctcattatttgcaggtgcatgtggtggaggtgcgatacaatttggtggcatgccgacaatttcaacttgtagagcctgcatttgttcctgtagaacggtatactatgcgactaataattgtaccaacccatcggcggtatgggtaggcgttatcaatgggaaatgtaccgtagttgctctgggagttgatgtttctgtaatggattttatgaactaagggaccaagttcagcgggacaatgttagtccaaccaaatcccccaaatgtcgcgtcaacggttgagtttagactcacagtgctgccattattgggtggagcagaaatagttccattgttaacagtgggtgcgttgttggtgttgttattgacattttagttttggttcgtattcattgtgatcttcctccaaaatctaaaaaaaatattgttgaaacattctccttctagcgccaaatgttgtcgaaggaaaataaacaacaccaaaaactgcaagtattcaaactacacaagaacacccataagcaaaactgtgagtattcacctagattattgaatactcgatataaaacaacgactaatagaatataaacaacaaatatgtaaaagacaaatgaattatagtaattcagtcagagcttagtctacttttgtaaaaataaaatgtgaatt

SEQ ID NO: 308431 - DNA, 2029 bp, Cannabis indica
tatatatatatatataattgtggagttccctaatctttagggactgtctcttgtgcagctgttaaactggagagtttctcctgattggtgtctcaaatccattagctcttttcagtatgctataaatttgttatagttagtttgattccttgaacttgtcatagatcatcagtctatttctgttttatttttgtttcgtggagttatttatctgaggggttgacctgtggtgggaaaaaggtgtctttgcttgcctcctttgcatttttctaatgcgtattttaactagttagaaaaagacagtatttgttctcattttgtcccagcgaattcttaggtggatttgaattagattagatctcttcggacatttttactctaagtgattggtatgctcgtttcttcttgcttcatataagttcattatggatagtttgaccctttactgtttcaattctagggactttacgatgacttgaacttgggtttatatctagttgaatacgacggaattggtggcatatcctgccgaaaggtttggaattcatctgaaaacatagccagttatggtccggtgttttggacatcaagcacatcgtttgtggagtctccattttctgccgaggaagaaagtctttactatagtcgcatacaccatcgaccacttccagccacagatttcattcttgaatgctcatcattaagagaaaacaacacggtctctcgcattcttagtgtgaactcgagttttgatctagttatcccgcacctggcaggagcaacagctaacccacggcatgtggaaggaagggtttggcaatatgtggatggaacatttgggtttgggtttctccgggacaattttattatcgatttgaagcatctttcagagaatggtagtcttgttgatgcagtggagttctcgggtcactgaattattatctagtttggtaacttctgtacagaaacagtagtgtagctagatgtcactaactttgtggctttgtgtatcatctctgttgtgaaattataataaattgatttattattcaaagaaattttagttgtcttgctacgaatgaatggacgatggttgttaatactttgttcatttttgggatgcccagttatacatgaaacccatacgacttcccactttagaagtagagctgcgtgtttgaaaaaggaaacctcatctcatgcaagcatgctctactctaatcgtgaatactagctatacttgcattgcatgatttgaatgaacggtggccgtggaaatcatttgaactgcagaaaaaattgctaatttcaattctgcaatgcttacacaggaagaataataagaagggggaaagtaaatacctcaatacttattcaacataaatggggggacacaataagagctcacaagcaaacccaataggtctctcaagaggaacaaaaccgagatcataagaacaactacagagttttgttttttggtatctcatttgttcatttacaaatctcacaacgaaacccaaaagcaacaaatgaatgcacgtgtcaactatatataggaatccaacgaaatgtgtttaggaaggcagtgaaatgataacgaggcaagggaaacgagaacaacatagacaactagaagtagtttattcattcatatttctgcagcaacttctgtggtgttgactttctccgcaactccatccttactggcatggtcaccctcaagctggctcaaattgcccttctccctgatgagttgggtatggtgatgtttgcagtagagtctaccctcgtgtgcaatgtagttcgatggactgatagtacaccctccgtggcaacatttgaagcagcttctgtggtaaggtgttccatttactgtaaccttcaattcagcataatcactgtataagcctcacacttaggttgcgtttggttggaggtaatgaaatggaatggaatggaaaggaaataattttcattccattcttttgtttggttgtattttaaagtattggaatgacattccaat

SEQ ID NO: 308432 - DNA, 2761 bp, Cannabis indica
gacgacactataatcatgaacaaatatatatttatatatgttctggacttaatagaatttatacattaaatataatcatgaaataaatcatgtgaatcatgcaccataaaagtgatttctgatcttttattaattagtaaatctgattgggcacgaaacccaacaagaagttccatatatatatatatatatttatatatacaaaaatataaatttcgattaaataaatctatacataaaaatcctaatgtgaaataaatagattattacataaattaatactactacaaaaatttatgaccatcaaaattggacatgataagtcttttcagtccattttgtgttggacgtacataatatcgagggacatgaaagaggtattttttatcttcaataatattggacatgaattttttttttcatggacatgaagtacaataaattaatattattatatttcatgtccagcttgatggacacgaatttatttttaatttaatattaataataaataatattaaataatttgtatgttatttatttaaaattataattataaatttaccaaaaaaattatatcataaattaaaaaaaatgaaatatattaaattttaacaatgcatttagaaattattattgcacaataaattacatcatatacattattacggatatcaaatacatagatgacattggtgtttattgagactttctaaagctaataaaatatatgtggtttattgtgatgcatccagacagggtttgtggtgcgttttaatgcaggccgacaatgttattgcttatgcttctcgttagttgaaagagtatgagcaacgttacacgacacataatttggaacttgttgtatttgccctaaagatttggtgacattatttttctagaaaaaagtctgatatctatactgaccacaagagtctcaagtacttttttactcagaaatatttaaacatgagacaaaggaggttgctagaaatagtcaaggattatgactgtgagattttatatcaccccgagaaagccattgtggtggagatgctttgagtaaaaaaggtcccagacagattttagtaccatagtgatctcacgtcaattgacttaaaatatggttaaggctggtatagaatttgtatttgggaaacttcataaactaacacttcaatttgacttattagaaaggatcaaaggtgctcagttagaagactcaaacttaatctagttttgggaggaagtgttagtcggggtcaagctaagaacttctcaatctcgaataatgggatgttactttttaaagctcgagtttgtgtacccaacagtgatgagcttcagaaagaaattttgggtgaagcacatattacaccatatttactacaccggggtaccaccaaatgtaccgagatctgaaaccctattattggtggcataaaatgaagaaagatgtagctaattacgtgtttaagtgtctaacatgtcaacaaatcaaaacagagcatcagaaactggcagggttactgaaacctttatcacttcctgagtggaagtgggaggatgtgataatggactttgtggttggtttacctagaaccatgagaatgtatattttggtatgggtcatagtggatcgtttcataaagccagtacatttttaccggtaaaaacaacctatatagtggatcaatatgcagagttgtatgtgaaagagatagctcgtcttcatgaaactccaaaatccattatttcggatagaaatttgaagtttaaatcaaagttttggataagcctttagagagccatgggtacgaagttgaagttcagtacaatttttcaccctcaaactgatgggcagtctgagaggatgattcagatactaaaagatttgttacgagcatgtgtcatggactttgagggttcattgaataattattttcccatgatagaattttcttataacaaaagctataagagtacaatagtgatggttccctatgagatgttgtatggtaggaagtgtcattccccaattcattgggatgagaccagagaaaggaaatatttgggtaatgaattagtttagtgaaccagtgaagcaatagaaaagatcaaagctcgaatgcttgcttaataaagcaggcagaaaagttattctgattctaagcgcagagacatagagtttcagggtgggagaatatgttttcctacgagtgtcaccaatgaagggtgttaagcactttgggaagaggaaaaggttaagccctaggttcataaggccattcgagatactcaagaaggtcggcaggtagcgtatcaactagccttaccaccaatattatcgaatgtgcataatgtatttcatatttctatgttgaggaaatatgtgtcagacccgactcatgtcttgagttacgaagccctagaactacagtcaattttttcctatgaggaacaatcggttcaaatacttgataggatggcaaagtttcttcagaacaagaccataacatggtaaaaatactctcgaggaatagtaaggtggagaaagctacctaagaattagagtccagcatgagggctcaatgtctagagttgttcatgttagattttgaggaggaaatccttttaacgggataattataatgactgcatacttagaatatataggattagtagggtaatttagctattaattatttattattttatggtttgtatgtgaatatcatgtgctgcgggccttattttcaag

SEQ ID NO: 308433 - DNA, 1690 bp, Cannabis indica
tctcatcaatatttctaactaatgtcgttgtgacatttttggcctccaatcgggtctccagggtcaccgaacataaaaatatttttatttcataaataactcatattatatccacgtatttcaaataatctccgtaattaataaattacgcttatttatccacttatcgagtcttcagggtcgccaaacctcaaaatatttttattcttcatatagctcatattatattcacacatgctatttaaatctctgtaattaacaaatagtgcttatttactcacttatagtaaatttaaattttatgctgaaatagattagtaggatcataatcccacttattactcgattaacccataaatataaatataaaccataattatttatcattaggtttattgagatattacaactttaatttttttaatttaatgcaaaatttagttttagcccaatatacttcatgtgattctaacttatttaattgttgtcatgattatgatttatgtatggttttactttatgtggttataattaaggctattatctagattgtgagatttattacttgagaggggaacttttaaataatcagacatcaggtagatcaacttaggtgttgtgagattgagagataagccttaggtatctgaaatagttctaaattgtgaaattgagatgtggaatatttaggattgtttttagagtgagacttaatgaaggtaaggtataatggtggtgtaaagatataggctattggtattcgtgtttccagataattgacatgtggacttccaaggcctaaaattagccaagacatacccatgcatagacccaatcagactagtgggtcaatccgccatggagtcagaccacggctccaaattcagctacaaatccaacttacagttatgataaaactggacctaatttgtcttgtaagggaggtcacctagaagaatataaacccaacttaatatatctggacaccctcatggggtaattagggaagggaaattgaaaagaccttcataagtagtcctacgtggcacctttctaacacagaatcccaccaaattaggggtttgttccttgtgtcagacttagggagtgcgcgcaccatcaaaaggggcatgcctttttccaacaccttcttctctaacgaatattgttcacgatcgacgacacttgcaacttgtcactatcaagtggacccttccatacagattcccattgtctctcaaattaggcctcacctaactgacccaaagtcaatataatatgttttaccaggatgtagatttactaccatgtatgttgtttaacatccgaaatatgaatttctaaaacaatgtaaataaacacatataaagtttgagaaaccttatagtgggtgcagcagaattaaatgactcctttcgctcagatctctaacccttgtatcctttctgtagcagagtatcatcaagatctgagcccgattctccttctcttgaatttggatttttcacagtcttacacactatgattgaggaccacttgatatgtctggacatgcactcaatcactagaggattcgaaattgaagagagaaagagagatagaaggattcaaaattggtagagaagatggctcaagtttttgactgaaggaaagttatttttttttttatcttttcctttgaggccatcac

SEQ ID NO: 308434 - DNA, 1015 bp, Cannabis indica
attctaccatagaggtcaacaatggacaataactccagaaagaacaaagcttttttgaataactcaattcatttgggatcagccccgttaaaaagagcgttacatttactttataactgatataattaatatgccaattatagttacaacggtctcattatgatcatattttgtacagttcacctaatcaacctccattcaaagaggggctgaataataaaaagacagagcaaagagtagtctttcatctcgggccgaaccactataatttttgcgtaaatttatatattggaatacattttatacagtaatttttgtgtgtttgctgctcacaatttggtggtgttgtaaaatttcgtccataacactaataatcataatattacctctgttgtctagcttttaaggccaaagacctgaacttggcagaattttgaactgcaaatttcttcctttgctgcaatcgcctctgaagtgactctccaagtgggctattagctatggctttgactgctgtgaaaggtatggcagagaagaccagcacaccagctagctagcttcgcataattttacaaacattcaaaacacaaaagaacatacatagttacagatattatgattaaactactgttctgttctgttctgtactgtactgtaccaacccacctcttcccatgaagctttgcaggaatatctcttgttggtgttgaagttgggtttatttgacttccgaagcctccaagaggatgagactgaggttgagaaacccaaacccaagccctgtgaatttatcacagccatcaccacctcctccttcggccactcactagctaccccacaattatggatgttgatgatgaagaagctaatatgagtactgatggccatgcctttaattattgggctttttacacagcccaatgggcttacttattcttcttccattccatttccacataggggattatttaagaatatagggattatttcataaatacacacaaatataaaaaaa

SEQ ID NO: 308435 - DNA, 989 bp, Cannabis indica
atatagatcatcaattcttaacaataacagactttgtgatttaattaaatcttaaattatatcatgaagcatagttttggcattcatgtgtatgttatccttgcctagtaattaactttattgtgaattttctggcctcttgtgatatctatagggaatgaaggaataattaaccaatgagctgaggactgtacgtactcttgcatgtgcttcctagggctcttttggcagttttaataggtgtggtcatcgtgatttgttacttcatttgtttgcttctaaaaactcttttctttttatattgttgtaagttattttgtttgaataagccacatttcttgtaaaagcattgcactcgactttttcctctatttggagtttttttcccactgggtttttctctttagagtttttaatgaggcattgctatagcaaaactttaattctggatgttttaatcagtttgttgaattgattttaattattattgtgagagattatgtatttatagagtagtggatggctatatagttgggtgccgacctagttgggatgcttctctatttgcttgatgctgctacagtaccaattatttctttcaagaagaaaatttcattatgaattcatggtttattgttattatgtatctttatcgcatgcttatgatttttacaaggatatatgtagtgcatgctcataataatttatacatgatgtatgtatatattaggttgatgttatgtgctatgtacgtataattagttttatttttaattaggattaattaagtgaagttaagtgcaatacatgtatatttaattttttaattaggtaatgtatttttattttttaatttttgaaatatggtttgagattttgatatttgaaatttttttttagctattgcagtaatattggtgtgtattctttagatacgtatatatatatatcaatcaacatatatatatatatatatatatacaggaaga

SEQ ID NO: 308436 - DNA, 1866 bp, Cannabis indica
acataaattacctgttcacagttgagtcgacccaccaatatttcttatgttaattactctactatacactatctctatttcaattcattcataaaattaaaataaaagatttgtctttttgctttaaatgattaataaccgtctgatcaatttaatgatctgattcgatcccataaaaaaaaacttacagatggatcatctcctccaagttctggtaaagaaagttcacgattatctcgtcttgataatagaacccataaattaaattctgtatcaatctgtattacacacaaatcgaatatattaaaattatggtgtttgggattattgtagcatatataaaatatgtcaacaaatattttttttctcaacattctataacaaatgttattttttataaactttgagtatatacttgtaaaacttataaatttgataaaaatacactaaattttcactaaatacaaattttaaatataagtttaaattagagtaatttgcgacgtaaatatttagtttaattctcagttgcagataaatatttaagtttatcttttgacggtaaaaatacataatttatatttttgaaacttccataagtatctgactattaagtgtcaagtcattatccacgtgtcattttcttattagtatattaaaaaataaaaattaatgacatagacccatcagaaactgacatgcggtcattgatttgacacttaacaactagatatttgtagaagttttaaaaatataacttaaatataattaatgtcaaaaattaaacttaagtatttatctgtaattaagaattaaatttaaagaattatgccgcaaattactctttaaattagactgtattgtatattatatagatacctgtctgcagtagggagaactgcagctgctacattttctggggaatgatgtgatgattcttccatcaacagagaacccaaagctagcatgctatttttcattataaccaaaaatacattattaataaaatactaataataaattgaggatcttcttgttcactatattaatatactcaatgcacctctttctcattattaaacatcatatcttattaactatggaacaagattctaatgataaggctttatctaagaagaacaatttttcttttttgttttgagaaatgaaattcattcatggttaaaagagggacaatgtactacaagtaaagaagaaacaaagtcgcacaaatttcacaaaaaaataactcaaatgtcagccaatcacactgagaaataaaggatcaataagctcatagctcacgtaggagcatctaaagagacgaaccccataaaaaaggcttaaagccaacgttactaagaacaaaaagtccacaacaccgaaaatactaaataaactaaaaaatacaaacaagcaaataatgttcattctaagaagaacatctttagaatgaatgtagttaaaaagaatcatgtcaagtggacaatattaacatgaaattaatggcttcctattcgttttttttttttttttttttaagtttttctctaacttcatgaaaaagtaagtgtaaggttgcaacaaaactgatgaatcaacatcggctgtaatctctagtcttctaagccaatgatgcaaatcgaaccctcttatagctttatttggtgtaactacttgggtcagataaaaagaaactaaagaatctatctcagcaaatagacaaataaaaattaatcagccataaaattcttagacaaataaaaaatggtagttctaacttaaacatttcttatagtaaaacacacataatgaactaccttatatccatctatgtaataaactcttaaattagacacaacaatg

SEQ ID NO: 308437 - DNA, 8788 bp, Cannabis indica
tatttaatgaatttatttagggcacaaaacccaacagtttgtaatgttgagattgttctcacaactctctctctctatatatatatatataaatatatatgtgtgtatatgaatactactactattagtactttatattgtatttttatttgttgtttattgtaatcttttcttcatctcattagtctgttttatgtgtataattttgtcaagatttgtaacattatttaattccttattttgtaattgttttattttgcattgactgtacgtttgtttgttattctattgaagcgctaatgttttcaacaattaaaagtttaaccttcctacctagcttcaatggaaggtgagaccatcaaaatgatgaatcaagacccagtaaggttggataggtttgatgaatccaactttactaggtggcaagataaaataaggcttctcttgaccacactcaagatagcttatagacttgagtcaaccttggagcctctacccgcttcaaacgagaaagacactcctgagatggtagagaagagagaggaggacaatctcttatgtagaggtcatattcttagtgtcttatctaataggctataagatctctacactaataccaaatccgcgaagaagatttggaagcaaaatacaaggcaaaggaggaaggtacaagaaattttttattttctcaatgttttgaattttcttttagtgatgttaaagatcttcttcctcaaacccataagttacaatcattgtgaaaaagttagagattctcaagattgagcttctgaaggaatttcaagttggtgcaattgaggcaaagttaccaccatcttggaagggctatatgaaaagaatcctccataaaaatgagaattattctttaaaagagatctaaaagcatatctaaatcgaagaagaattgagattgagagattaaagaaatgtgaatgaacttaaagatgacgtttttaaggccatagcggtctcaaacaagcattacaaaggcagcaaccatagtaaaagtggtggaaaatatttgagtctaagaaaagacaatagtcaatttaaagaagtgtgtgggaagtgattatggcataatacttatgttgtttttgtgagatgagtgtttatgtattgcatatttaaataaagcttgtgtagttataactaaataaagtttatttcactttatttttgtgtgtttggtgcattactttgagaataaaaattttacaaagtttcaaataacttttgttaattgagtacggttaatgtgtgaaataattttattaattttgagtaatattttgagtttgacattggttttgatgagaagaaaaagatgtcaaattagtgtttaaaaattgatctcaaaatcattttagaaaaatatacaaagtggtcaaatatttatgagataatatttttttgaggaaattactgcacgcacctaaatgtgtaatctacctagagttagcaaattaaaagcttttctctctctagagccttctagtaagtatgcagtccctctccttgtctttgtcatgtttggttcctctcatggaggattttgtccaccctaactggtatagtggtgggttgactttgggtaaatatccttttttgcctatttctcctccctccctatgtaataaatgctctaggtgttattatgtttccatttcacatctcattaaatttgatcagagcattaattgctctaaatccttccttctgccctccctaattaatttttcccatcattctattttgtcttctcgccatttactccagatttcccatatctatactcagaaaaacccccttgattattttaaattggaggcggacgatcggtttcccagagtctttcaggctcttctcattattacagcttcaatggatgcgacttcggacgtgactagggcggttctcaggtgtatcatccaagctttttggttttatatatataattccaaactcaggtattttgttcctcatcaccttctttttgccttgcttatttatgttcatattgttgtgttttctctctttcttgaaatggatgagtttttcaataatgtgtctaataccctggttcttccctctgatgagtccactgtcttcacctatgatactggttcttccagttctgatcctgccccaattagtctccttcttaagttgcacattattcgtccttacaataggccttctctgatgaagaccctatctggtatttggtcatcgcagtgtaggtttcctgttactgtttttgagcatgcggatggcatgtttcttgtatcatttggctgtgagggggataagtgtagaattctagagggtcaaccatggcattttgcctagtgtcttaccatatttgctgccccagatagttcccttcccacttacttctgataatcttcattatgtccccttttggattcaagtgtatggtatcccatttatgtgtaagtcctatgaccttgctagatttatagctatggagattggtgaccttattgaggttgataaggacactattaaggaaggcactggtccttatttgcgtctgagagttcttttggatgtaaatctgcctattaggaggggtatgaatattaagtttattaggatggggcgtgagtttgttaaatggattgactttaagtatgaaagattgccaaacttctgtttcttttgtgggaagttagatcatacaaaaaaaattttgtgtggctttcttacaaagatgtgatgaactcctcactgaacctttgtgcccctataatattcttcttagaggcaaagaaaagatcactgataagtctcagccttttcaatatccccatcctccagccattactatggttaactaccatcatgtgaacttgaatctgccaccccaacccttttctaatcagacaattaccttcccctcctttctcagccttaatgatcactttactggtcctttttcctctcccccagccactaaggttcttatgatgccaactcctttgaatcccaacttcgctgatgtaacttcactatctatccgtcccaactttgacatttccttgaggccatctgcttttacctcctattccactgattccttgattgtggctgacaagcctgttgatcaactgcgtgcttcctctactggtcctgctgtttctgtttcattttctggtggtgagtctactctgggtgctagctcttcttagggccttcctgatcctgctgttcgtgggaagggcttagcctctgcctctggagttaagaggccttccttccaaccacatcatgtggtggttggaagctctgtcaggtcccaactgaagcgtgttcgtgctggtgatagagaagaggactcttctcctactgctgacaatttggaacaggcgggtgttgctatgcacacccgcccagaaaaatgagtgtgctaagttggaatgcacgtggtttggggagtacacgtgcattcaggaggctctccctacttgtcaaggaccactgccctgatatagtttttttgatggaaactagactgcctgttatggctgtagatcgtgttagagtagctttaagttttgatcatggttttgaagtccctaggaagtattttggaggtggacttcttcttttgtggaaagctactatctatgtaaatattttatcttactctagtaatcatatagattgtaatataagttttaatgataatgaaatgttccattttactggtaattatggctcccttgttgcttctaatcgtgtttatacttggaatcttttggaaaaaactttttctaatgccttcaatcttccctggtttattatgggagatttcaatagttttttgttttttgatgataaagttgggagcacttattataatcacagtgatatggagaggtttgcccattttcttgataaatattgcctctctcccctttcttttgagggggacaagtatacttggcataatcagtctgttcatgaacgtcttgattgggctctgggttctgaatcttggaggaacctttttcctaatgctaatttgcaccatttgcctttttatggctcggatcatcgtcctcttaaggtttttcttgctgaaaatgttgtgtctagagttcaatcttttaggaagcgtttccaatttgaaaatatttggcttcaaagccctgagtttttctccactgtctaggactcttggaagtattcttctcgagtctcttctcatgcaaatgcttttagtgagtttctcttttgccaagatgcttgtgtttctgctctaaagtcttggaacaaatccactaaggttatgtttcaatcccgaattcaggatactcaaaaagagatagctaggcttcaaaattctgcttcttctagtcgagagactgcccttagaattcaaaatcttcagtcttagctggatgctcttctttataaagaggagttctattggaagcaaaggtctagggttaattggcttagagcaggcgataagaatactaagttttttcataggtttgcttcccataggaagaataataatactattaaatacttaaaggatgacttcggcaatagtaccaatgatcctgaagctatgtttggcatagtttcgtcttttttcactgatcttttcagttctgagggttgtgatgctgaggcaacaaatcaaattttggactgtttaggacccccctagatgagtctaatattgagttcttggccaggcctttcacagcttctgaagtgaaaaaagcgatcttcagtctatctggggacaaagctcctggtttggatggtttaaatgcttttttctatcaaaaaaattggaatactctgggagccaattttgttaatgcgattttagattgtttaaataagggtgttctggtattaatactactcttattgttttaattcccaaaaaacagcatgccaattctctaaaagattttcgacctataagccttttaactactatgtataaagttatttctaaagttttagcgaatcgacttaaagtagtccttgataagattatctctccttttcaaagtgcctttgtttctgggcgtgttatctttgattatattcttattgcccaagaaatagttcatgcaattaataatagaaggcatggtaattgtggcagggctgctcttaaactcgatatggctaaggcctttgatcgtgttgaatgacattttttggagagctttatgtttcactttaatttttccctcaattttgttagactaattatgaattgtcttactactactaatctttcttttcttcttaatggtaaagtttttggttctcttaagccttcgagaggtcttaggcagggggattctttgtccccatatctttttattctttgtactgaaggcttatcttctcttcttagaatgaggcaggatgctcatattctcaatggtattgctatctctagacatgctcctgctatttctcatttattttttgttgatgatagccttttgttttgtactgctgataggaattcttgccttgctcttcaggatgtatttaatatctattctaaggcttctgggcaggccattaatttctctaaatcttatattcttttttctcctaatactgttcctgatattcgtgctttgttttttcaaatttttaaccttgaggatcggccttttggttgtaaatatttaggtcttcctcaatgtcttactaggtctaaatatcactctttcacctatctgtctgataaagttgcttctgttctgagaagttggtcttccaagtgtttctctagagctggaaaagaggttctcttgaaggctgtcatccaagccatccctgcttatgctatggcttgttttaggcttcctgttaaaatttgtaaaggaattgaggctgcgatggctagattctggtggggttctactggggaggctaggaaagtccattggaaatcttggaagtttctttgtcagtctaaatttaagggtggtttagggtttaggtctcttgtgcatttcaaccaagctatgctcgctaagcaggcttggcgtgtactccagaaccctaattctttgcttagccggatccttaaagctcggtattttcctcgttcatctattcttgaggctgtccctggtcatagtccatcgttttcttggagaagtattttatggggtagagacctgatggcttctggccttatttggaaagtgggcaatggatatgggatccaaactttgggtgatcattggcttcctaatcatcgattcaagttctttacttcaactaatccacctccttcttctcacactttgtctttttttctcactgattcgggcacttgggatgtgagtaaattgcagtcctactttgatgagtccatggtccatgatattcttgctgttcctgtttctggattttatggtcatgataagctgatctgggaaaaggagaattctggttgttttactgttaagtcggcttatcatttagctttttccaatcaggatctcccatcttcttcttctttttctgaatcaaaaaagttttggacaaaaatttggtcttcttctgctcctcccaaggttaaactttttgtctggcgtttgttatctaaggctatccctgtggctttttctttgtttaaaaaatgtgtgattaattctcctttgtgtcctgtttgtaagatggagaatgagactactaagcatgctttactagattgctccagggtaaggaaagcttggcgatattccaggtttgcaacttattatgatacttataaaaatttggatattgatgagttttttcttggtctgtttcaaactttggacaaacatgatattggtattttgttttgttttatttggtctttatggaaccaaaggaataaatttgttcataatcagtatacggttcctccaaaagaagtgtatgattgggctcttattttttctttaagtttttggatgctcagcaacatcctgccacaggtttccaatcagctcctcgttcgaatccagtgcagtcatattcttctacagggcttaaacttttcacagatgcagccattgattccaataattggaggcacagtatcggagtggtggttttagatgctgataatgcagtcaaagctggtttttctgctcctttttctgggttggtgccacctgcggttgctgaagctaaggctatttttcaggaaattcaatgggctcagatgatttctctccctgtagatgtcttgctcacaagtattaagaactcttgtaattggaataatagtgtgttagatgatgtattagttaatattaagaaattgtaatctttcagtccaaggctagctatctcttacatccctagggaaagtaatgttcttgctcataatttatctaagctaggccttggattagataatgagttagtttggaatggttctttaccttccatttagcttgtagctttatttgctttgtattgcttcctgttttaataaagcacaagtatttccaaaaaaaaaaaaaatctacctagagttagtagtttatttataggcaaataaagagaaaaaataaaactaacaaagtggtttatagttcaattgttaaatttattagagattatcatgaaaagattcatgataattgttcatgcgcatgtagaaataaaataaaagagagtgtatttataaagagaccttataattttacctatggggttgatgttacaatattcatcaagcaatttgataatggaatggggacatgtgaagtttatgcatgtttggtgcctaaaatatgagtataacttatacatgtttggtgtctagtgatagtgcataattttgatatgcttggtatcaaaatttgtgaaaaattaattgagaaaatgtgaaaattattcttatgtgatttatttttcgaatcttaagtatactttaggagaaaagttgtcatactaaaagtagaccctacaaggtctcttaattaacaaataaaccatgaatgctctttttcttcttaaatttgtccttccttagtgaaactcatcataaataagacatagccttacttagaattttaattgataaattaaaatcaattaattgggtctacatgacaatattatctcatgtagtgtggggaccctaagcctatataatcaagctcccaataagtagttctagaatttaccaagtaaattatctatcttattaattcttcctgactcgactatagatttgaaattgcactcttgattacatagaatgctctattcaccaagaatagatacgttatgaattatacattatttcaatctaaataatcaatgatcctctataaacggtctacattgagtagggacaaaatcactgttttacccttcaatgtattttatccttaaaacactaaactacttctaaataatatttctagaaactaatataattactaatatgagtactccaccatttaaactcgcttagccaagctataaggaaaccactaccgtgttcccaatatgtaagtctatgtttataggtaagttgtaatgaacaagtcaaagaacacgtttgagttggaacctaaccatctcatgaatgagatcattgatctaagatcaacatagtgatattgacttagaaaagatattacagtaagtttacgatatctttttcactgtgaatatcaatccagtccgatacaagttgtaatgaccgctctagtaatttggattagtaaaggca

SEQ ID NO: 308438 - DNA, 860 bp, Cannabis indica
taaaatatttccaacaatccattagaacaacaaaaagacgtgcacaaaaacgttctgaatgtcaaagaactctgcaaataaagcagaacatcgggagatcctcgtatttaaacatcgcatagcaggattccccctattttttcagtcgcattctcttcttcaaaggcagacagagcaacattaacctttactctaatccgtaaatactccctccatactccagtaaaattcctagggtccgattcaatggacgtcccaatgtaatttccgatgtctctagcaactcgtacagacataaaaccagatgacatttcatgtagttgaacccataagtccaaacgattcaaagagacaagcctaggattttcacctagctttaaccgttcaaaaaccaagggcacccgatcaaaggtccaagggctcccttcaatgactctatcattatcaacatcatggtaaaactggaacaaaaaaatggttcagatccaattccttcacatacataccttttcccagctgccatagagttgccatcttatgttgcatggcctaaaaatctatagacctattggtaaggaagcggccaaccaagcaccatctatcgtcaatctcataaagagcatccacatcatcctcgtaacacataaccacatcttcttcctcatcaaaatgaccatcttggaactcagagttcatactcggaccacctctgaatctaggatccatagggcttgaaaacaccagaaaaatcacacaccaacaaaacaactaacactttgaacactcaaaccatgtcatacgacaagactataagaaaaatttattattattttaatatgtaagacaataaaaaaataata
